United States Patent Application Publication US 2018/0126003 A1 - sequence listing, part 162

SEQ ID NO: 284508 - DNA, 5346 bp, Artificial Sequence
  derived and/or modified sequence
atgtccggcgaggtgagattacgccaattagagcaatttatcttggatggccctgctcaaacaaatggtcagtgcttcagcgtggagacactgctggacatcctcatctgcctgtatgatgaatgcaataactcacccctccgcagagagaaaaatatccttgaatacctggaatgggcgaagccgtttacttcaaaagtgaaacagatgcgcctacatcgagaagatttcgagattttgaaagtgatcggacgtggcgccttcggtgaagtggccgttgtgaaacttaaaaatgcggataaagtgttcgctatgaagattcttaataaatgggagatgcttaaacgggcggaaaccgcttgttttagagaggaaagggacgtgctggttaacggggataataagtggattacaacgctgcactacgcgttccaggatgacaacaatctctacttggtcatggattactatgtgggcggggaccttttaactctcttgagcaaatttgaagataggctaccagaagacatggccagattctacttggcagagatggtgatcgccattgatagtgtgcatcagctgcattatgtgcacagagatattaaaccggataacatcttgatggatatgaatgggcatattcgcctcgccgactttggatcctgcctgaagctgatggaagacggtaccgtacagtccagcgtagccgttgggactcccgattatatcagcccggaaatcctgcaggctatggaagatggcaaaggccgatacggcccggaatgcgattggtggtccttaggcgtgtgcatgtatgagatgctatatggcgaaactccgttctatgcagagagccttgtcgaaacctacggtaaaattatgaaccacaaagagcggtttcagtttcctgcgcaagtcaccgatgttagcgagaacgcaaaggatctcatcaggagacttatctgctcgcgcgaacatagactcgggcagaatgggatagaagacttcaagaagcacccgttcttttctggtattgactgggacaatatacgaaactgcgaggcaccttacatccccgaggtatcatctcccaccgatacatccaattttgacgtggatgacgattgtctaaaaaactcagaaacaatgccaccaccgacgcacacagcattcagtggtcatcatcttccgttcgttggatttacctatacctcctcatgtgttctatcagatcgttcctgcttacgtgttacagctgggccaacaagcttggacttggatgtgaatgtgcagagaaccctggataataatcttgccacagaggcctatgagagacggataaaaagactggaacaggagaagttggaactgtccagaaaacttcaggaaagtactcaaaccgtacaggcactccaatactctactgtggatggaccactcaccgcttctaaggacctggaaatcaaaaatctcaaagaggaaattgagaaactcaggaagcaggttactgaatcatcccacctagagcagcaactggaggaagccaacgcagtcagacaggagctggatgatgcgttccggcagattaaagcatacgagaaacagatcaagacactgcagcaggagcgcgaggatcttaataaagagctggtgcaggcctctgaacgcctgaagaaccagtcaaaagagctgaaggatgctcactgtcaacgaaagctggcaatgcaggagttcatggaaatcaatgaacgcctgacagaattgcatacacagaagcagaagctcgccaggcatgtgcgggataaggaagaggaggtggacctggtcatgcagaaagtcgagagtctgcggcaagaactgagacgcactgagagggccaagaaagaactggaagttcacactgaggctctcgctgcagaggcctctaaagaccggaaactgagggagcagtcggagcattattctaaacagttggaaaacgagttggagggcctgaagcagaagcagatcagttacagcccaggagtttgttctatcgaacatcagcaggaaatcactaaactcaaaacagatttggaaaagaaaagcattttttacgaagaagagctgagcaaacgcgaaggcatacatgccaacgaaattaagaacctgaagaaggagctccacgactccgagggtcaacagcttgccctgaataaagagataatgattctgaaggataagctggagaagaccaggcgggagtcccagtctgaacgggaagaatttgaaagtgagttcaagcaacagtacgagagggagaaggtgctcctgaccgaggagaataagaagctgacctcggaactggacaagctgacaacgctgtatgagaatctcagtattcataatcagcagcttgaggaggaggtaaaagatctcgccgataaaaaagagagcgttgcacattgggaggcccagatcacggagatcatccaatgggtcagtgatgagaaggacgcccgggggtacctccaggctcttgcatctaagatgactgaggaattagaagcacttagaaactcttccctgggcacaagagccacagacatgccatggaagatgcgacgctttgctaaacttgatatgagcgcaagacttgagttacagagtgcacttgatgcagagatcagagccaaacaggctatccaggaggagctgaacaaggtgaaggctagtaacatcattaccgagtgcaaactcaaggattccgagaagaaaaatctggaactcctgtccgaaatcgagcaactgatcaaggacacagaggaacttagatcagaaaaagggattgaacaccaggactctcaacatagctttttggcatttttgaatacgccaaccgacgcccttgatcaattcgaaaccgtggacagcacgcccctgtcagtgcacaccccaacgttaaggaaaaagggctgcccgggcagtaccggctttccgcccaaacgaaaaactcatcaattctttgtgaaaagtttcaccactcctactaagtgtcaccagtgcacgagtctcatggtgggtttaattcgccagggatgtagctgtgaggtgtgtggctttagctgccatatcacatgcgtcaacaaggctccaactacgtgtcctgtaccacccgagcagactaaaggaccgcttgggatagaccctcagaagggtatcggaacagcatatgaaggacacgtaaggatcccaaagcctgccggggtgaaaaaagggtggcagcgcgcgttggccattgtgtgcgattttaaactttttctctatgatatcgctgagggaaaagctagccaaccctccgtggttattagccaggtaattgatatgagagacgaggagtttagcgtgagctctgtcctggcttccgatgtgatccatgcatcccgaaaagatatcccatgtatcttccgggttacagcgtcacagctgtcagcgagcaacaacaaatgttccatcctgatgctggcagataccgagaacgagaagaacaagtgggtgggggtcctgtccgagctgcataagatcctcaaaaaaaataagttccgcgacagatctgtgtatgtgccaaaggaggcgtacgactctaccttgcctcttatcaaaacaacacaggccgctgcgatcatagatcatgagcgaatcgccctgggaaacgaggaaggactattcgttgtgcacgtaacaaaggacgaaattattcgagtgggtgacaacaaaaagattcatcagatcgagctgattcctaacgatcagttagtggccgttattagtgggcgtaataggcacgtgagactgtttcccatgtcagccctggatggcagagaaacagatttctataagctttccgaaactaagggctgccagaccgtcacgtcaggaaaggttcggcacggcgctctgacgtgtttatgcgtcgcaatgaagagacaggtgctgtgttacgagctgttccagagcaagacgagacaccggaagttcaaggagattcaggtcccttataacgtgcaatggatggccattttctctgagcagctgtgtgttgggttccaatccgggtttttgaggtaccctttgaacggagagggcaatccttacagtatgctacactcgaatgatcatacactcagttttatcgctcaccaacccatggacgcgatatgtgccgtggaaatcagtagcaaagaatacttactctgcttcaactcaattggcatctatactgattgtcaggggcgtcgctcccggcagcaagagctcatgtggccagctaacccctcgagttgctgttataacgctccctacctatccgtttactctgaaaatgccgtcgacatctttgacgtgaactcaatggagtggatacagacactcccgctcaaaaaggtcaggcctctcaacaatgagggcagtctgaacctgctgggcctggagactattaggctaatctattttaaaaacaagatggccgaaggggacgaacttgtggtcccggaaaccagtgataacagtagaaagcaaatggttaggaacatcaataacaaacggcgctattccttccgcgtacctgaggaagagagaatgcaacagagacgggaaatgcttcgcgatccagagatgagaaacaaattaatcagtaatcctactaatttcaaccacatcgcccacatgggcccaggcgatggtatacaaatccttaaagatttaccaatgcctggcttcccctatccttctccccaccaccactccggacttatttcatctccaatcaatttcgagcatatctatcatatgacagtcaattccgcggagaagttcctgagcccagattcgattaacccagaatactctccctcactccggagcgtgcctggaaccccctctttcatgacactccgcaaccccagaccgcaggaatcgcgcactgtgttcagcggcagcgtgtcaattccttccatcactaaatctcgacccgagccaggccggtccatgagtgcatcttccggcctgtcagcacggtccagtgcccaaaacggcagtgctctgaagagggaattctctgggggttcgtacagtgcaaagagacaaccaatgccttccccaagcgaaggctctctttcctccggcggaatggatcagggaagcgatgcccccgcccgggacttcgatggggaagattccgacagtccacgccattctaccgcaagtaactcatcaaatctaagctcacccccctctcccgccagtccaaggaaaacaaagagtctcagtcttgaatctaccgatagaggatcatgggacccatag

SEQ ID NO: 284509 - DNA, 2955 bp, Artificial Sequence
  derived and/or modified sequence
tgacagctcgaagaagaggtgaaggacttggctgacaaaaaagaatcagtcgcgcattgggaggcacagattacagagattatccagtgggtctccgatgagaaagacgcacggggttacctgcaggcgttagctagtaagatgactgaagagctggaagcactgcggaatagcagcttggggacacgcgcaactgacatgccatggaagatgcggcgatttgccaagctcgacatgagtgcccgcctggaactccagtctgccctggacgccgagattagggcgaagcaagctattcaagaggaactcaataaggttaaggccagtaacataattaccgaatgcaaactgaaagatagcgaaaagaagaatcttgaattattatcagagatcgagcagctgattaaagataccgaagagttgaggagtgaaaaggggatcgagcaccaggactcccagcattcctttttagccttcctgaacaccccgacagatgccctcgatcagttcgagacagtcgacagcacgccgctcagtgttcataccccgaccctgcgaaagaaaggttgtcctggctccaccgggttccctccgaaacgcaaaacacaccagtttttcgtgaaaagcttcacaacaccaacaaagtgccatcaatgtacatcactgatggtgggcctcatccgccagggctgctcctgtgaagtttgcggatttagctgccatattacatgcgtcaataaggcgcccaccacctgtcccgtgcccccagagcagactaagggcccacttgggatcgaccctcagaaaggcatcggtacagcctatgaggggcatgtcagaatccccaaaccggccggcgtgaagaaaggttggcagagggcccttgcaattgtctgtgacttcaagctgtttctgtatgatatagcagaaggcaaagccagtcagccttccgtcgttatctctcaggtgatcgatatgcgcgacgaggaatttagtgtcagcagcgtcctggccagtgacgtcatccatgcctcgaggaaggatattccatgcatctttcgcgtgaccgctagccagctcagtgcttcgaataataagtgcagcattcttatgctagctgatacagagaacgaaaaaaataagtgggtcggagtgctgtctgaactgcacaaaatcttaaaaaaaaataagtttcgagatcgctctgtttacgtgcctaaggaagcctatgattccacactgcctctaatcaaaactacccaggcggcagccatcattgaccatgagagaattgcccttggcaacgaggaaggcttgttcgtggtgcatgtcactaaggatgaaatcattcgcgttggagacaataagaaaatccaccaaatcgaactaatcccaaatgatcagctggttgctgtgatttctggacgtaacagacacgtgcgcctcttccctatgtctgcgctcgacggcagagagaccgacttttacaagctgtctgagactaaggggtgtcagaccgtgaccagtgggaaggttcgccacggcgccctcacctgtctgtgcgtcgcgatgaaacgacaggtgctctgctacgagctatttcagtccaagacaaggcacagaaaatttaaggagatccaggttccctataacgtccagtggatggccatcttctccgagcagttgtgcgtgggcttccagtccgggttcttgagatatcctcttaatggtgaaggcaacccctattcgatgcttcactctaatgaccataccttgtcatttattgctcaccagcctatggatgctatctgtgcagtggagatatcgtccaaggagtatctgctgtgcttcaatagtattggaatttacaccgattgccaggggagacggagcaggcagcaggaactgatgtggcccgctaaccctagcagttgctgttataatgctccctatctctccgtttactcagagaatgctgttgacattttcgacgttaactccatggaatggattcaaaccctgccccttaagaaggtgcgaccattgaacaatgagggctcattaaacttgcttggacttgaaaccatccggctcatatattttaagaataagatggccgaaggcgatgagttggttgtccccgaaacgtcagacaactccaggaagcagatggtacggaacattaacaacaaacggcgttactccttccgagttccagaggaagaacggatgcagcaacgcagagagatgttacgcgaccccgagatgcgcaacaagctgatctccaaccctactaatttcaaccatatcgctcatatgggccctggagatgggattcagatactcaaagacctgcccatgcctggatttccttacccgtcaccccaccatcatagcggcctgatatccagtccaattaattttgaacatatctaccacatgactgtgaactccgccgaaaagttcctgtcgcccgatagcattaaccctgagtattctccatccctacggtcagttcctggtaccccttccttcatgaccctgagaaacccgaggccccaggagtccagaacggttttttccggcagtgtctcgataccaagcattactaaaagccgccctgagccgggccggtcaatgtccgctagtagtggcctctccgcccgctcctccgcccagaatggctctgcactgaagagagagttctcagggggctcttactcagcaaagcgccaaccaatgccgtctccctcagaggggagcctcagcagcggcggtatggatcagggtagtgatgcccctgctagggactttgatggcgaagatagcgactccccacggcacagcaccgcttcaaatagcagtaacctgagtagtccaccctcacctgccagtccccgaaagaccaaaagtctttctctcgagagtacagacagaggtagttgggatccatag

SEQ ID NO: 284510 - DNA, 5346 bp, Artificial Sequence
  derived and/or modified sequence
atgtctggagaggtgcggctgcggcagctggagcagttcatcctggatggccctgcccagaccaacggccagtgcttctctgtggagaccctgctggacatcctgatctgcctgtatgatgagtgcaacaacagccccctgcggcgggagaagaacatcctggagtacctggagtgggccaagcccttcaccagcaaggtgaagcagatgaggctgcacagagaagattttgagatcctgaaggtgattggccgcggggccttcggggaggtggccgtggtgaagctgaagaatgctgacaaggtgtttgccatgaagatcctgaacaagtgggagatgctgaagagagctgagacagcctgcttccgggaggagagagatgtgctggtgaatggagacaacaagtggatcaccaccctgcactacgccttccaggatgacaacaacctgtacctggtgatggactactacgtgggcggggacctgctgaccctgctgagcaagtttgaggaccggctgcctgaggacatggcccgcttctacctggccgagatggtgattgccattgattctgtgcaccagctgcactacgtgcaccgggacatcaagccagacaacatcctgatggacatgaatggccacatccggctggccgactttggcagctgcctgaagctgatggaggatggcaccgtgcagagctctgtggccgtgggcaccccagactacatcagccctgagatcctgcaggccatggaggatggcaagggccgctatggcccagaatgtgactggtggagcctgggcgtgtgcatgtatgagatgctgtatggagagacccccttctacgccgagagcctggtggagacctacggcaagatcatgaaccacaaggagcgcttccagtttcctgcccaggtgacagatgtgtctgaaaatgccaaggacctgatcagaagactcatctgcagccgggagcaccggctgggccagaatggaattgaggacttcaagaagcaccccttcttcagcggcatcgactgggacaacatccggaactgtgaggccccctacatccctgaggtgagcagccccacagacaccagcaactttgatgtggatgatgactgcctgaagaacagcgagaccatgcccccacccacccacacagccttcagcggccaccacctgccctttgtgggcttcacctacaccagcagctgtgtgctgagtgacaggagctgcctgcgggtgacagctggccccaccagcctggacctggatgtgaatgtgcagaggaccctggacaacaacctggccacagaggcctatgaaagacgcatcaagaggctggagcaggagaagctggagctgagcaggaagctgcaggagagcacccagacagtgcaggccctgcagtacagcacagtggatggccccctgacagccagcaaggacctggagatcaagaacctgaaggaggagattgagaagctgaggaagcaggtgacagagagcagccacctggagcagcagctggaggaggccaatgctgtgcggcaggagctggatgatgccttccggcagatcaaggcctatgagaagcagatcaagaccctgcagcaggagcgggaggacctgaacaaggagctggtgcaggccagcgagcggctgaagaaccagagcaaggagctgaaggatgcccactgccagaggaagctggccatgcaggagttcatggagatcaatgaaaggctgacagagctgcacacccagaagcagaagctggcccggcacgtgcgggacaaggaggaggaggtggacctggtgatgcagaaggtggagagcctgcggcaggagctgcggaggacagagcgggccaagaaggagctggaggtgcacacagaggccctggccgctgaggccagcaaggacaggaagctgcgggagcagagcgagcactacagcaagcagctggagaatgagctggagggcctgaagcagaagcagatctcctacagccctggggtgtgcagcattgagcaccagcaggagatcaccaagctgaagacagacctggagaagaagagcatcttctatgaggaggagctgagcaagcgggagggcatccacgccaatgagatcaagaacctgaagaaggagctgcatgattctgagggccagcagctggccctgaacaaggagatcatgatcctgaaggacaagctggagaagacccggcgggagagccagagcgagcgggaggagtttgaaagtgagttcaagcagcagtatgagcgggagaaggtgctgctgacagaggagaacaagaagctgaccagcgagctggacaagctgaccaccctgtatgagaacctgagcatccacaaccagcagctggaggaggaggtgaaggacctggccgacaagaaggagagcgtggcccactgggaggcccagatcacagagatcatccagtgggtgtctgatgagaaggatgcccggggctacctgcaggccctggccagcaagatgacagaggagctggaggccctgaggaacagcagcctgggcacccgggccacagacatgccctggaagatgagaagatttgccaagctggacatgtctgcccggctggagctgcagagcgccctggatgctgagatccgggccaagcaggccatccaggaggagctgaacaaggtgaaggccagcaacatcatcacagagtgcaagctgaaggacagcgagaagaagaacctggagctgctgtctgaaattgagcagctgatcaaggacacagaggagctgcggtctgagaagggcatcgagcaccaggacagccagcacagcttcctggccttcctgaacacccccacagatgccctggaccagtttgaaacagtggacagcacccccctgtctgtgcacacccccaccctgaggaagaagggctgccccggcagcacaggcttcccccccaagaggaagacccaccagttctttgtgaagagcttcaccacccccaccaagtgccaccagtgcaccagcctgatggtgggcctcatccggcagggctgcagctgtgaggtgtgtggcttcagctgccacatcacctgtgtgaacaaggcccccaccacctgccctgtgcccccagagcagaccaagggccccctgggcatcgacccccagaagggcatcggcacagcctatgagggccacgtgcgcatccccaagccagctggggtgaagaagggctggcagagggccctggccatcgtgtgtgacttcaagctgttcctgtatgacattgctgagggcaaggccagccagcccagcgtggtgatcagccaggtgattgacatgagagatgaggagttctctgtgtcctctgtgctggccagtgatgtgatccacgccagcaggaaggacatcccctgcatcttccgggtgacagccagccagctgagcgccagcaacaacaagtgcagcatcctgatgctggccgacacagaaaatgagaagaacaagtgggtgggcgtgctgtctgagctgcacaagatcctgaagaagaacaagttccgggacagatctgtgtatgtgcccaaggaggcctatgacagcaccctgcccctcatcaagaccacccaggccgccgccatcatcgaccacgagcgcatcgccctgggcaatgaggagggcctgtttgtggtgcacgtgaccaaggatgagatcatccgggtgggggacaacaagaagatccaccagatcgagctgatccccaatgaccagctggtggccgtcatctctggaagaaacagacatgtgcggctcttccccatgtctgccctggatggccgggagacagacttctacaagctgtctgagaccaagggctgccagacagtgaccagcggcaaggtgagacatggagccctgacctgcctgtgtgtggccatgaagaggcaggtgctgtgctatgagctgttccagagcaagaccaggcacaggaagttcaaggagatccaggtgccctacaacgtgcagtggatggccatcttcagcgagcagctgtgtgtgggcttccagagcggcttcctgcgctaccccctgaatggagagggcaacccctacagcatgctgcacagcaatgaccacaccctgtccttcatcgcccaccagcccatggatgccatctgtgctgtggagatcagcagcaaggagtacctgctgtgcttcaacagcatcggcatctacacagactgccagggccgccgcagccggcagcaggagctgatgtggccagccaaccccagcagctgctgctacaatgccccctacctgtctgtgtacagtgaaaatgctgtggacatctttgatgtgaacagcatggagtggatccagaccctgcccctgaagaaggtgcggcccctgaacaatgaaggcagcctgaacctgctgggcctggagaccatccgcctcatctacttcaagaacaagatggccgagggagatgagctggtggtgcctgagaccagtgacaacagcaggaagcagatggtgaggaacatcaacaacaagaggcgctacagcttccgggtgcctgaggaggagaggatgcagcagaggcgggagatgctgcgggaccctgagatgaggaacaagctgatcagcaaccccaccaacttcaaccacatcgcccacatgggccctggagatggcatccagatcctgaaggacctgcccatgcctggcttcccctaccccagcccccaccaccacagcggcctcatcagcagccccatcaactttgagcacatctaccacatgacagtgaacagcgctgagaagttcctgagcccagacagcatcaaccctgagtacagccccagcctgcggtctgtgcccggcacccccagcttcatgaccctgaggaacccccggccccaggagagcaggacagtgttcagcggctctgtgtccatccccagcatcaccaagagcaggcctgagcccggccgctccatgtctgccagcagcggcctgagcgcccggagcagcgcccagaatggaagtgccctgaagcgggagttcagcggcggcagctacagcgccaagaggcagcccatgcccagccccagcgagggcagcctgagcagcggcggcatggaccagggcagtgatgccccagcccgggactttgatggagaggacagcgacagccccaggcacagcacagccagcaacagcagcaacctgagcagcccccccagccctgccagccccaggaagaccaagagcctgagcctggagagcacagaccggggctcctgggacccctag

SEQ ID NO: 284511 - DNA, 2955 bp, Artificial Sequence
  derived and/or modified sequence
tgacagctggaggaggaggtgaaggacctggccgacaagaaggagagcgtggcccactgggaggcccagatcacagagatcatccagtgggtgtctgatgagaaggatgcccggggctacctgcaggccctggccagcaagatgacagaggagctggaggccctgaggaacagcagcctgggcacccgggccacagacatgccctggaagatgagaagatttgccaagctggacatgtctgcccggctggagctgcagagcgccctggatgctgagatccgggccaagcaggccatccaggaggagctgaacaaggtgaaggccagcaacatcatcacagagtgcaagctgaaggacagcgagaagaagaacctggagctgctgtctgaaattgagcagctgatcaaggacacagaggagctgcggtctgagaagggcatcgagcaccaggacagccagcacagcttcctggccttcctgaacacccccacagatgccctggaccagtttgagaccgtggacagcacccccctgtctgtgcacacccccaccctgaggaagaagggctgccccggcagcacaggcttcccccccaagaggaagacccaccagttctttgtgaagagcttcaccacccccaccaagtgccaccagtgcaccagcctgatggtgggcctcatccggcagggctgcagctgtgaggtgtgtggcttcagctgccacatcacctgtgtgaacaaggcccccaccacctgccctgtgcccccagagcagaccaagggccccctgggcatcgacccccagaagggcattggaacagcctatgagggccacgtgcgcatccccaagccagctggggtgaagaagggctggcagagggccctggccatcgtgtgtgacttcaagctgttcctgtatgacattgctgagggcaaggccagccagcccagcgtggtgatcagccaggtgattgacatgagagatgaggagttctctgtgtcctctgtgctggccagtgatgtgattcatgccagcaggaaggacatcccctgcatcttccgggtgacagccagccagctgagcgccagcaacaacaagtgcagcatcctgatgctggccgacacagaaaatgagaagaacaagtgggtgggcgtgctgtctgagctgcacaagatcctgaagaagaacaagttccgggacagatctgtgtatgtgcccaaggaggcctatgacagcaccctgcccctcatcaagaccacccaggccgccgccatcatcgaccacgagagaattgccctgggcaatgaggagggcctgtttgtggtgcacgtgaccaaggatgagatcatccgggtgggggacaacaagaagatccaccagatcgagctgatccccaatgaccagctggtggccgtcatcagcggcaggaacagacatgtgcggctcttccccatgtctgccctggatggccgggagacagacttctacaagctgtctgagaccaagggctgccagacagtgaccagcggcaaggtgcgccacggggccctgacctgcctgtgtgtggccatgaagaggcaggtgctgtgctatgagctgttccagagcaagaccaggcacaggaagttcaaggagatccaggtgccctacaacgtgcagtggatggccatcttcagcgagcagctgtgtgtgggcttccagagcggcttcctgcgctaccccctgaatggagagggcaacccctacagcatgctgcacagcaatgaccacaccctgtccttcatcgcccaccagcccatggatgccatctgtgctgtggagatcagcagcaaggagtacctgctgtgcttcaacagcatcggcatctacacagactgccagggcagaagaagccggcagcaggagctgatgtggccagccaaccccagcagctgctgctacaatgccccctacctgtctgtgtacagtgaaaatgctgtggacatctttgatgtgaacagcatggagtggatccagaccctgcccctgaagaaggtgcggcccctgaacaatgaaggcagcctgaacctgctgggcctggagaccatccgcctcatctacttcaagaacaagatggccgagggagatgagctggtggtgcctgagaccagtgacaacagcaggaagcagatggtgaggaacatcaacaacaagaggcgctacagcttccgggtgcctgaggaggagaggatgcagcagaggcgggagatgctgcgggaccctgagatgaggaacaagctgatcagcaaccccaccaacttcaaccacatcgcccacatgggccctggagatggcatccagatcctgaaggacctgcccatgcctggcttcccctaccccagcccccaccaccacagcggcctcatcagcagccccatcaactttgagcacatctaccacatgacagtgaacagcgctgagaagttcctgagcccagacagcatcaaccctgagtacagccccagcctgcggtctgtgcccggcacccccagcttcatgaccctgaggaacccccggccccaggagagcaggacagtgttttctggctctgtgtccatccccagcatcaccaagagcaggcctgagcccggccgctccatgtctgccagcagcggcctgagcgcccggagcagcgcccagaatggcagcgccctgaagcgggagttcagcggcggcagctacagcgccaagaggcagcccatgcccagccccagcgagggcagcctgagcagcggcggcatggaccagggcagtgatgccccagcccgggactttgatggagaagattctgacagccccaggcacagcacagccagcaacagcagcaacctgagcagcccccccagccctgccagccccaggaagaccaagagcctgagcctggagagcacagaccggggctcctgggacccctag

SEQ ID NO: 284512 - DNA, 5346 bp, Artificial Sequence
  derived and/or modified sequence
atgagcggcgaggtgcggctgcggcagctggagcagttcatcctggacggccccgcacaaactaacgggcagtgcttcagtgtagagactttgcttgatatattaatctgcttatacgacgaatgtaacaactcaccattgaggagggagaaaaatatcctggaatatctggagtgggcgaagccatttacttcaaaagtgaagcagatgagactccaccgcgaggactttgagattctaaaggttataggcaggggggccttcggcgaggtcgctgtagtaaagctgaaaaacgccgataaagtttttgccatgaagattctgaacaagtgggaaatgctcaagagagctgaaacggcctgttttcgggaagagcgcgacgtgttggtcaacggggataacaagtggatcaccacactgcactatgcttttcaggacgataacaacctctatttagtgatggactactacgtgggcggggacctgctgacgctgctgtcaaagttcgaggataggctacccgaggacatggcccggttctatctcgctgagatggttattgcaattgatagcgtacatcagctacattacgtacacagagacataaaaccagacaatatacttatggacatgaacggtcatattcgtttggctgactttggctcatgtctcaagctgatggaagacgggactgtgcagtccagcgtggcagtgggcacaccagactacatttccccagaaatccttcaggccatggaggatggtaaggggcgctatggaccagaatgtgattggtggtctctgggggtgtgcatgtacgaaatgctctatggggagactcctttctatgccgaatccctcgtcgaaacctacgggaagatcatgaaccataaagaacgcttccagttccctgcacaggttacggacgtgagcgagaatgcgaaggatctaattcgaagactgatctgttcaagagagcaccggctcggccagaatgggatcgaggactttaagaagcatccattcttcagcgggatcgattgggacaacattcggaattgtgaggccccgtacatccccgaggtttcctcccccacggatacctccaattttgatgtggacgatgattgtttgaagaactccgaaacaatgccaccaccaacccacacggcattctccggccatcatctgccgtttgtgggatttacctatacaagcagctgtgtgttgagcgataggagctgtttgagagtgacagccggcccaacctctctcgacttagatgtaaatgtccagcgcacattggacaataatctggccaccgaagcatatgaaagacgtatcaaacgactagaacaggagaaactggagctgagtcgcaagttgcaggaatctacccagactgtgcaggccttacagtattccaccgtagatggtccgttgacagcaagtaaagacttggagatcaagaacctcaaggaggaaatagagaagctgagaaagcaggtgacagagtccagccaccttgagcaacagctcgaagaggcgaacgctgtgagacaggagctcgacgacgctttccgccaaattaaggcgtacgagaaacaaattaaaacgctgcagcaggaacgcgaggaccttaataaggagcttgtgcaggcgtccgagcgtctgaaaaatcagtcgaaggagctgaaagatgcacattgtcagagaaaattggctatgcaagaatttatggagatcaacgaacgccttactgaactccacacgcagaagcagaaactggcccgtcatgtgcgtgacaaggaggaggaagtggatcttgtgatgcagaaagtagaatctctcagacaagaactgcggcgtaccgagagggcaaagaaagaactggaagtgcataccgaagctctggccgccgaagccagcaaagatcgcaagctacgagagcagtctgaacactatagcaagcagttagagaatgagctggagggactgaaacagaaacagatcagctactcaccgggtgtgtgttctatcgaacaccagcaggagataaccaagctgaagacagatttggaaaaaaagtctatcttttatgaagaagagctctccaaacgtgaagggattcacgccaacgagataaaaaatcttaaaaaggaactgcatgattcagagggtcagcagcttgctttaaataaagagattatgatcctgaaagacaagctcgagaagactcgccgtgagtcccagtctgagcgggaggaatttgagagcgagtttaaacagcaatatgagagggagaaggttctcctgacagaggagaacaaaaaactaacctccgagctagataaactgacaacgttgtacgagaatcttagtatccacaaccagcagctggaggaggaggtgaaggatttggcggacaagaaggaaagcgtggcccactgggaagcccaaatcaccgagatcatccaatgggtgtctgacgagaaggacgcccgtgggtatctgcaggcactcgcatctaaaatgacagaagagctggaagctctgcgaaattcctcattaggtactagggctacagatatgccctggaaaatgcgccggtttgccaaactcgacatgtcagcacgcctggagctgcagagtgccttggatgctgagatcagggccaagcaggcgatccaggaagaactcaataaagtgaaagcgagcaacattatcaccgagtgcaagcttaaggattctgaaaagaaaaatctcgagctcttgagtgaaattgagcaactcatcaaagacacagaagagttacggtcagaaaagggcattgaacatcaggatagtcagcatagtttcctagcctttctgaatactcctactgatgccctggaccagtttgagaccgttgattccactcccctctctgtgcacacccccacccttcggaaaaaaggctgcccaggatctacaggatttcctccaaaacggaaaacgcaccaattcttcgttaaatctttcacaacaccaaccaaatgtcaccagtgcacttctttgatggtgggactcattcgtcaaggctgcagctgtgaagtgtgtggtttttcctgtcatatcacatgtgtgaacaaagcccccacaacatgccctgtgccgcctgagcagacgaagggccctcttggaatcgaccctcagaaagggattggcactgcctacgaaggacatgtgcgtatcccgaagccagctggcgttaaaaaggggtggcagcgggccctggcgattgtctgtgactttaagttgtttctgtacgacatagccgagggcaaagccagtcagccttctgtagtgatttcccaggtgattgatatgagggacgaggagttcagcgtgtcaagtgtgctggcctccgacgttatccacgcctcccgaaaagacatcccatgcatcttccgcgttacagcctcgcagctgtcagccagcaataataaatgctctattctgatgctggccgacactgagaatgaaaaaaacaagtgggtgggcgtgctttctgagctgcacaagatcttgaaaaagaataagtttagagaccgcagcgtgtacgtgcctaaagaggcttacgatagcactttgcctctaatcaagaccacgcaagctgctgcaataattgatcacgagcgcatagcactaggaaatgaagaaggactgttcgtggtgcacgtaactaaagacgagataattcgcgtaggggacaataaaaagatccaccaaatagaactgatccctaacgatcagcttgtagccgtcatttctgggcggaatagacatgtcagactgttccccatgagtgccctggacgggagggagacagatttttataagctgagtgaaaccaagggctgccaaactgttacgtctggcaaggttcggcacggagctcttacttgtttgtgcgtggctatgaaacgacaagtgttatgctatgagctgttccagagcaaaacacggcaccggaagtttaaggaaattcaagtaccgtataatgttcagtggatggcgatcttctctgaacagctatgtgtagggtttcagtctgggttcctgaggtatccccttaatggagaaggtaatccatacagcatgttgcactcgaacgaccatacactgtccttcattgctcaccagccaatggatgcaatctgtgcagttgagatttcatctaaagagtacttgctgtgctttaactctatcgggatctacacagattgtcaaggcaggcgctcaagacagcaagagctcatgtggcctgccaatccctctagctgttgttataatgccccatatctttcagtctattccgagaatgccgtcgacattttcgacgttaacagtatggagtggatccaaaccctgccgctcaaaaaggtccgccctcttaataacgagggcagtctcaatttgctgggcctcgagaccattcgattgatctatttcaaaaataagatggctgagggcgacgaattggttgtcccagagaccagtgataattctcgtaagcagatggtccgtaacatcaataacaagcgtcgctattctttccgagtacctgaagaagaacgaatgcaacaaagacgcgagatgctcagggaccctgaaatgcggaacaagttgatatctaatccaactaacttcaatcacattgcccatatgggaccaggagacggcattcaaatcttgaaagatctgcccatgccggggttcccgtatcctagcccccatcatcacagtggcttaatttcctcccctattaacttcgagcatatctaccacatgaccgtgaactcagccgaaaagttcctatcacctgactccatcaatcccgaatattcacctagcctgagatctgtgcctggcaccccgtccttcatgaccctgagaaatccccgacctcaggaatctcgtacagtctttagcggtagtgtgtctatcccttcaattaccaagtctcgcccggaacctggacgatccatgagcgcatcctcgggcctgagtgcacgctcttccgcccagaacggcagcgcacttaaacgcgaattctcaggaggcagctattctgcgaaaagacagccaatgccaagtccatcagagggctcgctgagttcaggggggatggaccaggggagcgatgcccctgctagggatttcgatggggaagattctgattcacctcggcattcaacagcgagtaacagtagcaatctcagctcgccaccaagccccgcctcaccacgaaagaccaagagtctttccctcgaatccactgatcgcgggtcttgggacccatag

SEQ ID NO: 284513 - DNA, 2955 bp, Artificial Sequence
  derived and/or modified sequence
tgacagctggaggaggaggtgaaggacctggccgacaagaaggagtccgtggcccattgggaagcacagattaccgagatcatacagtgggtctccgacgaaaaagatgccagaggctatctccaagccctggctagcaagatgacagaagagcttgaggcactgcgtaacagcagtttggggacgcgggctaccgatatgccttggaagatgcgccgcttcgccaagcttgacatgagcgcacgcctggaactgcagtcggccttggacgctgagattagagccaaacaggctatccaggaagaattaaataaggtcaaggcttccaatatcatcacggaatgtaaacttaaggatagcgagaagaagaatttggaactgctgtctgagatcgagcaacttataaaggacacagaggagctgaggagcgagaaaggcattgaacaccaagattctcagcattcattccttgcattcctcaacaccccaacagacgccctggatcagttcgagacagtagattccactccactatcagtgcacacccccacattgagaaagaagggatgcccgggatcaaccggattcccccccaagagaaaaacccaccagttttttgtaaaaagtttcactactcctaccaaatgccaccagtgtacaagcttgatggtcggactgatcaggcagggatgtagttgtgaggtgtgtggattcagctgccacatcacgtgtgtaaataaggctcccacgacctgtccagtaccccctgagcagactaagggacctctgggaatcgacccacagaagggaatcggaacagcttatgaggggcacgtaaggatcccaaaaccagctggggtcaagaagggatggcagcgagctttggcaatagtgtgcgatttcaaactctttttgtacgacattgcagaggggaaggcgtcccaaccttctgtggtgatcagccaagtcattgacatgagggatgaggaatttagcgttagctccgtgctcgcaagcgacgttatccatgcgtctcggaaagatatcccttgtatcttcagagtaacggcctcccagctgtccgcatctaataacaagtgttcgatcctcatgcttgctgacacggagaatgaaaagaataagtgggtcggagttctgtctgagcttcacaagatcttaaagaaaaacaaatttagagaccgtagcgtgtacgtgcccaaggaggcctacgacagcactctaccactcatcaagaccacccaggccgcagccattatagatcatgagcggatcgccttgggcaacgaagaaggcctgttcgtcgtgcatgtcactaaagacgaaatcattagggtcggggacaacaaaaaaatacatcaaattgaattaattcctaacgatcaactggtggccgtcatttccggacgtaacagacacgtgagactgtttcccatgtcagccctcgatgggagagagacagatttctataagttaagcgagacaaaggggtgccagaccgtaacatccgggaaagtaaggcacggcgccctgacttgtctgtgcgtcgccatgaaaaggcaagtcctgtgttacgagctgttccagtctaaaaccagacaccgcaaattcaaagaaattcaggttccatacaatgtgcagtggatggcaatatttagcgaacagctttgcgtggggttccagtcaggcttcctgcgttatccactcaacggggaggggaacccttactccatgctgcactcgaatgatcacacgttgagtttcattgcgcaccagcccatggacgccatctgcgccgtggagatcagttccaaggaatacctcctgtgctttaactctattggcatctacacagactgtcaagggagacgcagccggcaacaggaactgatgtggcccgctaatccctccagctgctgttataatgcaccctacctaagcgtttactctgaaaatgcagtcgacatattcgacgtgaacagcatggagtggattcaaaccctcccactgaagaaggtccgcccattgaacaacgagggaagcctcaatctgctgggcttagaaaccatccggcttatttactttaagaacaagatggctgaaggtgacgaactggtagtgcccgagactagcgacaactctcgcaagcagatggtgcggaatattaacaataaacgccgatactcatttcgggtgcccgaggaagaaagaatgcaacagaggcgtgagatgctgcgcgatcctgaaatgagaaacaaactgatctcaaaccctactaacttcaatcacatagcccacatggggccaggggatgggatccagattctaaaagacctgcccatgcctggatttccctaccccagtccacatcatcactcaggattaatcagcagccccattaacttcgagcatatctaccacatgactgtgaactccgccgagaaattcctctctcctgacagtattaatccagagtacagccctagtttaaggtccgtgcccggcaccccaagcttcatgacgctcagaaatccaaggccccaggagtccaggacggtgttcagcgggtctgtgagtatcccctctatcaccaagtcacggccagaaccgggtaggtctatgagcgcttcatctggactctcagctcgtagctctgcccagaacggatcggcgttgaaaagagagttcagtggtggatcttatagtgccaaacggcagcccatgccgagtcccagtgagggatccttgtcatccggcgggatggatcagggaagcgacgcccctgcaagagacttcgacggagaggactccgattccccacgccatagtactgcctcgaattctagcaacctgtcaagccccccttcgcctgcgtccccaagaaaaacaaagtctctcagtttagagtctactgaccgcggcagctgggacccgtag

SEQ ID NO: 284514 - DNA, 5345 bp, Artificial Sequence
  derived and/or modified sequence
atgtcaggagaggtgaggttgagacagctagagcagtttatcctcgatggacccgcacaaaccaacggacagtgtttcagcgttgagacattgttggacattctgatatgtctgtatgacgagtgcaacaactcaccactgagacgcgagaaaaatatcctcgaatacctggaatgggcgaaaccctttacatcaaaagtgaaacagatgcgactgcaccgggaggattttgagatcctgaaagtgattggacgcggagcttttggagaagttgcggttgtgaagttgaaaaacgctgacaaagtattcgccatgaagatacttaataaatgggagatgctgaaaagggctgaaaccgcctgttttcgagaggagcgagacgtgctcgtaaatggtgacaacaaatggattactaccctgcactacgcatttcaggacgataacaatctgtacctggtgatggactattatgtcgggggagaccttctgactttgctgagtaaattcgaggacagactacccgaagacatggcgaggttctacttagccgagatggtaattgccatcgacagtgtccaccagttgcattatgtgcacagagacattaagcctgataacatcttgatggatatgaatggtcacatccgcctcgccgacttcggctcttgcctgaaattgatggaggatggcacagtgcagtccagtgtcgccgtggggaccccggactacatctcgcctgagattctccaggccatggaggacggaaaaggacgatatggtcccgagtgtgactggtggtctctgggggtttgcatgtatgagatgctctatggtgagacccccttttatgccgaaagcctcgtggagacatatggaaagattatgaaccataaagagcggtttcaatttcctgcgcaggtcaccgacgttagtgaaaacgcaaaggacctcattcgacgcctgatctgtagcagggaacatcggctcggacaaaacgggatcgaggattttaagaaacacccctttttctctggtatagattgggacaacatcaggaactgcgaggccccatatatacccgaggtaagcagtccgactgatacgagtaactttgacgtcgacgatgattgtctgaaaaatagcgagacaatgcccccacctacacacacggccttctccgggcatcacttaccatttgtcggcttcacttacacatcttcctgcgtcctctccgatagatcatgcctgcgcgtcactgcagggccaaccagcctggacttggacgtaaatgtgcagcgaaccctcgacaacaatctggctaccgaagcgtatgagaggaggataaagcggttggaacaggagaagctggaactgagcagaaaactgcaggaaagtacccaaaccgtccaggctttacagtactctacagtggacgggcctttgaccgcttccaaggacctggagattaaaaacctgaaggaggagattgaaaaactgcggaagcaagtgaccgagtcatcccacctggagcaacaactggaggaagccaacgcagttcgccaggaactggatgatgccttccgccagataaaagcatacgagaagcaaattaaaacgctgcagcaggaaagagaagatttaaataaggaactggtacaggcttctgaacgcctgaaaaaccagtcgaaggagttgaaagacgcccattgccagcggaaactggcaatgcaggaatttatggaaattaacgaacgtctgacggagcttcatacccagaagcaaaagttagccagacatgtgagagataaagaggaggaggtggatttggttatgcagaaggtggagtcactccgccaggaactccgaaggaccgaacgtgctaagaaagaactggaagtccatacagaagcattagcggcagaagcctcgaaggacaggaagttgcgggaacagtcagaacactactccaaacagctcgaaaacgaactcgaaggcttaaagcagaagcagatttcatactcccccggagtgtgctcaatcgaacaccagcaggagatcaccaagctgaaaaccgaccttgaaaagaaatctatcttttacgaggaggaattatcaaaacgggaggggattcacgctaacgagattaaaaatctgaaaaaagaactccacgatagtgagggccagcagctcgccttaaacaaagagataatgattctcaaagacaagctggagaagacgcggagagagtcccagagcgaacgcgaagagtttgaatcagagttcaagcagcaatacgagcgggagaaagtgcttctcacggaggaaaacaaaaagttaacatctgaattggataagctcacaacactttacgaaaacctgtctatccataaccagcaactcgaggaggaggtaaaggacctggccgataagaaagagagcgtggcccactgggaggcacagataaccgagattattcagtgggtcagcgacgagaaagatgcccgaggctatctgcaggcacttgcatctaaaatgacggaggaactggaggccttaaggaacagctcgctgggaactagagcaacggatatgccatggaaaatgagaaggtttgcgaaacttgacatgagtgccaggctggagttacagagtgcccttgacgccgagatcagggccaaacaggcaatccaggaagagttgaacaaagtcaaagctagtaatatcatcacagagtgcaagctgaaggacagtgaaaagaaaaacctcgagctgctatctgagatcgagcagctgatcaaagacacagaagagctgaggtctgaaaaaggaatcgaacatcaggactcgcagcactcttttttggccttcttgaacacaccaacagatgcacttgatcagtttgagactgtcgattctacgcccctatcggttcacactcctacactccggaagaaggggtgtcccggtagcacaggattcccacctaagcgcaagacccatcagttcttcgtaaagtcctttacgaccccaacaaaatgccaccagtgcaccagcctgatggttggcttaatcagacagggatgcagctgtgaagtgtgcgggttcagctgccatatcacatgtgtgaacaaggccccaacgacgtgccctgtcccacctgagcagactaagggccctctaggcattgatccccagaagggaattgggaccgcatatgaaggacatgtgcggattccaaagccagcaggggtgaaaaaggggtggcagcgggcattggccatcgtgtgcgactttaagctgtttctctacgacatcgctgagggcaaggcatcacagccatcagtcgtgatcagccaggtgattgatatgcgtgatgaagaattttctgtcagctcggtgctagcgtcggatgttatccacgctagtcgcaaagatatcccatgtatcttcagagtcaccgcatcccaactgtccgcctctaataataagtgcagtatacttatgcttgccgataccgagaacgaaaagaacaaatgggtcggagttttgtccgaactgcacaaaatcctaaagaaaaataaattccgagatcgctccgtctatgtgcccaaggaagcatacgacagtactctccccctaattaaaactacccaggccgctgctattattgatcacgaacgcatcgccctgggaaacgaagagggccttttcgtggtccacgtcacgaaggatgagatcatcagggtgggcgataacaaaaagattcaccagattgagctcattccaaatgaccagctggtggctgtcatctcaggtagaaatcggcacgtccggctattccccatgtccgctcttgacggcagggaaacggatttctataaactgtccgagaccaaagggtgtcagacagtcacctccgggaaggtaaggcacggcgcactgacgtgcctctgtgtggcaatgaaacgccaagtactgtgctacgaattgtttcagagtaaaacaagacaccgtaaattcaaggagatacaagtgccttacaatgtccagtggatggcgatcttcagcgaacagttgtgcgtggggttccaatccggatttctgcggtaccctctgaacggcgagggtaacccgtatagtatgctgcactccaatgatcacactctttctttcatcgcccaccagccaatggatgccatctgcgccgtagaaatctctagcaaggaatacctcctgtgttttaatagcatcggaatttacacggactgtcagggcagacgctcccggcagcaggaactgatgtggccagctaatccctcaagctgttgttataacgccccttatttgagcgtatactctgagaatgcggtcgatatatttgatgtcaatagtatggaatggatacaaacgctgcccttgaagaaggtcagaccccttaacaacgaggggtcattaaacctgctgggactcgaaactatacggctgatttattttaagaacaaaatggccgagggggacgagcttgtggttcccgagacatcagataattcccggaagcaaatggtgcgaaacataaataataaaaggcggtacagtttccgtgtccccgaagaggagagaatgcagcagagacgggagatgttgagggacccagaaatgcgcaacaagttgatttcaaacccaaccaattttaatcatatagcgcacatgggaccaggagatggaattcagatattgaaggatctgccgatgccagggttcccctatccttctcctcaccatcactcaggactaatcagcagccccatcaacttcgaacacatttaccacatgaccgtgaactccgccgagaagtttctcagcccagattccattaacccagagtactcaccctccttaaggagcgttcccggtaccccatcattcatgacacttagaaaccccagaccccaagagtccagaaccgtgttcagtggctccgtctctattccgagcattacaaaatccaggcccgaacccggtcgctcgatgagcgcctctagcggactatctgcgagaagctctgctcagaatggatccgctctcaagcgggagttttctggcggaagttacagcgccaaaagacaaccgatgccttcaccctctgagggcagcctgtccagcggaggaatggatcagggttctgacgcacccgctcgcgacttcgacggggaagactctgactcacccagacactcaacagcttcgaattcgtctaacctgagttcgcctccctcccccgcaagccccagaaagaccaagtctctttctctggagtccaccgacagggggagctgggatcctta

SEQ ID NO: 284515 - DNA, 2955 bp, Artificial Sequence
  derived and/or modified sequence
tgacagctcgaggaggaagtgaaggatctcgccgacaaaaaggaatctgttgcccactgggaagcccagattaccgagattattcagtgggttagcgacgagaaagacgcccgtggatatctgcaggccctggcctctaaaatgactgaggagctcgaggccctgcgaaactcgtccctggggacgagggctacagatatgccgtggaagatgagaaggtttgccaaactggatatgtcagctcgtctggaactgcagagtgcgctggacgccgagatacgtgctaagcaagccatccaggaggagttgaacaaagtgaaggcatcaaacataataacagaatgtaagctgaaagactcagaaaagaagaatctggaactcctgagcgagatcgagcagctaataaaggatacagaagaacttcggtccgagaaaggaattgaacatcaggacagtcaacattccttcctggcctttttgaatacaccaacagatgccttagatcagtttgagactgtcgactcaacccctctgagcgtccacacaccaacattgcgaaagaagggatgccctggatctaccggcttccctccaaagagaaagacccatcagtttttcgttaaatcctttactactccaacaaagtgccaccagtgcaccagtcttatggtgggactgattagacaaggctgtagttgtgaggtctgcggcttctcttgtcacattacttgcgtgaacaaggccccaactacttgtccggtgcctcctgagcagaccaaaggaccgctgggtattgacccacagaagggtattgggaccgcatacgagggacatgtgagaatacctaaacccgctggagttaagaaggggtggcagcgtgccctcgctattgtttgtgattttaagctgtttctatacgacatcgccgaaggaaaagcgtctcagcctagcgtggtcatcagccaggtcattgacatgagggacgaggagttttccgtaagcagcgttttagcatcagacgtgatccacgcctcacggaaggatattccatgtatatttcgagtcacagcatcccaactgtcagcttctaacaacaagtgcagcatcctgatgctggccgacacagagaacgagaagaataagtgggtcggggtgttaagtgagctgcataaaattctgaagaagaataagttcagggacaggtcagtgtacgtgcccaaagaggcttacgattccacgctgcctctgataaagacgacgcaggctgcagccataatcgaccacgagagaattgctctggggaatgaagaaggtctgttcgtggttcacgtgaccaaagacgagatcatccgagtgggagacaacaaaaagattcaccagattgagttaatcccaaatgaccagttagtggcggttattagcggacggaaccgccatgtccggctctttccaatgagtgcattggacggacgggaaacagatttttacaaactgtctgagaccaagggatgccagaccgtgacgtccggtaaggttagacatggggctctcacctgcctctgcgttgccatgaagaggcaggtcttgtgttatgaattattccagagtaagaccaggcaccgtaaattcaaggaaatccaggttccttataatgtacaatggatggccatcttttccgagcagctgtgcgtggggttccaatcaggattcctgagatatccccttaatggtgaagggaatccttactccatgctgcacagcaacgaccacacactctcatttatagcccatcagcctatggacgcaatctgcgcagttgaaatcagtagcaaggagtaccttctgtgtttcaattcaatcgggatttataccgattgccagggcaggagaagtagacagcaggagctgatgtggcctgcaaacccgtcatcttgttgctataatgcaccatacctttcagtgtacagcgaaaacgcagtggacatttttgacgtaaattctatggagtggatacagacactaccgctgaagaaggtccgtcccctgaacaatgaagggtccttgaacctcctgggactggaaacaattcgtcttatatatttcaagaataaaatggcagagggggatgaacttgtcgtaccagaaacctctgacaatagcaggaaacagatggtgcgcaatattaacaataaacgaagatactcatttcgggtgcccgaagaggaaagaatgcaacaacgtcgagagatgcttagagaccccgagatgcgcaacaagctcatcagtaaccccaccaactttaatcacattgcacatatgggtcccggagacggtatccagatcctgaaggaccttccaatgccaggtttcccatacccttcaccccaccaccacagtggtctcatctcaagccctattaactttgaacatatttatcatatgactgttaactctgcagagaagtttctgtcgcctgattccattaatccagagtactcccccagtttgcggtccgtaccgggaacaccttctttcatgaccctgagaaatcctcggcctcaggagagccgcaccgttttctccgggtctgtgtccatcccaagtatcacaaagtcaagacccgaaccagggcgaagcatgtcggctagcagtggccttagtgcaaggtcttcagctcagaatggtagcgcccttaagagggaatttagcgggggatcttattctgcaaagcgacagcccatgcctagcccatccgagggctctctttccagtggaggtatggaccagggttcagacgcccctgctagggactttgatggcgaggactcagatagtcctcggcattcaaccgcatccaattcgtccaacctgtcttcgcctccctcgccagccagtcccaggaagacaaaatcactgtcactggagagtactgaccgtggttcgtgggatccatag

SEQ ID NO: 284516 - DNA, 10691 bp, Artificial Sequence
  derived and/or modified sequence
gcggcccggtgcgggtgtcggggagaccgggctctctgcccggcgcggcgcggcgcggctcggcccacgagcgaccaccgacatggagtgggctcgggcggccaagtagccgcttctccggagcccggtgccagtgccgcccgcagcccgccttccacccccggccgcgccgccggtcaggccctagggtgaagccgggaggaaaatgaagagttttcaccggaatccgttgaaaataggactgactgcaaagccttaaagaaagaaggacctcgggaggagaaacgaaaagccgcctccgggcaagacttggcgtgctccgagccgaggggctgcttcagggacctcgccccctccctttcccgctggagaaattgccgctgatgcattatccaagtggtggttgggaggatttgcagcaacatttttggttttccctcccccttctatgcattctgtttttttcctcccttttctgtttttcttcttcccgggaagtgaattgctgatgcaaatcggactttattcattaatgatgcaaccggattcgtttcaggattacgttgcacgagttgaattttgaatgaaggagaagagtttttttttttttttttaaagaagtgttgactctctagttcgttgtacttttaattattattttatttaaatatacgacttaattgtattcttttaaaaatgcattaagtatatattttatggtaatttaccctcaaaatatatgtatatgggtgaaattgaagacgcttcagttaagtgaggttactggtgtgttggatgtttaattcagcaccagcattgcatgacagttgtttgaataacaagtggtttatttttaaaaccataccttttaaaatttaggttcagataatagtaaaagtcatcataataatttaaaggaaaaccagcagaaatcgaagcaaacatgtctggagaagtgcgtttgaggcagttggagcagtttattttggacgggcccgctcagaccaatgggcagtgcttcagtgtggagacattactggatatactcatctgcctttatgatgaatgcaataattctccattgagaagagagaagaacattctcgaatacctagaatgggctaaaccatttacttctaaagtgaaacaaatgcgattacatagagaagactttgaaatattaaaggtgattggtcgaggagcttttggggaggttgctgtagtaaaactaaaaaatgcagataaagtgtttgccatgaaaatattgaataaatgggaaatgctgaaaagagctgagacagcatgttttcgtgaagaaagggatgtattagtgaatggagacaataaatggattacaaccttgcactatgctttccaggatgacaataacttatacctggttatggattattatgttggtggggatttgcttactctactcagcaaatttgaagatagattgcctgaagatatggctagattttacttggctgagatggtgatagcaattgactcagttcatcagctacattatgtacacagagacattaaacctgacaatatactgatggatatgaatggacatattcggttagcagattttggttcttgtctgaagctgatggaagatggaacggttcagtcctcagtggctgtaggaactccagattatatctctcctgaaatccttcaagccatggaagatggaaaagggagatatggacctgaatgtgactggtggtctttgggggtctgtatgtatgaaatgctttacggagaaacaccattttatgcagaatcgctggtggagacatacggaaaaatcatgaaccacaaagagaggtttcagtttccagcccaagtgactgatgtgtctgaaaatgctaaggatcttattcgaaggctcatttgtagcagagaacatcgacttggtcaaaatggaatagaagactttaagaaacacccatttttcagtggaattgattgggataatattcggaactgtgaagcaccttatattccagaagttagtagcccaacagatacatcgaattttgatgtagatgatgattgtttaaaaaattctgaaacgatgcccccaccaacacatactgcattttctggccaccatctgccatttgttggttttacatatactagtagctgtgtactttctgatcggagctgtttaagagttacggctggtcccacctcactggatcttgatgttaatgttcagaggactctagacaacaacttagcaactgaagcttatgaaagaagaattaagcgccttgagcaagaaaaacttgaactcagtagaaaacttcaagagtcaacacagactgtccaagctctgcagtattcaactgttgatggtccactaacagcaagcaaagatttagaaataaaaaacttaaaagaagaaattgaaaaactaagaaaacaagtaacagaatcaagtcatttggaacagcaacttgaagaagctaatgctgtgaggcaagaactagatgatgcttttagacaaatcaaggcttatgaaaaacaaatcaaaacgttacaacaagaaagagaagatctaaataaggaactagtccaggctagtgagcgattaaaaaaccaatccaaagagctgaaagacgcacactgtcagaggaaactggccatgcaggaattcatggagatcaatgagcggctaacagaattgcacacccaaaaacagaaacttgctcgccatgtccgagataaggaagaagaggtggacctggtgatgcaaaaagttgaaagcttaaggcaagaactgcgcagaacagaaagagccaaaaaagagctggaagttcatacagaagctctagctgctgaagcatctaaagacaggaagctacgtgaacagagtgagcactattctaagcaactggaaaatgaattggagggactgaagcaaaaacaaattagttactcaccaggagtatgcagcatagaacatcagcaagagataaccaaactaaagactgatttggaaaagaaaagtatcttttatgaagaagaattatctaaaagagaaggaatacatgcaaatgaaataaaaaatcttaagaaagaactgcatgattcagaaggtcagcaacttgctctcaacaaagaaattatgattttaaaagacaaattggaaaaaaccagaagagaaagtcaaagtgaaagggaggaatttgaaagtgagttcaaacaacaatatgaacgagaaaaagtgttgttaactgaagaaaataaaaagctgacgagtgaacttgataagcttactactttgtatgagaacttaagtatacacaaccagcagttagaagaagaggttaaagatctagcagacaagaaagaatcagttgcacattgggaagcccaaatcacagaaataattcagtgggtcagcgatgaaaaggatgcacgagggtatcttcaggccttagcttctaaaatgactgaagaattggaggcattaagaaattccagcttgggtacacgagcaacagatatgccctggaaaatgcgtcgttttgcgaaactggatatgtcagctagactggagttgcagtcggctctggatgcagaaataagagccaaacaggccatccaagaagagttgaataaagttaaagcatctaatatcataacagaatgtaaactaaaagattcagagaagaagaacttggaactactctcagaaatcgaacagctgataaaggacactgaagagcttagatctgaaaagggtatagagcaccaagactcacagcattctttcttggcatttttgaatacgcctaccgatgctctggatcaatttgaaactgtagactccactccactttcagttcacacaccaaccttaaggaaaaaaggatgtcctggttcaactggctttccacctaagcgcaagactcaccagttttttgtaaaatcttttactactcctaccaagtgtcatcagtgtacctccttgatggtgggtttaataagacagggctgttcatgtgaagtgtgtggattctcatgccatataacttgtgtaaacaaagctccaaccacttgtccagttcctcctgaacagacaaaaggtcccctgggtatagatcctcagaaaggaataggaacagcatatgaaggtcatgtcaggattcctaagccagctggagtgaagaaagggtggcagagagcactggctatagtgtgtgacttcaaactctttctgtacgatattgctgaaggaaaagcatctcagcccagtgttgtcattagtcaagtgattgacatgagggatgaagaattttctgtgagttcagtcttggcttctgatgttatccatgcaagtcggaaagatataccctgtatatttagggtcacagcttcccagctctcagcatctaataacaaatgttcaatcctgatgctagcagacactgagaatgagaagaataagtgggtgggagtgctgagtgaattgcacaagattttgaagaaaaacaaattcagagaccgctcagtctatgttcccaaagaggcttatgacagcactctacccctcattaaaacaacccaggcagccgcaatcatagatcatgaaagaattgctttgggaaacgaagaagggttatttgttgtacatgtcaccaaagatgaaattattagagttggtgacaataagaagattcatcagattgaactcattccaaatgatcagcttgttgctgtgatctcaggacgaaatcgtcatgtacgactttttcctatgtcagcattggatgggcgagagaccgatttttacaagctgtcagaaactaaagggtgtcaaaccgtaacttctggaaaggtgcgccatggagctctcacatgcctgtgtgtggctatgaaaaggcaggtcctctgttatgaactatttcagagcaagacccgtcacagaaaatttaaagaaattcaagtcccatataatgtccagtggatggcaatcttcagtgaacaactctgtgtgggattccagtcaggatttctaagataccccttgaatggagaaggaaatccatacagtatgctccattcaaatgaccatacactatcatttattgcacatcaaccaatggatgctatctgcgcagttgagatctccagtaaagaatatctgctgtgttttaacagcattgggatatacactgactgccagggccgaagatctagacaacaggaattgatgtggccagcaaatccttcctcttgttgttacaatgcaccatatctctcggtgtacagtgaaaatgcagttgatatctttgatgtgaactccatggaatggattcagactcttcctctcaaaaaggttcgacccttaaacaatgaaggatcattaaatcttttagggttggagaccattagattaatatatttcaaaaataagatggcagaaggggacgaactggtagtacctgaaacatcagataatagtcggaaacaaatggttagaaacattaacaataagcggcgttattccttcagagtcccagaagaggaaaggatgcagcagaggagggaaatgctacgagatccagaaatgagaaataaattaatttctaatccaactaattttaatcacatagcacacatgggtcctggagatggaatacagatcctgaaagatctgcccatgccaggtttcccttatccatcccctcatcatcactccggtctgatctcctctccgatcaactttgaacacatctatcacatgactgttaattctgctgaaaaatttctctctcctgattccataaaccctgaatattccccgtctctgcgctctgtccctggtacaccaagctttatgactctgaggaaccctcggcctcaggaaagtcggacagtattcagtggctcagtcagtattccatctatcaccaaatcccgccctgagccaggccgctccatgagtgctagcagtggcttgtcagcaaggtcatccgcacagaatggcagcgcattaaagagggaattctctggaggaagctacagtgccaagcggcagcccatgccctccccgtcagagggctctttgtcctctggaggcatggaccaaggaagtgatgccccagcgagggactttgacggagaggactctgactctccgaggcattccacagcttccaacagttccaacctaagcagccccccaagcccagcttcaccccgaaaaaccaagagcctctccctggagagcactgaccgcgggagctgggacccgtgagctgcctcagcactgggacctctcgctctccgctccctgccactcgcctcctctcactttcatctcttccctccacctcgcctgctcggcctgaaagccaccaggggctggcagcagtagcaggacagggattcaggagttctgacgacacgactctcagatccacgcccccagcctaacagcaacaacaaagacagactttccgtagcagcttagattaacgttgatttcattccatgcacttagagttgctttcagtaacattttacccctactcccaaaggtagcttaaatagacagattacacaaatgtaagtgataagaataagattagacagattttgctttcacagtagagtctcattatagtcctaaaatagctcatgggcttctccgcatccagaagggagaattggtccctggagtggctcactaagctcttaatcagcaaacgcagtgagtatcaacctgattgttgccaggaaatccttatgaattaaaacaatgcatattttactacagtacagagtttaaatgaatacataaatgtagaagtactgaatgtatatatttaaaaggagcctcttgtattcaacaaaagatggatgcatatataagagagatgatttaatttaaagaaatatgttgtttcttgtctgtaatgtaatgtaaagggtggaaaggcctcaagctcacatttgtagagagagagcgagagaaatcagagttccctttattgccctgtcctcaaactggtcataggctctagtcacctggggagctgtagaaaacacttgcagagccaggttttgctggtttggggcatgccctgggcaccagagctttaacatttgaagccacttcagcagcagcagcaaaaggcgaactcatctctacccaagatgtttcttttcctagtggtggaatttgaacacttctcactttttattgtattttatcttccgcagataaatgtagaaatacacgattctgtcacctctgatcccttccatctgaaaggttacaaggagtgttgtagcttctgaaggtgcagaaaacaatttctaaaaatgcttttattcctgggctaatcctgtccctccctaagtcacagcgaggtgtctgtcccagggctggagatgcttcccaaggaggagtctgttttgttgagagtgggcgtgggcttcttcacataagcctggggaaggaagaaaaaacggctttcattaccaaataatgtaaaacctcaaaagcaagggcttcaacagccttaaccaaatattattccccatagccagtggaaaatggatgtgacaaccccagtgcgcaggccagagtgagtgagcccagcacggcgctccgactggcttcctctctcaggtgctggattgtggggttagtggcatttccagctggattcctcctgttgtagttgccataaggaaatgagatgcagaatcagaaggatctatttctacagaatcatttcaccagttaagcacatgagtagagaaagagataaaaataaaagtatctcatgaaggaaagagattttgcctctcttttacttttcacctaagtttctctgagaaatagagacaggattctctctttaaaattcagtgaaaatgaagaaagttttcctgcagttgctaacctgagttgcagtgtttaaggccatcatttcactgctgctgtctgtgactccacgtctgtgtcactgaggtgacctgcgtgtcactgaggtggccaccatgctggcctgcggcatgtgcagggagctgaggctgtttccaggtgatgctgctgtgtggagaaggttctgagatgcagtgagggaagaaaggatcctgctggggattccattgtaagcacctataatcgggaattttcatgtaacagctttgacatttaaacattctgagtttggtgccagctcagatttgattatattttattttggatgggtgtaattcacagcacagttctaatctcccaaatctttctgctttttagaatgaagtataaaaatacttttctcacctgaataccaagggttggccctttagttggatcattgtcatatgacttggtagatccttgtcctcagcacctcacgtgagagaagggagtcagccagccggccccctgcttggtgctcgtgaccagctcgcaccccttctgtccacccttctctcctctcctccccactctccccaccctcctcactctccccaccctcctcactctccccaccctcccctcctctcctcctcactcttcccaccctccccatccccaccctccccatcctcctcttccctttccccttgccttctcctctctcccttctcttctcaggcagggaggaggccatcccaagccgagattaacaggacttgacataagccattagtttgtagctttgacaagtaattatgaatttttgttgcttataggtgcttattttgcaaaggatgcttttaagatcaaaataataaccctacctaaagtctagctccactgctatgggtcatactcttcagcctcccaacagggcagagagagagagctactgaggcttgtctaggttgccaggctaactgggcgacttgtccatattcaccccatggattgcaccatggcactctttgatttttccactgcaatggcaagtaatctcatcagtcataatagagcagtcccgaatgcgtgcagattctaaaagcagggctttaggagagaaacactgccagggggaatagttttggggagggttttcccaaaataacggtcatcctactgggtttatcccacccttaaatatgaagcctgttacctccagaagcttctgagaagaatgatgtgaaaagacagggagtgggttctaggcaaagaaaacataatgaccattcagaggagtcagtagcacagctcacagataaagtattttattactatctgaagttttcttttgttttcatgcaggacattttaaaaacgtatatggcagcagaaacctgtttctcaatagaaaaaatacattcagaggcatttctgggatagtctatctgtgttagtatttggtgctatctatgtccagccaagttatctaccctcaaattctgactaatcatgtttgtgctttgggtatttaaaattacatacatatatattctttttgccaaaaacaaaagtcttgcttcttgtcaaatgattgctaaagtagatcttacattttttgttattatgtatgtatttatacacatccccaacacacttagtgatttctgttatttcctagggagcacagctttaaggctatgagatacaactaaaaggagcccatctatttggttttccagccaattattgtactcacatttcaggggagaatctgaaattcctgtcatgtttacagcaacaatctatcattcctggctagctctcagcctctctctccttccataggttagaattatgtcattttgttacttagtggccacgtctatttctgagaaagactggttacatttatgtggcatctcaggtatcattaaggaaaagccagagcaggggtgagcagaggtcaaaaccacagacgcagcagggccatttgccgcctttggccgggatcacaaccactgcagtctcccagcaggtaggccttgccaagcctaaggctccccatccaatctagacagaggggcgctcagagcagactttgccgtagcccatgtctggtgagcacaacagggaatgaattgggcactccactcccccgtctctctggcccagccctgaactagatgagctgcatttcatggagcccattttaaaatctctttccttatgactttgttactcaagtccagagttctctgtgcacttctgctagataaggagtgtaagccctgccccccagcactggcagcacgctgggccctccccacacaggacaccgtgcagttccgggggaagctgactcaaatcaaccttgaaatctcatgaaaacaaaatgacttgtctttttatttgatagtgtaatatcattcattttataaattttttagggtttttctcgtaatattgtacagttttgcatggcctggtgtgatcattttttggttagaatataatgctgacaaatgtggatggaggggaagatactgctttagcctatcactccttattttattttgtttggttttatgccctcagtgtcttagggaactttttaagagatcctctgctaccaaacaatgatgtggattcttttgcacagaaatatttaaggtgggatggtaaaaaatgtcacaaaagactcctcaccaatactttatgttgatatcacttaatattaaccagactttgctgtattgcaataaaacagagaactgtt

SEQ ID NO: 284517 - DNA, 7355 bp, Artificial Sequence
  derived and/or modified sequence
gcagttagaagaagaggttaaagatctagcagacaagaaagaatcagttgcacattgggaagcccaaatcacagaaataattcagtgggtcagcgatgaaaaggatgcacgagggtatcttcaggccttagcttctaaaatgactgaagaattggaggcattaagaaattccagcttgggtacacgagcaacagatatgccctggaaaatgcgtcgttttgcgaaactggatatgtcagctagactggagttgcagtcggctctggatgcagaaataagagccaaacaggccatccaagaagagttgaataaagttaaagcatctaatatcataacagaatgtaaactaaaagattcagagaagaagaacttggaactactctcagaaatcgaacagctgataaaggacactgaagagcttagatctgaaaagggtatagagcaccaagactcacagcattctttcttggcatttttgaatacgcctaccgatgctctggatcaatttgaaactgtagactccactccactttcagttcacacaccaaccttaaggaaaaaaggatgtcctggttcaactggctttccacctaagcgcaagactcaccagttttttgtaaaatcttttactactcctaccaagtgtcatcagtgtacctccttgatggtgggtttaataagacagggctgttcatgtgaagtgtgtggattctcatgccatataacttgtgtaaacaaagctccaaccacttgtccagttcctcctgaacagacaaaaggtcccctgggtatagatcctcagaaaggaataggaacagcatatgaaggtcatgtcaggattcctaagccagctggagtgaagaaagggtggcagagagcactggctatagtgtgtgacttcaaactctttctgtacgatattgctgaaggaaaagcatctcagcccagtgttgtcattagtcaagtgattgacatgagggatgaagaattttctgtgagttcagtcttggcttctgatgttatccatgcaagtcggaaagatataccctgtatatttagggtcacagcttcccagctctcagcatctaataacaaatgttcaatcctgatgctagcagacactgagaatgagaagaataagtgggtgggagtgctgagtgaattgcacaagattttgaagaaaaacaaattcagagaccgctcagtctatgttcccaaagaggcttatgacagcactctacccctcattaaaacaacccaggcagccgcaatcatagatcatgaaagaattgctttgggaaacgaagaagggttatttgttgtacatgtcaccaaagatgaaattattagagttggtgacaataagaagattcatcagattgaactcattccaaatgatcagcttgttgctgtgatctcaggacgaaatcgtcatgtacgactttttcctatgtcagcattggatgggcgagagaccgatttttacaagctgtcagaaactaaagggtgtcaaaccgtaacttctggaaaggtgcgccatggagctctcacatgcctgtgtgtggctatgaaaaggcaggtcctctgttatgaactatttcagagcaagacccgtcacagaaaatttaaagaaattcaagtcccatataatgtccagtggatggcaatcttcagtgaacaactctgtgtgggattccagtcaggatttctaagataccccttgaatggagaaggaaatccatacagtatgctccattcaaatgaccatacactatcatttattgcacatcaaccaatggatgctatctgcgcagttgagatctccagtaaagaatatctgctgtgttttaacagcattgggatatacactgactgccagggccgaagatctagacaacaggaattgatgtggccagcaaatccttcctcttgttgttacaatgcaccatatctctcggtgtacagtgaaaatgcagttgatatctttgatgtgaactccatggaatggattcagactcttcctctcaaaaaggttcgacccttaaacaatgaaggatcattaaatcttttagggttggagaccattagattaatatatttcaaaaataagatggcagaaggggacgaactggtagtacctgaaacatcagataatagtcggaaacaaatggttagaaacattaacaataagcggcgttattccttcagagtcccagaagaggaaaggatgcagcagaggagggaaatgctacgagatccagaaatgagaaataaattaatttctaatccaactaattttaatcacatagcacacatgggtcctggagatggaatacagatcctgaaagatctgcccatgccaggtttcccttatccatcccctcatcatcactccggtctgatctcctctccgatcaactttgaacacatctatcacatgactgttaattctgctgaaaaatttctctctcctgattccataaaccctgaatattccccgtctctgcgctctgtccctggtacaccaagctttatgactctgaggaaccctcggcctcaggaaagtcggacagtattcagtggctcagtcagtattccatctatcaccaaatcccgccctgagccaggccgctccatgagtgctagcagtggcttgtcagcaaggtcatccgcacagaatggcagcgcattaaagagggaattctctggaggaagctacagtgccaagcggcagcccatgccctccccgtcagagggctctttgtcctctggaggcatggaccaaggaagtgatgccccagcgagggactttgacggagaggactctgactctccgaggcattccacagcttccaacagttccaacctaagcagccccccaagcccagcttcaccccgaaaaaccaagagcctctccctggagagcactgaccgcgggagctgggacccgtgagctgcctcagcactgggacctctcgctctccgctccctgccactcgcctcctctcactttcatctcttccctccacctcgcctgctcggcctgaaagccaccaggggctggcagcagtagcaggacagggattcaggagttctgacgacacgactctcagatccacgcccccagcctaacagcaacaacaaagacagactttccgtagcagcttagattaacgttgatttcattccatgcacttagagttgctttcagtaacattttacccctactcccaaaggtagcttaaatagacagattacacaaatgtaagtgataagaataagattagacagattttgctttcacagtagagtctcattatagtcctaaaatagctcatgggcttctccgcatccagaagggagaattggtccctggagtggctcactaagctcttaatcagcaaacgcagtgagtatcaacctgattgttgccaggaaatccttatgaattaaaacaatgcatattttactacagtacagagtttaaatgaatacataaatgtagaagtactgaatgtatatatttaaaaggagcctcttgtattcaacaaaagatggatgcatatataagagagatgatttaatttaaagaaatatgttgtttcttgtctgtaatgtaatgtaaagggtggaaaggcctcaagctcacatttgtagagagagagcgagagaaatcagagttccctttattgccctgtcctcaaactggtcataggctctagtcacctggggagctgtagaaaacacttgcagagccaggttttgctggtttggggcatgccctgggcaccagagctttaacatttgaagccacttcagcagcagcagcaaaaggcgaactcatctctacccaagatgtttcttttcctagtggtggaatttgaacacttctcactttttattgtattttatcttccgcagataaatgtagaaatacacgattctgtcacctctgatcccttccatctgaaaggttacaaggagtgttgtagcttctgaaggtgcagaaaacaatttctaaaaatgcttttattcctgggctaatcctgtccctccctaagtcacagcgaggtgtctgtcccagggctggagatgcttcccaaggaggagtctgttttgttgagagtgggcgtgggcttcttcacataagcctggggaaggaagaaaaaacggctttcattaccaaataatgtaaaacctcaaaagcaagggcttcaacagccttaaccaaatattattccccatagccagtggaaaatggatgtgacaaccccagtgcgcaggccagagtgagtgagcccagcacggcgctccgactggcttcctctctcaggtgctggattgtggggttagtggcatttccagctggattcctcctgttgtagttgccataaggaaatgagatgcagaatcagaaggatctatttctacagaatcatttcaccagttaagcacatgagtagagaaagagataaaaataaaagtatctcatgaaggaaagagattttgcctctcttttacttttcacctaagtttctctgagaaatagagacaggattctctctttaaaattcagtgaaaatgaagaaagttttcctgcagttgctaacctgagttgcagtgtttaaggccatcatttcactgctgctgtctgtgactccacgtctgtgtcactgaggtgacctgcgtgtcactgaggtggccaccatgctggcctgcggcatgtgcagggagctgaggctgtttccaggtgatgctgctgtgtggagaaggttctgagatgcagtgagggaagaaaggatcctgctggggattccattgtaagcacctataatcgggaattttcatgtaacagctttgacatttaaacattctgagtttggtgccagctcagatttgattatattttattttggatgggtgtaattcacagcacagttctaatctcccaaatctttctgctttttagaatgaagtataaaaatacttttctcacctgaataccaagggttggccctttagttggatcattgtcatatgacttggtagatccttgtcctcagcacctcacgtgagagaagggagtcagccagccggccccctgcttggtgctcgtgaccagctcgcaccccttctgtccacccttctctcctctcctccccactctccccaccctcctcactctccccaccctcctcactctccccaccctcccctcctctcctcctcactcttcccaccctccccatccccaccctccccatcctcctcttccctttccccttgccttctcctctctcccttctcttctcaggcagggaggaggccatcccaagccgagattaacaggacttgacataagccattagtttgtagctttgacaagtaattatgaatttttgttgcttataggtgcttattttgcaaaggatgcttttaagatcaaaataataaccctacctaaagtctagctccactgctatgggtcatactcttcagcctcccaacagggcagagagagagagctactgaggcttgtctaggttgccaggctaactgggcgacttgtccatattcaccccatggattgcaccatggcactctttgatttttccactgcaatggcaagtaatctcatcagtcataatagagcagtcccgaatgcgtgcagattctaaaagcagggctttaggagagaaacactgccagggggaatagttttggggagggttttcccaaaataacggtcatcctactgggtttatcccacccttaaatatgaagcctgttacctccagaagcttctgagaagaatgatgtgaaaagacagggagtgggttctaggcaaagaaaacataatgaccattcagaggagtcagtagcacagctcacagataaagtattttattactatctgaagttttcttttgttttcatgcaggacattttaaaaacgtatatggcagcagaaacctgtttctcaatagaaaaaatacattcagaggcatttctgggatagtctatctgtgttagtatttggtgctatctatgtccagccaagttatctaccctcaaattctgactaatcatgtttgtgctttgggtatttaaaattacatacatatatattctttttgccaaaaacaaaagtcttgcttcttgtcaaatgattgctaaagtagatcttacattttttgttattatgtatgtatttatacacatccccaacacacttagtgatttctgttatttcctagggagcacagctttaaggctatgagatacaactaaaaggagcccatctatttggttttccagccaattattgtactcacatttcaggggagaatctgaaattcctgtcatgtttacagcaacaatctatcattcctggctagctctcagcctctctctccttccataggttagaattatgtcattttgttacttagtggccacgtctatttctgagaaagactggttacatttatgtggcatctcaggtatcattaaggaaaagccagagcaggggtgagcagaggtcaaaaccacagacgcagcagggccatttgccgcctttggccgggatcacaaccactgcagtctcccagcaggtaggccttgccaagcctaaggctccccatccaatctagacagaggggcgctcagagcagactttgccgtagcccatgtctggtgagcacaacagggaatgaattgggcactccactcccccgtctctctggcccagccctgaactagatgagctgcatttcatggagcccattttaaaatctctttccttatgactttgttactcaagtccagagttctctgtgcacttctgctagataaggagtgtaagccctgccccccagcactggcagcacgctgggccctccccacacaggacaccgtgcagttccgggggaagctgactcaaatcaaccttgaaatctcatgaaaacaaaatgacttgtctttttatttgatagtgtaatatcattcattttataaattttttagggtttttctcgtaatattgtacagttttgcatggcctggtgtgatcattttttggttagaatataatgctgacaaatgtggatggaggggaagatactgctttagcctatcactccttattttattttgtttggttttatgccctcagtgtcttagggaactttttaagagatcctctgctaccaaacaatgatgtggattcttttgcacagaaatatttaaggtgggatggtaaaaaatgtcacaaaagactcctcaccaatactttatgttgatatcacttaatattaaccagactttgctgtattgcaataaaacagagaactgtt

SEQ ID NO: 284518 - DNA, 5346 bp, Artificial Sequence
  derived and/or modified sequence
atgagcggcgaggtgagactgagacagctggagcagttcatcctggacggccccgcccagaccaacggccagtgcttcagcgtggagaccctgctggacatcctgatctgcctgtacgacgagtgcaacaacagccccctgagaagagagaagaacatcctggagtacctggagtgggccaagcccttcaccagcaaggtgaagcagatgagactgcacagagaggacttcgagatcctgaaggtgatcggcagaggcgccttcggcgaggtggccgtggtgaagctgaagaacgccgacaaggtgttcgccatgaagatcctgaacaagtgggagatgctgaagagagccgagaccgcctgcttcagagaggagagagacgtgctggtgaacggcgacaacaagtggatcaccaccctgcactacgccttccaggacgacaacaacctgtacctggtgatggactactacgtgggcggcgacctgctgaccctgctgagcaagttcgaggacagactgcccgaggacatggccagattctacctggccgagatggtgatcgccatcgacagcgtgcaccagctgcactacgtgcacagagacatcaagcccgacaacatcctgatggacatgaacggccacatcagactggccgacttcggcagctgcctgaagctgatggaggacggcaccgtgcagagcagcgtggccgtgggcacccccgactacatcagccccgagatcctgcaggccatggaggacggcaagggcagatacggccccgagtgcgactggtggagcctgggcgtgtgcatgtacgagatgctgtacggcgagacccccttctacgccgagagcctggtggagacctacggcaagatcatgaaccacaaggagagattccagttccccgcccaggtgaccgacgtgagcgagaacgccaaggacctgatcagaagactgatctgcagcagagagcacagactgggccagaacggcatcgaggacttcaagaagcaccccttcttcagcggcatcgactgggacaacatcagaaactgcgaggccccctacatccccgaggtgagcagccccaccgacaccagcaacttcgacgtggacgacgactgcctgaagaacagcgagaccatgcccccccccacccacaccgccttcagcggccaccacctgcccttcgtgggcttcacctacaccagcagctgcgtgctgagcgacagaagctgcctgagagtgaccgccggccccaccagcctggacctggacgtgaacgtgcagagaaccctggacaacaacctggccaccgaggcctacgagagaagaatcaagagactggagcaggagaagctggagctgagcagaaagctgcaggagagcacccagaccgtgcaggccctgcagtacagcaccgtggacggccccctgaccgccagcaaggacctggagatcaagaacctgaaggaggagatcgagaagctgagaaagcaggtgaccgagagcagccacctggagcagcagctggaggaggccaacgccgtgagacaggagctggacgacgccttcagacagatcaaggcctacgagaagcagatcaagaccctgcagcaggagagagaggacctgaacaaggagctggtgcaggccagcgagagactgaagaaccagagcaaggagctgaaggacgcccactgccagagaaagctggccatgcaggagttcatggagatcaacgagagactgaccgagctgcacacccagaagcagaagctggccagacacgtgagagacaaggaggaggaggtggacctggtgatgcagaaggtggagagcctgagacaggagctgagaagaaccgagagagccaagaaggagctggaggtgcacaccgaggccctggccgccgaggccagcaaggacagaaagctgagagagcagagcgagcactacagcaagcagctggagaacgagctggagggcctgaagcagaagcagatcagctacagccccggcgtgtgcagcatcgagcaccagcaggagatcaccaagctgaagaccgacctggagaagaagagcatcttctacgaggaggagctgagcaagagagagggcatccacgccaacgagatcaagaacctgaagaaggagctgcacgacagcgagggccagcagctggccctgaacaaggagatcatgatcctgaaggacaagctggagaagaccagaagagagagccagagcgagagagaggagttcgagagcgagttcaagcagcagtacgagagagagaaggtgctgctgaccgaggagaacaagaagctgaccagcgagctggacaagctgaccaccctgtacgagaacctgagcatccacaaccagcagctggaggaggaggtgaaggacctggccgacaagaaggagagcgtggcccactgggaggcccagatcaccgagatcatccagtgggtgagcgacgagaaggacgccagaggctacctgcaggccctggccagcaagatgaccgaggagctggaggccctgagaaacagcagcctgggcaccagagccaccgacatgccctggaagatgagaagattcgccaagctggacatgagcgccagactggagctgcagagcgccctggacgccgagatcagagccaagcaggccatccaggaggagctgaacaaggtgaaggccagcaacatcatcaccgagtgcaagctgaaggacagcgagaagaagaacctggagctgctgagcgagatcgagcagctgatcaaggacaccgaggagctgagaagcgagaagggcatcgagcaccaggacagccagcacagcttcctggccttcctgaacacccccaccgacgccctggaccagttcgagaccgtggacagcacccccctgagcgtgcacacccccaccctgagaaagaagggctgccccggcagcaccggcttcccccccaagagaaagacccaccagttcttcgtgaagagcttcaccacccccaccaagtgccaccagtgcaccagcctgatggtgggcctgatcagacagggctgcagctgcgaggtgtgcggcttcagctgccacatcacctgcgtgaacaaggcccccaccacctgccccgtgccccccgagcagaccaagggccccctgggcatcgacccccagaagggcatcggcaccgcctacgagggccacgtgagaatccccaagcccgccggcgtgaagaagggctggcagagagccctggccatcgtgtgcgacttcaagctgttcctgtacgacatcgccgagggcaaggccagccagcccagcgtggtgatcagccaggtgatcgacatgagagacgaggagttcagcgtgagcagcgtgctggccagcgacgtgatccacgccagcagaaaggacatcccctgcatcttcagagtgaccgccagccagctgagcgccagcaacaacaagtgcagcatcctgatgctggccgacaccgagaacgagaagaacaagtgggtgggcgtgctgagcgagctgcacaagatcctgaagaagaacaagttcagagacagaagcgtgtacgtgcccaaggaggcctacgacagcaccctgcccctgatcaagaccacccaggccgccgccatcatcgaccacgagagaatcgccctgggcaacgaggagggcctgttcgtggtgcacgtgaccaaggacgagatcatcagagtgggcgacaacaagaagatccaccagatcgagctgatccccaacgaccagctggtggccgtgatcagcggcagaaacagacacgtgagactgttccccatgagcgccctggacggcagagagaccgacttctacaagctgagcgagaccaagggctgccagaccgtgaccagcggcaaggtgagacacggcgccctgacctgcctgtgcgtggccatgaagagacaggtgctgtgctacgagctgttccagagcaagaccagacacagaaagttcaaggagatccaggtgccctacaacgtgcagtggatggccatcttcagcgagcagctgtgcgtgggcttccagagcggcttcctgagataccccctgaacggcgagggcaacccctacagcatgctgcacagcaacgaccacaccctgagcttcatcgcccaccagcccatggacgccatctgcgccgtggagatcagcagcaaggagtacctgctgtgcttcaacagcatcggcatctacaccgactgccagggcagaagaagcagacagcaggagctgatgtggcccgccaaccccagcagctgctgctacaacgccccctacctgagcgtgtacagcgagaacgccgtggacatcttcgacgtgaacagcatggagtggatccagaccctgcccctgaagaaggtgagacccctgaacaacgagggcagcctgaacctgctgggcctggagaccatcagactgatctacttcaagaacaagatggccgagggcgacgagctggtggtgcccgagaccagcgacaacagcagaaagcagatggtgagaaacatcaacaacaagagaagatacagcttcagagtgcccgaggaggagagaatgcagcagagaagagagatgctgagagaccccgagatgagaaacaagctgatcagcaaccccaccaacttcaaccacatcgcccacatgggccccggcgacggcatccagatcctgaaggacctgcccatgcccggcttcccctaccccagcccccaccaccacagcggcctgatcagcagccccatcaacttcgagcacatctaccacatgaccgtgaacagcgccgagaagttcctgagccccgacagcatcaaccccgagtacagccccagcctgagaagcgtgcccggcacccccagcttcatgaccctgagaaaccccagaccccaggagagcagaaccgtgttcagcggcagcgtgagcatccccagcatcaccaagagcagacccgagcccggcagaagcatgagcgccagcagcggcctgagcgccagaagcagcgcccagaacggcagcgccctgaagagagagttcagcggcggcagctacagcgccaagagacagcccatgcccagccccagcgagggcagcctgagcagcggcggcatggaccagggcagcgacgcccccgccagagacttcgacggcgaggacagcgacagccccagacacagcaccgccagcaacagcagcaacctgagcagcccccccagccccgccagccccagaaagaccaagagcctgagcctggagagcaccgacagaggcagctgggacccctag

SEQ ID NO: 284519 - DNA, 2955 bp, Artificial Sequence
  derived and/or modified sequence
tgacagctggaggaggaggtgaaggacctggccgacaagaaggagagcgtggcccactgggaggcccagatcaccgagatcatccagtgggtgagcgacgagaaggacgccagaggctacctgcaggccctggccagcaagatgaccgaggagctggaggccctgagaaacagcagcctgggcaccagagccaccgacatgccctggaagatgagaagattcgccaagctggacatgagcgccagactggagctgcagagcgccctggacgccgagatcagagccaagcaggccatccaggaggagctgaacaaggtgaaggccagcaacatcatcaccgagtgcaagctgaaggacagcgagaagaagaacctggagctgctgagcgagatcgagcagctgatcaaggacaccgaggagctgagaagcgagaagggcatcgagcaccaggacagccagcacagcttcctggccttcctgaacacccccaccgacgccctggaccagttcgagaccgtggacagcacccccctgagcgtgcacacccccaccctgagaaagaagggctgccccggcagcaccggcttcccccccaagagaaagacccaccagttcttcgtgaagagcttcaccacccccaccaagtgccaccagtgcaccagcctgatggtgggcctgatcagacagggctgcagctgcgaggtgtgcggcttcagctgccacatcacctgcgtgaacaaggcccccaccacctgccccgtgccccccgagcagaccaagggccccctgggcatcgacccccagaagggcatcggcaccgcctacgagggccacgtgagaatccccaagcccgccggcgtgaagaagggctggcagagagccctggccatcgtgtgcgacttcaagctgttcctgtacgacatcgccgagggcaaggccagccagcccagcgtggtgatcagccaggtgatcgacatgagagacgaggagttcagcgtgagcagcgtgctggccagcgacgtgatccacgccagcagaaaggacatcccctgcatcttcagagtgaccgccagccagctgagcgccagcaacaacaagtgcagcatcctgatgctggccgacaccgagaacgagaagaacaagtgggtgggcgtgctgagcgagctgcacaagatcctgaagaagaacaagttcagagacagaagcgtgtacgtgcccaaggaggcctacgacagcaccctgcccctgatcaagaccacccaggccgccgccatcatcgaccacgagagaatcgccctgggcaacgaggagggcctgttcgtggtgcacgtgaccaaggacgagatcatcagagtgggcgacaacaagaagatccaccagatcgagctgatccccaacgaccagctggtggccgtgatcagcggcagaaacagacacgtgagactgttccccatgagcgccctggacggcagagagaccgacttctacaagctgagcgagaccaagggctgccagaccgtgaccagcggcaaggtgagacacggcgccctgacctgcctgtgcgtggccatgaagagacaggtgctgtgctacgagctgttccagagcaagaccagacacagaaagttcaaggagatccaggtgccctacaacgtgcagtggatggccatcttcagcgagcagctgtgcgtgggcttccagagcggcttcctgagataccccctgaacggcgagggcaacccctacagcatgctgcacagcaacgaccacaccctgagcttcatcgcccaccagcccatggacgccatctgcgccgtggagatcagcagcaaggagtacctgctgtgcttcaacagcatcggcatctacaccgactgccagggcagaagaagcagacagcaggagctgatgtggcccgccaaccccagcagctgctgctacaacgccccctacctgagcgtgtacagcgagaacgccgtggacatcttcgacgtgaacagcatggagtggatccagaccctgcccctgaagaaggtgagacccctgaacaacgagggcagcctgaacctgctgggcctggagaccatcagactgatctacttcaagaacaagatggccgagggcgacgagctggtggtgcccgagaccagcgacaacagcagaaagcagatggtgagaaacatcaacaacaagagaagatacagcttcagagtgcccgaggaggagagaatgcagcagagaagagagatgctgagagaccccgagatgagaaacaagctgatcagcaaccccaccaacttcaaccacatcgcccacatgggccccggcgacggcatccagatcctgaaggacctgcccatgcccggcttcccctaccccagcccccaccaccacagcggcctgatcagcagccccatcaacttcgagcacatctaccacatgaccgtgaacagcgccgagaagttcctgagccccgacagcatcaaccccgagtacagccccagcctgagaagcgtgcccggcacccccagcttcatgaccctgagaaaccccagaccccaggagagcagaaccgtgttcagcggcagcgtgagcatccccagcatcaccaagagcagacccgagcccggcagaagcatgagcgccagcagcggcctgagcgccagaagcagcgcccagaacggcagcgccctgaagagagagttcagcggcggcagctacagcgccaagagacagcccatgcccagccccagcgagggcagcctgagcagcggcggcatggaccagggcagcgacgcccccgccagagacttcgacggcgaggacagcgacagccccagacacagcaccgccagcaacagcagcaacctgagcagcccccccagccccgccagccccagaaagaccaagagcctgagcctggagagcaccgacagaggcagctgggacccctag

SEQ ID NO: 284520 - protein, 1754 aa, Artificial Sequence
  derived and/or modified sequence
MSGEVRLRQLEQFILDGPAQTNGQCFSVETLLDILICLYDECNNSPLRREKNILEYLEWAKPFTSKVKQMRLHREDFEILKVIGRGAFGEVAVVKLKNADKVFAMKILNKWEMLKRAETACFREERDVLVNGDNKWITTLHYAFQDDNNLYLVMDYYVGGDLLTLLSKFEDRLPEDMARFYLAEMVIAIDSVHQLHYVHRDIKPDNILMDMNGHIRLADFGSCLKLMEDGTVQSSVAVGTPDYISPEILQAMEDGKGRYGPECDWWSLGVCMYEMLYGETPFYAESLVETYGKIMNHKERFQFPAQVTDVSENAKDLIRRLICSREHRLGQNGIEDFKKHPFFSGIDWDNIRNCEAPYIPEVSSPTDTSNFDVDDDCLKNSETMPPPTHTAFSGHHLPFVGFTYTSSCVLSDRSCLRVTAGPTSLDLDVNVQRTLDNNLATEAYERRIKRLEQEKLELSRKLQESTQTVQALQYSTVDGPLTASKDLEIKNLKEEIEKLRKQVTESSHLEQQLEEANAVRQELDDAFRQIKAYEKQIKTLQQEREDLNKELVQASERLKNQSKELKDAHCQRKLAMQEFMEINERLTELHTQKQKLARHVRDKEEEVDLVMQKVESLRQELRRTERAKKELEVHTEALAAEASKDRKLREQSEHYSKQLENELEGLKQKQISYSPGVCSIEHQQEITKLKTDLEKKSIFYEEELSKREGIHANEIKNLKKELHDSEGQQLALNKEIMILKDKLEKTRRESQSEREEFESEFKQQYEREKVLLTEENKKLTSELDKLTTLYENLSIHNQQLEEEVKDLADKKESVAHWEAQITEIIQWVSDEKDARGYLQALASKMTEELEALRNSSLGTRATDMPWKMRRFAKLDMSARLELQSALDAEIRAKQAIQEELNKVKASNIITECKLKDSEKKNLELLSEIEQLIKDTEELRSEKGIEHQDSQHSFLAFLNTPTDALDQFETDPVENTYVWNPSVKFHIQSRSTSPSTSSEAEPVKTVDSTPLSVHTPTLRKKGCPGSTGFPPKRKTHQFFVKSFTTPTKCHQCTSLMVGLIRQGCSCEVCGFSCHITCVNKAPTTCPVPPEQTKGPLGIDPQKGIGTAYEGHVRIPKPAGVKKGWQRALAIVCDFKLFLYDIAEGKASQPSVVISQVIDMRDEEFSVSSVLASDVIHASRKDIPCIFRVTASQLSASNNKCSILMLADTENEKNKWVGVLSELHKILKKNKFRDRSVYVPKEAYDSTLPLIKTTQAAAIIDHERIALGNEEGLFVVHVTKDEIIRVGDNKKIHQIELIPNDQLVAVISGRNRHVRLFPMSALDGRETDFYKLSETKGCQTVTSGKVRHGALTCLCVAMKRQVLCYELFQSKTRHRKFKEIQVPYNVQWMAIFSEQLCVGFQSGFLRYPLNGEGNPYSMLHSNDHTLSFIAHQPMDAICAVEISSKEYLLCFNSIGIYTDCQGRRSRQQELMWPANPSSCCYNAPYLSVYSENAVDIFDVNSMEWIQTLPLKKVRPLNNEGSLNLLGLETIRLIYFKNKMAEGDELVVPETSDNSRKQMVRNINNKRRYSFRVPEEERMQQRREMLRDPEMRNKLISNPTNFNHIAHMGPGDGIQILKDLPMNPRPQESRTVFSGSVSIPSITKSRPEPGRSMSASSGLSARSSAQNGSALKREFSGGSYSAKRQPMPSPSEGSLSSGGMDQGSDAPARDFDGEDSDSPRHSTASNSSNLSSPPSPASPRKTKSLSLESTDRGSWDP

SEQ ID NO: 284521 - protein, 1048 aa, Artificial Sequence
  derived and/or modified sequence
  misc_feature (1)..(1): Xaa can be any naturally occurring amino acid
XEGIHANEIKNLKKELHDSEGQQLALNKEIMILKDKLEKTRRESQSEREEFESEFKQQYEREKVLLTEENKKLTSELDKLTTLYENLSIHNQQLEEEVKDLADKKESVAHWEAQITEIIQWVSDEKDARGYLQALASKMTEELEALRNSSLGTRATDMPWKMRRFAKLDMSARLELQSALDAEIRAKQAIQEELNKVKASNIITECKLKDSEKKNLELLSEIEQLIKDTEELRSEKGIEHQDSQHSFLAFLNTPTDALDQFETDPVENTYVWNPSVKFHIQSRSTSPSTSSEAEPVKTVDSTPLSVHTPTLRKKGCPGSTGFPPKRKTHQFFVKSFTTPTKCHQCTSLMVGLIRQGCSCEVCGFSCHITCVNKAPTTCPVPPEQTKGPLGIDPQKGIGTAYEGHVRIPKPAGVKKGWQRALAIVCDFKLFLYDIAEGKASQPSVVISQVIDMRDEEFSVSSVLASDVIHASRKDIPCIFRVTASQLSASNNKCSILMLADTENEKNKWVGVLSELHKILKKNKFRDRSVYVPKEAYDSTLPLIKTTQAAAIIDHERIALGNEEGLFVVHVTKDEIIRVGDNKKIHQIELIPNDQLVAVISGRNRHVRLFPMSALDGRETDFYKLSETKGCQTVTSGKVRHGALTCLCVAMKRQVLCYELFQSKTRHRKFKEIQVPYNVQWMAIFSEQLCVGFQSGFLRYPLNGEGNPYSMLHSNDHTLSFIAHQPMDAICAVEISSKEYLLCFNSIGIYTDCQGRRSRQQELMWPANPSSCCYNAPYLSVYSENAVDIFDVNSMEWIQTLPLKKVRPLNNEGSLNLLGLETIRLIYFKNKMAEGDELVVPETSDNSRKQMVRNINNKRRYSFRVPEEERMQQRREMLRDPEMRNKLISNPTNFNHIAHMGPGDGIQILKDLPMNPRPQESRTVFSGSVSIPSITKSRPEPGRSMSASSGLSARSSAQNGSALKREFSGGSYSAKRQPMPSPSEGSLSSGGMDQGSDAPARDFDGEDSDSPRHSTASNSSNLSSPPSPASPRKTKSLSLESTDRGSWDP

SEQ ID NO: 284522 - DNA, 5265 bp, Artificial Sequence
  derived and/or modified sequence
atgagtggcgaagtgagactccgtcagctcgagcaattcattctggatggcccagctcagaccaatggccagtgtttctccgtggagaccctcctcgacatacttatctgtctctacgatgagtgcaataactcacctctgcggcgtgaaaagaacatcctggagtacctggaatgggctaagcccttcaccagtaaagttaaacagatgaggcttcatagggaagactttgaaatcctgaaagttattggtagaggggccttcggagaagtggccgtggtcaaactcaaaaacgccgacaaggtgtttgccatgaagattcttaataagtgggagatgctaaagcgtgctgagaccgcttgtttcagggaggagcgggacgtgctcgtaaacggggacaataaatggataacgactttgcactatgcttttcaggacgacaacaatctctacctcgtcatggactactacgtggggggtgatcttctgaccctgctgtctaagttcgaggatcgattacccgaagatatggcccgcttctacttggctgagatggtgatcgcaatagacagtgttcatcaactccattacgtgcatcgcgatattaagccagacaatattttgatggacatgaacggccatatcagactggctgatttcgggtcatgtttgaaacttatggaggatgggacagttcagagtagcgtcgcagttggcactccggactacatttctcccgagatactgcaggcaatggaagatggtaagggccgctacggcccggaatgtgattggtggagtctcggcgtgtgtatgtacgaaatgctctacggggagacccctttctacgccgagagcctcgtggaaacctacgggaagataatgaaccacaaagaaagatttcagttcccggctcaggtgacagatgtctcagagaacgctaaagacctgatcagacgactgatttgtagtcgagagcacaggctggggcaaaatggcattgaggacttcaaaaaacatcccttcttttcgggtatcgactgggataatataaggaactgcgaagcaccttatatccccgaggtttcgagtccaacagacactagcaattttgacgtcgatgacgattgcctcaaaaattccgaaaccatgcccccaccaactcacacagccttctctgggcaccaccttccctttgtgggatttacctacacctccagctgtgtgttgagcgatcggtcatgcttgcgcgtcaccgccggccccaccagtctggacctggatgtgaatgtgcagaggacattagataataatctggctaccgaggcttatgagcggcggatcaaaagacttgagcaggaaaagctggaactcagtaggaagttgcaagagtccacacagactgtacaggctctgcagtatagcactgtagacggacccctcaccgcatccaaggatctcgaaatcaagaacctcaaggaagaaatcgaaaaactccgtaagcaggtaacggagagttctcatctagagcaacaactggaggaagctaatgctgttcggcaggaactcgatgacgcattccggcaaattaaagcgtacgagaaacagattaaaactttacagcaggagcgggaggatctgaacaaggagctcgtccaggcctcagagcggctgaagaaccagagcaaagagctgaaggacgcccactgtcagcgaaaattggccatgcaagaatttatggaaatcaacgagaggctgaccgagctgcatactcagaagcagaagctggcccggcacgtacgcgataaagaagaggaagttgacctggtgatgcagaaagtggaatcattacggcaggaactgcgccggacggagcgcgctaaaaaagaacttgaggtccacacggaagcgcttgccgccgaggccagcaaagaccgaaaactgcgcgagcagtctgagcactatagcaaacagctcgaaaatgaacttgaaggtcttaagcagaagcagatatcttacagccccggggtgtgttctattgagcatcagcaggaaattaccaaacttaagacagatctggaaaagaaatcgatcttctatgaggaagaattgtctaagagggaaggcattcacgcaaacgagatcaagaatcttaagaaggaactccacgactcagagggacagcagctggccctcaacaaggagatcatgattcttaaggacaaactggagaagacgaggcgtgagagtcagagtgaacgcgaggagttcgagagtgagtttaaacaacagtacgagcgggaaaaagttctgctgacagaagaaaataagaagcttaccagtgaattggacaagctgacgaccctttatgaaaacctgagtatacacaaccagcagctggaggaagaagtaaaagatctggccgataaaaaagagagcgttgctcactgggaggctcaaattactgagatcattcagtgggtctcggatgaaaaggatgcccgcggctatctccaggcattagcctccaagatgacagaagagctcgaggcgttgcgtaactcctcccttggtactcgtgccaccgatatgccctggaagatgaggcggttcgcaaagctggacatgagcgcccggctggagcttcagtctgcactggacgcagagatccgcgcaaagcaggcgattcaggaagagctcaacaaggtcaaagcttctaatatcatcactgaatgcaaacttaaagactcggagaaaaaaaacctcgagctcctctcggagatcgaacagctcattaaggatacagaggaactgcggtcagaaaagggcattgaacaccaggattcccagcactccttcttggcatttctgaacactcctaccgacgcgctcgaccagttcgaaaccgacccagtcgagaatacgtacgtttggaaccctagcgtgaagttccacatacaatcgcggtcaacctcgcctagcacaagctccgaggcggagcctgtaaagacggtcgacagtactcccctgagtgtgcacacacccacactgcgtaagaaaggttgtcccgggtctacagggtttcctccgaaacgaaagacacatcagttctttgtgaaatcattcactaccccaacaaagtgccatcaatgtacttctctaatggtgggcctaattagacagggctgctcgtgtgaggtttgcgggttctcttgtcacatcacctgcgtgaacaaggccccaacaacatgtcccgtgccaccagaacagaccaaaggccctttggggatcgatccccaaaaagggataggcacggcttacgagggacacgtgcggatcccaaaacctgctggcgtgaagaaaggctggcagcgggctttggccatcgtctgcgattttaaacttttcttgtatgacatcgcggaggggaaagcgagccagccatctgtagttatctcccaggtgatcgacatgagagacgaggaattctccgtctcatctgtgctcgcttccgacgtcatccacgcatcccgtaaagatatcccgtgtatctttcgggttaccgcatcacagctctcagctagtaataacaagtgctctatacttatgcttgccgatactgagaatgagaagaataagtgggttggcgtactctccgagctgcacaaaattctaaaaaaaaataaatttagagatagatctgtgtacgtgcccaaggaagcttacgatagcacacttcctctgattaagaccacgcaggcggccgctattatcgatcacgaacgaatcgctctaggcaacgaggaaggactgttcgtcgttcacgtaaccaaggatgagataatccgtgtgggcgataacaaaaaaattcaccagattgagctgatccccaatgaccagttagtagctgtgattagcgggcgtaaccgtcatgttaggctgttccctatgtctgcgctagacggccgcgagactgacttttacaaactgagtgaaaccaaaggatgccaaaccgtgaccagcgggaaagtgcggcatggcgctcttacctgcctgtgtgttgccatgaaacgccaagtgctctgttacgaactgtttcagagcaaaacccggcaccgtaagttcaaggagatccaagttccctataacgtgcagtggatggccatcttttccgagcaactctgcgtgggcttccaatccgggttcctgcggtaccccctgaacggcgaagggaacccatattcgatgttgcattcaaacgatcacacacttagtttcattgcacatcagcctatggatgcaatttgcgcagtggaaatatcttccaaggaatacctcctctgcttcaactctatagggatctacactgattgtcaaggacggcgtagccgccagcaggagctgatgtggcccgctaatccctcgtcatgttgctacaacgctccatatctttcggtctattccgaaaatgccgtggatatttttgacgtgaatagcatggagtggatacaaactttgcctctgaagaaagtcaggccactcaataatgaaggcagtctgaacttacttggcctggaaaccattcgcttgatctattttaaaaacaaaatggccgaaggcgacgagctggtggtccctgaaacatcagataactccagaaaacagatggtgcgtaatattaataacaagagacgatattcgttccgggtgccggaagaggagaggatgcaacagcgccgggagatgctgagagacccggaaatgcggaataagctaatctccaaccccacaaactttaaccatatcgcgcacatgggaccaggcgatgggatccagatactgaaggatctgcccatgaatcccagacctcaagagtccagaacggtgttcagcggatccgtaagtatccccagtattaccaagtctaggcctgaaccaggccgttcaatgtctgcctcgagcgggctgagcgctcgatcatcagctcagaacggctccgctctcaaaagagagttctctggaggtagttatagcgcaaagaggcagcctatgccaagtcctagtgaagggtcccttagcagcgggggaatggaccagggcagcgatgcgccggcaagagattttgatggggaggatagtgattcacccagacattccacagctagtaatagctctaatctgtcatctcctccgagtcccgcctcacctaggaagaccaagagtcttagcttggaaagcaccgatagagggagttgggatccctag

SEQ ID NO: 284523 - DNA, 3147 bp, Artificial Sequence
  derived and/or modified sequence
tgagagggcattcacgcgaatgagattaagaacctgaaaaaggagctacacgattcagaagggcagcaactggccctgaacaaggaaatcatgattttgaaagataagctggaaaagacgcggagggaaagccagtccgaacgcgaagagttcgagtctgagtttaaacaacagtacgagcgggagaaggtgttgctgacagaggagaataagaaactcacctcagaactagataaactcacaactctctatgaaaacctaagcattcacaatcagcaattagaggaggaggtaaaagatctcgccgacaaaaaggagagcgtggcccattgggaggctcaaatcacagaaatcattcagtgggttagtgatgagaaggacgcccgcggttatctccaggctcttgcatctaaaatgaccgaagagttagaggccctgcggaacagttccctcgggacaagagcgaccgatatgccctggaagatgcgcagattcgctaaattggacatgagcgctagacttgagctgcagagcgccctagacgctgaaattcgagccaagcaagccatccaagaagagctgaataaggttaaagcgagtaatatcattacggaatgtaagttgaaggatagcgagaaaaagaacctcgagctcctgtctgaaatcgaacagcttatcaaagataccgaggagctacgctctgaaaaaggcattgagcaccaggactcccagcattctttcctcgccttcttgaacacccctaccgatgcccttgaccagttcgagactgatcctgtggaaaacacctacgtatggaacccgagcgtgaagttccatatacagtcaagatctacgagcccttccacttcctcggaagctgaacccgtgaagacagtagactccacccccttaagcgtacatacgcccaccctgcgtaagaagggatgccccggtagcacaggctttccccccaagcgcaagactcatcagttctttgtaaagagtttcaccactcctactaaatgccatcaatgtacctctttgatggtcgggcttattcgccagggatgttcttgcgaagtatgcgggttttcttgtcatattacctgcgtgaacaaggctccgactacctgccccgtgcctcctgagcaaaccaaaggacccttaggtatcgacccacaaaaagggataggaactgcctacgaaggccacgtgagaatccccaagccggctggggtgaagaagggatggcaaagagcactcgccatcgtttgcgacttcaagctcttcctatacgacatcgctgagggcaaagcatcccagccatccgtcgtgatttctcaagttatcgatatgagagacgaggagttctccgtgagttccgtgctggctagcgatgtcatccatgctagtcggaaagatattccatgcatttttagggtcacagcctcccagctcagcgctagcaacaacaaatgtagcattctgatgcttgccgacacagaaaacgagaaaaacaaatgggtcggtgtgctgagcgagttacacaaaattctgaaaaagaacaaatttagagaccgaagtgtctacgtgcccaaagaggcatacgactcaaccctccccctaattaagaccacacaggcagctgctataatcgaccacgaacggatcgccctcggaaacgaagagggcctctttgtcgtccacgttaccaaggatgaaattatacgtgtgggtgacaataagaagattcaccaaatagagttgatccccaatgaccagctggtagctgtaatctctgggagaaatcgccacgtgaggctcttcccaatgtcagcccttgacggccgggaaacagatttctacaagctatccgagactaagggatgtcagaccgtcacatcaggtaaagtgcgccacggcgctctcacatgtctctgcgtagccatgaagcgacaggttctctgctatgagctattccaatcaaagacaaggcatagaaagttcaaggaaatccaggtcccatataacgttcagtggatggctattttttctgagcaactgtgcgtcggttttcagtccggattcctgcgatatcctctgaacggcgagggaaatccctactctatgttgcacagcaacgaccatacgctcagtttcatagcacatcagccaatggacgccatatgtgccgtggaaattagctcaaaggagtacctgctctgctttaactcaatcggtatatacacagactgccagggcagacggagccgacagcaagaactgatgtggcctgccaacccctcgtcatgctgttataacgcaccctacctctctgtatactccgagaacgcggtggatatctttgacgtcaactccatggagtggatccagactctgcctttaaagaaggtgagaccactgaacaatgagggctccctaaatctactaggcctcgaaacgataaggcttatatattttaagaacaaaatggcagaaggtgacgagctcgttgtgccagagactagcgacaactctcgcaaacaaatggttagaaacattaataataaacgtagatattctttcagagtgcctgaggaggagcgtatgcagcaaagacgcgaaatgctgagggatcccgaaatgcggaacaagctcatcagcaatcccaccaatttcaaccacatcgcacatatgggtccgggggacggaatccaaatcctcaaggatttgcccatgaacccacggcctcaggaatcacgcaccgtgttctcgggaagcgttagcatccccagcattacaaaatcacggccggagccaggccgctctatgagcgcaagtagtggcttgagtgcccggtcctccgcgcaaaatggatccgccctaaagcgtgagttcagtggtgggtcatatagcgccaagcgtcaacccatgccaagcccatcagaagggtctctgtctagcggaggcatggaccaggggtcagatgccccggcgagggattttgacggggaagattctgacagccccaggcatagcactgccagcaattcctcaaatctgtctagtcccccatcccctgcttctcccagaaaaacgaagagtttgagtctggagtccaccgatagaggatcgtgggatccctag

SEQ ID NO: 284524 - DNA, 5265 bp, Artificial Sequence
  derived and/or modified sequence
atgtctggagaggtgcggctgcggcagctggagcagttcatcctggatggccctgcccagaccaacggccagtgcttctctgtggagaccctgctggacatcctgatctgcctgtatgatgagtgcaacaacagccccctgcggcgggagaagaacatcctggagtacctggagtgggccaagcccttcaccagcaaggtgaagcagatgaggctgcacagagaagattttgagatcctgaaggtgattggccgcggggccttcggggaggtggccgtggtgaagctgaagaatgctgacaaggtgtttgccatgaagatcctgaacaagtgggagatgctgaagagagctgagacagcctgcttccgggaggagagagatgtgctggtgaatggagacaacaagtggatcaccaccctgcactacgccttccaggatgacaacaacctgtacctggtgatggactactacgtgggcggggacctgctgaccctgctgagcaagtttgaggaccggctgcctgaggacatggcccgcttctacctggccgagatggtgattgccattgattctgtgcaccagctgcactacgtgcaccgggacatcaagccagacaacatcctgatggacatgaatggccacatccggctggccgactttggcagctgcctgaagctgatggaggatggcaccgtgcagagctctgtggccgtgggcaccccagactacatcagccctgagatcctgcaggccatggaggatggcaagggccgctatggcccagaatgtgactggtggagcctgggcgtgtgcatgtatgagatgctgtatggagagacccccttctacgccgagagcctggtggagacctacggcaagatcatgaaccacaaggagcgcttccagtttcctgcccaggtgacagatgtgtctgaaaatgccaaggacctgatcagaagactcatctgcagccgggagcaccggctgggccagaatggaattgaggacttcaagaagcaccccttcttcagcggcatcgactgggacaacatccggaactgtgaggccccctacatccctgaggtgagcagccccacagacaccagcaactttgatgtggatgatgactgcctgaagaacagcgagaccatgcccccacccacccacacagccttcagcggccaccacctgccctttgtgggcttcacctacaccagcagctgtgtgctgagtgacaggagctgcctgcgggtgacagctggccccaccagcctggacctggatgtgaatgtgcagaggaccctggacaacaacctggccacagaggcctatgaaagacgcatcaagaggctggagcaggagaagctggagctgagcaggaagctgcaggagagcacccagacagtgcaggccctgcagtacagcacagtggatggccccctgacagccagcaaggacctggagatcaagaacctgaaggaggagattgagaagctgaggaagcaggtgacagagagcagccacctggagcagcagctggaggaggccaatgctgtgcggcaggagctggatgatgccttccggcagatcaaggcctatgagaagcagatcaagaccctgcagcaggagcgggaggacctgaacaaggagctggtgcaggccagcgagcggctgaagaaccagagcaaggagctgaaggatgcccactgccagaggaagctggccatgcaggagttcatggagatcaatgaaaggctgacagagctgcacacccagaagcagaagctggcccggcacgtgcgggacaaggaggaggaggtggacctggtgatgcagaaggtggagagcctgcggcaggagctgcggaggacagagcgggccaagaaggagctggaggtgcacacagaggccctggccgctgaggccagcaaggacaggaagctgcgggagcagagcgagcactacagcaagcagctggagaatgagctggagggcctgaagcagaagcagatctcctacagccctggggtgtgcagcattgagcaccagcaggagatcaccaagctgaagacagacctggagaagaagagcatcttctatgaggaggagctgagcaagcgggagggcatccacgccaatgagatcaagaacctgaagaaggagctgcatgattctgagggccagcagctggccctgaacaaggagatcatgatcctgaaggacaagctggagaagacccggcgggagagccagagcgagcgggaggagtttgaaagtgagttcaagcagcagtatgagcgggagaaggtgctgctgacagaggagaacaagaagctgaccagcgagctggacaagctgaccaccctgtatgagaacctgagcatccacaaccagcagctggaggaggaggtgaaggacctggccgacaagaaggagagcgtggcccactgggaggcccagatcacagagatcatccagtgggtgtctgatgagaaggatgcccggggctacctgcaggccctggccagcaagatgacagaggagctggaggccctgaggaacagcagcctgggcacccgggccacagacatgccctggaagatgagaagatttgccaagctggacatgtctgcccggctggagctgcagagcgccctggatgctgagatccgggccaagcaggccatccaggaggagctgaacaaggtgaaggccagcaacatcatcacagagtgcaagctgaaggacagcgagaagaagaacctggagctgctgtctgaaattgagcagctgatcaaggacacagaggagctgcggtctgagaagggcatcgagcaccaggacagccagcacagcttcctggccttcctgaacacccccacagatgccctggaccagtttgaaacagatcctgtggagaacacctacgtgtggaaccccagcgtgaagttccacatccagagccgcagcaccagccccagcaccagcagcgaggccgagcctgtgaagacagtggacagcacccccctgtctgtgcacacccccaccctgaggaagaagggctgccccggcagcacaggcttcccccccaagaggaagacccaccagttctttgtgaagagcttcaccacccccaccaagtgccaccagtgcaccagcctgatggtgggcctcatccggcagggctgcagctgtgaggtgtgtggcttcagctgccacatcacctgtgtgaacaaggcccccaccacctgccctgtgcccccagagcagaccaagggccccctgggcatcgacccccagaagggcattggaacagcctatgagggccacgtgcgcatccccaagccagctggggtgaagaagggctggcagagggccctggccatcgtgtgtgacttcaagctgttcctgtatgacattgctgagggcaaggccagccagcccagcgtggtgatcagccaggtgattgacatgagagatgaggagttctctgtgtcctctgtgctggccagtgatgtgattcatgccagcaggaaggacatcccctgcatcttccgggtgacagccagccagctgagcgccagcaacaacaagtgcagcatcctgatgctggccgacacagaaaatgagaagaacaagtgggtgggcgtgctgtctgagctgcacaagatcctgaagaagaacaagttccgggacagatctgtgtatgtgcccaaggaggcctatgacagcaccctgcccctcatcaagaccacccaggccgccgccatcatcgaccacgagagaattgccctgggcaatgaggagggcctgtttgtggtgcacgtgaccaaggatgagatcatccgggtgggggacaacaagaagatccaccagatcgagctgatccccaatgaccagctggtggccgtcatcagcggcaggaacagacatgtgcggctcttccccatgtctgccctggatggccgggagacagacttctacaagctgtctgagaccaagggctgccagacagtgaccagcggcaaggtgcgccacggggccctgacctgcctgtgtgtggccatgaagaggcaggtgctgtgctatgagctgttccagagcaagaccaggcacaggaagttcaaggagatccaggtgccctacaacgtgcagtggatggccatcttcagcgagcagctgtgtgtgggcttccagagcggcttcctgcgctaccccctgaatggagagggcaacccctacagcatgctgcacagcaatgaccacaccctgtccttcatcgcccaccagcccatggatgccatctgtgctgtggagatcagcagcaaggagtacctgctgtgcttcaacagcatcggcatctacacagactgccagggcagaagaagccggcagcaggagctgatgtggccagccaaccccagcagctgctgctacaatgccccctacctgtctgtgtacagtgaaaatgctgtggacatctttgatgtgaacagcatggagtggatccagaccctgcccctgaagaaggtgcggcccctgaacaatgaaggcagcctgaacctgctgggcctggagaccatccgcctcatctacttcaagaacaagatggccgagggagatgagctggtggtgcctgagaccagtgacaacagcaggaagcagatggtgaggaacatcaacaacaagaggcgctacagcttccgggtgcctgaggaggagaggatgcagcagaggcgggagatgctgcgggaccctgagatgaggaacaagctgatcagcaaccccaccaacttcaaccacatcgcccacatgggccctggagatggcatccagatcctgaaggacctgcccatgaacccccggccccaggagagcaggacagtgttttctggctctgtgtccatccccagcatcaccaagagcaggcctgagcccggccgctccatgtctgccagcagcggcctgagcgcccggagcagcgcccagaatggcagcgccctgaagcgggagttcagcggcggcagctacagcgccaagaggcagcccatgcccagccccagcgagggcagcctgagcagcggcggcatggaccagggcagtgatgccccagcccgggactttgatggagaagattctgacagccccaggcacagcacagccagcaacagcagcaacctgagcagcccccccagccctgccagccccaggaagaccaagagcctgagcctggagagcacagaccggggctcctgggacccctag

SEQ ID NO: 284525 - DNA, 3147 bp, Artificial Sequence
  derived and/or modified sequence
tgagaaggcatccacgccaatgagatcaagaacctgaagaaggagctgcatgattctgagggccagcagctggccctgaacaaggagatcatgatcctgaaggacaagctggagaagacccggcgggagagccagagcgagcgggaggagtttgaaagtgagttcaagcagcagtatgagcgggagaaggtgctgctgacagaggagaacaagaagctgaccagcgagctggacaagctgaccaccctgtatgagaacctgagcatccacaaccagcagctggaggaggaggtgaaggacctggccgacaagaaggagagcgtggcccactgggaggcccagatcacagagatcatccagtgggtgtctgatgagaaggatgcccggggctacctgcaggccctggccagcaagatgacagaggagctggaggccctgaggaacagcagcctgggcacccgggccacagacatgccctggaagatgagaagatttgccaagctggacatgtctgcccggctggagctgcagagcgccctggatgctgagatccgggccaagcaggccatccaggaggagctgaacaaggtgaaggccagcaacatcatcacagagtgcaagctgaaggacagcgagaagaagaacctggagctgctgtctgaaattgagcagctgatcaaggacacagaggagctgcggtctgagaagggcatcgagcaccaggacagccagcacagcttcctggccttcctgaacacccccacagatgccctggaccagtttgaaacagatcctgtggagaacacctacgtgtggaaccccagcgtgaagttccacatccagagccgcagcaccagccccagcaccagcagcgaggccgagcctgtgaagacagtggacagcacccccctgtctgtgcacacccccaccctgaggaagaagggctgccccggcagcacaggcttcccccccaagaggaagacccaccagttctttgtgaagagcttcaccacccccaccaagtgccaccagtgcaccagcctgatggtgggcctcatccggcagggctgcagctgtgaggtgtgtggcttcagctgccacatcacctgtgtgaacaaggcccccaccacctgccctgtgcccccagagcagaccaagggccccctgggcatcgacccccagaagggcattggaacagcctatgagggccacgtgcgcatccccaagccagctggggtgaagaagggctggcagagggccctggccatcgtgtgtgacttcaagctgttcctgtatgacattgctgagggcaaggccagccagcccagcgtggtgatcagccaggtgattgacatgagagatgaggagttctctgtgtcctctgtgctggccagtgatgtgattcatgccagcaggaaggacatcccctgcatcttccgggtgacagccagccagctgagcgccagcaacaacaagtgcagcatcctgatgctggccgacacagaaaatgagaagaacaagtgggtgggcgtgctgtctgagctgcacaagatcctgaagaagaacaagttccgggacagatctgtgtatgtgcccaaggaggcctatgacagcaccctgcccctcatcaagaccacccaggccgccgccatcatcgaccacgagagaattgccctgggcaatgaggagggcctgtttgtggtgcacgtgaccaaggatgagatcatccgggtgggggacaacaagaagatccaccagatcgagctgatccccaatgaccagctggtggccgtcatcagcggcaggaacagacatgtgcggctcttccccatgtctgccctggatggccgggagacagacttctacaagctgtctgagaccaagggctgccagacagtgaccagcggcaaggtgcgccacggggccctgacctgcctgtgtgtggccatgaagaggcaggtgctgtgctatgagctgttccagagcaagaccaggcacaggaagttcaaggagatccaggtgccctacaacgtgcagtggatggccatcttcagcgagcagctgtgtgtgggcttccagagcggcttcctgcgctaccccctgaatggagagggcaacccctacagcatgctgcacagcaatgaccacaccctgtccttcatcgcccaccagcccatggatgccatctgtgctgtggagatcagcagcaaggagtacctgctgtgcttcaacagcatcggcatctacacagactgccagggcagaagaagccggcagcaggagctgatgtggccagccaaccccagcagctgctgctacaatgccccctacctgtctgtgtacagtgaaaatgctgtggacatctttgatgtgaacagcatggagtggatccagaccctgcccctgaagaaggtgcggcccctgaacaatgaaggcagcctgaacctgctgggcctggagaccatccgcctcatctacttcaagaacaagatggccgagggagatgagctggtggtgcctgagaccagtgacaacagcaggaagcagatggtgaggaacatcaacaacaagaggcgctacagcttccgggtgcctgaggaggagaggatgcagcagaggcgggagatgctgcgggaccctgagatgaggaacaagctgatcagcaaccccaccaacttcaaccacatcgcccacatgggccctggagatggcatccagatcctgaaggacctgcccatgaacccccggccccaggagagcaggacagtgttttctggctctgtgtccatccccagcatcaccaagagcaggcctgagcccggccgctccatgtctgccagcagcggcctgagcgcccggagcagcgcccagaatggcagcgccctgaagcgggagttcagcggcggcagctacagcgccaagaggcagcccatgcccagccccagcgagggcagcctgagcagcggcggcatggaccagggcagtgatgccccagcccgggactttgatggagaagattctgacagccccaggcacagcacagccagcaacagcagcaacctgagcagcccccccagccctgccagccccaggaagaccaagagcctgagcctggagagcacagaccggggctcctgggacccctag

SEQ ID NO: 284526 - DNA, 5265 bp, Artificial Sequence
  derived and/or modified sequence
atgagcggcgaggtgcggctgcggcagctggagcagttcatcctggatgggccggcacagacaaacggacagtgcttttctgttgagaccctgctggatattcttatttgcctctatgatgaatgtaacaacagccctctcagaagggagaaaaacatattagagtatttagagtgggcaaagccctttaccagtaaagtaaagcagatgagactgcacagagaggatttcgaaatactgaaggtgattgggagaggtgcattcggggaggtagccgtggtaaagctcaagaacgctgacaaggtgtttgctatgaagattctgaacaaatgggagatgctgaagcgagctgagacagcttgtttccgcgaggaaagggatgtgttagtgaacggcgataacaagtggattacgacactgcactacgcttttcaggacgataataatttgtatctcgttatggactattacgtgggtggagatctgctgacactgctgagtaagttcgaagataggctgcccgaggacatggccagattctacctggcagagatggtcatcgccatcgactccgtgcatcagctccactacgtacaccgggacatcaagccagataatatcctaatggacatgaatggccatattcggctggctgacttcggaagttgtttgaagctgatggaggatggaactgttcaatctagtgtagccgtggggacccccgattacatcagcccagagatcttacaggctatggaggatggcaaaggaaggtacgggcccgaatgtgactggtggtctctgggcgtatgcatgtacgaaatgctgtacggcgagacccccttttacgcggagtccctggttgagacttatggcaagatcatgaatcacaaggagcgatttcaatttcccgcccaggttacggatgtttctgaaaacgcaaaggacctgatacgacgcctgatatgctccagggagcatcgcctagggcaaaatggaattgaagatttcaaaaagcatcccttcttctcggggatagattgggacaacatcagaaattgtgaagcgccatatattcccgaggtgtcgtcccccaccgacacctccaacttcgatgtcgatgacgactgcttgaaaaactctgaaacaatgcctccacctactcataccgccttctccgggcaccatttaccatttgtggggtttacctatactagttcttgtgtgctaagtgatcgtagctgcttaagggtgaccgccggacccacatccctggatttggatgtgaacgtgcagcgcactttggataacaatcttgcgaccgaagcatatgaaagacgaatcaagagactggaacaggagaagcttgagctgagccgaaaacttcaggaatccactcagaccgtgcaagccctccagtactcaactgtggacgggcccttgaccgcgtcaaaggatctggagatcaaaaacctgaaggaagagatcgagaaactccggaaacaggtgacagagtctagccatctcgagcagcagttggaggaggctaacgcagtgcgccaggagctggatgacgcctttcgccagattaaagcgtacgaaaaacagatcaagacactgcagcaagaacgagaagacctgaacaaggagctggttcaggctagtgagaggctgaaaaatcaaagcaaggagctcaaagacgcacactgccagaggaagttggcaatgcaggagtttatggaaattaatgagaggttgacagagctccacacccagaaacagaaactcgctagacatgtgcgggataaagaggaggaagtggaccttgtgatgcagaaggtggagtccttgaggcaggagctaagaagaacggagagagcaaagaaagagctcgaagtgcatacagaagccctggctgcggaggcctccaaagacagaaaactgcgcgaacaatcggagcattatagtaaacagcttgagaacgaactggagggcctgaagcagaagcaaatctcctacagcccaggagtatgctccattgagcaccagcaagaaatcaccaaactcaagacggacttggagaagaaatcaatcttctacgaggaagagcttagcaaaagggaaggaatacatgctaatgagataaagaatctgaaaaaggaattgcacgactccgaaggccagcagctggctcttaataaggagatcatgattctcaaggataagttggagaagacccgcagggagtcccagtcggagcgggaagaatttgaatccgaatttaagcagcagtatgaacgcgaaaaggtcctgctgacagaggagaacaagaagcttaccagtgaactcgacaagctgactacgctctacgaaaacttgtctatccacaatcagcagctcgaggaagaagtgaaggatctggcagacaaaaaagagagtgtagcccactgggaagcccagataaccgaaataatccagtgggtgtcagatgagaaagacgcgcgaggatatctgcaggccctggcttccaagatgactgaagaactggaagcgttgcggaactcatccctgggaacaagagcgaccgacatgccatggaagatgcggaggtttgctaagcttgatatgtccgcacggctggaacttcagagcgccctagacgctgagataagggccaagcaggccatccaggaggagctgaacaaagtcaaagccagcaacatcataactgaatgcaagttgaaggatagcgagaaaaaaaacttggagttgctcagtgagatagagcagttaatcaaggataccgaggagctgcggagcgagaagggcatagagcatcaggatagccagcactcatttctcgcctttctcaacacacctaccgacgcgttggaccagttcgaaaccgacccagtggagaacacatacgtgtggaacccctcggttaagttccacatccagagccgaagcaccagcccgtctacttctagtgaggccgagcccgtaaaaactgtggacagtacccccctgagtgtccataccccaacactgaggaagaaaggctgtcctggcagcacaggctttccccccaagagaaaaacacaccagttcttcgttaagtctttcacgacacccactaaatgtcatcagtgcacttcattgatggtaggtttgataaggcaaggatgctcatgtgaggtatgcggattttcctgtcacataacttgtgttaataaggctcctacaacttgtcccgtgccaccagaacagaccaaagggccattgggcatcgaccctcaaaagggtatcggcaccgcgtacgagggtcacgttagaattccaaaaccggccggggtaaaaaagggatggcagcgggcgctggcgattgtgtgtgactttaagctgttcctttatgacatcgctgagggcaaggcttcacagccttcagttgtgatcagccaggtgatcgatatgcgcgatgaggagttttctgtaagcagcgtcttggcttccgacgtgatccatgcaagtcgtaaggatataccttgtatctttcgcgtaacggcctcccaactcagtgcttctaacaataagtgcagcattttaatgcttgcagatacagaaaacgagaagaataagtgggtaggagtgctgtccgagctgcataaaatacttaaaaaaaacaagtttcgcgacaggagtgtctacgtgcccaaggaagcttatgacagcaccctgcccttaattaagactacccaggccgcggccatcatcgaccacgagaggatcgcccttggcaatgaagagggcctcttcgtggtccatgttaccaaagatgagataatccgtgtgggggataacaagaagatacatcagatcgagcttattccaaatgaccagctagtagcagtcatcagcggccggaatcggcatgtgagactgtttcctatgagtgcactggatggacgggagacagacttctacaagctttcggagacgaaaggctgtcaaaccgttacaagcggaaaagtgaggcacggcgcactgacttgcttatgcgttgccatgaagcgccaggtcctgtgttacgaactgttccagtccaaaacacgacaccggaagtttaaggaaattcaggtaccctataacgttcagtggatggcgatcttttcagagcagctctgcgtggggttccagagcgggtttctgagatatccactgaacggagaaggtaacccgtatagcatgttacactccaacgaccataccctgtctttcatagctcaccaacccatggatgccatttgtgcagtcgagatttccagtaaagaatacctgttgtgctttaattctatcggcatttatactgattgtcagggccgtcgatcccgtcaacaggaactgatgtggccagctaacccctcatcatgctgttacaacgcaccttatctgagcgtgtattccgagaacgccgtggacatatttgacgtgaacagtatggaatggattcagactttgcccctgaagaaggtgcgacccctcaataacgagggttctctgaatttgttgggactggagactatccgcctcatatatttcaagaacaagatggcagaaggcgacgagttggtggttcccgagacttcagacaattccagaaaacaaatggtcagaaatatcaacaataagcgacgctactccttcagggttcctgaagaagaacgtatgcagcaacggcgggagatgctccgcgatcctgagatgaggaataaactgatttcaaaccccaccaactttaatcacatcgcccacatgggacccggtgacggcatccagatcctgaaggacctgcccatgaatccgcggcctcaggagagcaggaccgtcttctccggtagcgtgagtattcccagcatcaccaagagtagacctgagcctgggcggtctatgtcagcctccagcgggctttctgctagaagcagtgcccagaacggcagcgctttgaagagagaattttcaggcggcagctacagtgcaaagcggcagcctatgccctctcccagtgaagggagcctgagtagtggcggcatggatcagggctccgatgcccccgcccgtgactttgacggcgaagatagcgattcacccaggcattcaaccgccagcaactctagtaacctcagttctcccccttctccggcctcgcctcgtaagaccaaatctctttcactagaatcgaccgatagaggctcctgggatccatag

SEQ ID NO: 284527 - DNA, 3147 bp, Artificial Sequence
  derived and/or modified sequence
tgagagggcatccacgccaacgagatcaagaacctgaagaaggagctgcacgatagcgagggccagcagctggcactcaataaagaaatcatgattcttaaagacaagctagaaaaaactcgccgggagagtcaaagcgagcgcgaagaattcgaaagtgagtttaaacagcagtacgaaagagaaaaggttctccttaccgaggaaaacaaaaagctgactagtgagttagataagctaaccacactctatgagaacctgagtatccataaccaacagcttgaggaagaggtgaaagatctcgcagataagaaggagagcgttgcccattgggaagcacagatcactgaaattatccagtgggtttcagatgagaaggacgcacgcggctacctgcaagcgttggccagcaagatgacagaggaactggaggccctgcgtaattccagcctcgggacaagggccaccgatatgccttggaagatgaggcggttcgccaaattggatatgtcagccagactagaactccagagtgcacttgatgccgagatcagagcaaagcaggctatccaagaagagctcaacaaggttaaggcaagcaatatcatcactgaatgcaaactcaaagatagcgagaaaaaaaacctagagctcttaagcgagattgaacagctcatcaaggacactgaagaacttagatccgaaaaaggtatcgagcatcaagatagccagcattccttcttagctttcctgaacacacctactgacgcactggatcagtttgaaaccgatcccgtggagaacacgtatgtctggaacccctctgttaagtttcatattcaatcaaggtctacctccccctcaacatcttctgaggcagaaccggttaagacagtggatagtacgccactcagcgtgcacaccccaacattgcgcaagaagggctgtccgggttccacggggtttccacccaaaagaaaaactcaccagttcttcgtgaaatcatttaccaccccgacaaagtgccaccaatgcaccagcctcatggttgggctgatacgccagggttgctcctgcgaggtatgcggcttctcctgtcacattacatgcgttaataaggctcctaccacctgtcccgttccgcctgagcagacaaaaggtccacttggcatagacccacagaagggcataggaactgcttacgagggccacgtgcgtattccaaaaccagctggggttaaaaaaggctggcaaagggccctggcgatcgtgtgtgactttaagctctttctgtatgacatcgcggagggcaaggcgtctcagccatctgttgtgatctcccaagtcatcgacatgcgcgatgaggagttctcagtcagttctgtccttgcgagcgacgtcatacacgcttctaggaaggatatcccgtgcatattcagagtcactgcctctcagttgtccgcttccaacaacaaatgctcgattctgatgctggctgatacagagaacgagaagaataagtgggtcggtgtcctgtccgaactgcataagatcctaaagaagaacaagtttcgagataggtcggtctatgtccctaaagaagcctatgacagcacgttgcctttgatcaagaccacacaggcagctgcgattattgatcatgagcggatcgcactgggaaacgaagaaggactgtttgtggtgcatgtcaccaaagatgagattattagagtcggggacaacaagaaaatccaccaaatcgagctcataccaaatgatcagctggtggccgttatatccggccgcaatcgacacgtccgcttgtttcccatgtctgcactggatggacgagaaaccgacttttacaaactgagcgagaccaagggctgccagaccgtcacttctggtaaggtgcggcacggggcactcacatgtctttgcgtggcaatgaaaaggcaggtcttgtgctacgaactctttcagagcaagactagacacaggaaatttaaggaaatccaggtcccgtacaatgttcaatggatggccatcttcagcgagcagttatgcgttggattccagagcggctttcttaggtatcccctgaatggtgaaggcaatccctattctatgctgcatagtaacgatcatactctctccttcattgcacaccagccgatggatgcaatctgtgccgtcgagatttcctccaaggaataccttttgtgcttcaactcaattgggatctacacagactgccaggggaggcgaagtcggcaacaggagttgatgtggcccgctaatccctcaagctgttgctataatgcaccctacctttctgtatattccgagaatgccgtcgatatcttcgacgtgaattcaatggagtggatccagacacttccacttaagaaggtgaggccccttaacaatgaagggtctctaaacctactgggactggaaaccattagactgatctattttaagaacaagatggcagaaggagacgaactggtcgtacccgaaacatctgataattcccgaaagcagatggtgaggaacatcaacaacaaacgcagatactcatttcgcgttcccgaagaggagcgcatgcagcagcggcgtgaaatgcttagggatcccgaaatgagaaacaagctgatctctaacccaactaattttaaccatatcgctcacatggggccaggcgacggcatccaaatcctaaaagatctcccgatgaatccccgcccccaggagagcaggactgtgttctctggcagcgtgtcaatccctagtatcacaaagagccgccccgaacccggcagaagtatgtccgcttctagcggactcagcgcccggagtagcgctcagaacgggagtgctctgaagcgcgagttctcaggcggctcctattctgctaaaagacagccaatgccctcaccatccgagggctcactttctagtggtgggatggaccagggatcagacgctcccgcacgcgatttcgacggcgaggactccgacagcccacggcattctacagctagcaattcctcaaacctttctagtcccccgagcccggcaagcccaagaaaaacaaagagcctctctcttgaaagcacggatcgaggcagttgggatccatag

SEQ ID NO: 284528 - DNA, 5264 bp, Artificial Sequence
  derived and/or modified sequence
atgagtggcgaagtgaggctgcgccaattggagcagttcatcctggacggtccagcacagaccaatggtcagtgtttttccgtggagacactgttggacatcctcatttgtctctacgatgagtgtaacaacagtcccttgagaagggaaaaaaacattctggaataccttgagtgggcaaaaccctttacctcaaaagtgaagcaaatgagactacatcgggaggattttgagattctgaaggttataggtagaggcgcattcggcgaggtggccgtggtaaaactgaagaacgccgataaagttttcgctatgaaaatactgaacaagtgggagatgcttaaaagagccgaaaccgcatgctttcgggaagagagggacgtgctcgtgaacggtgacaataaatggataacgaccttgcattacgcctttcaggatgacaataacctgtatctggtgatggattattacgtaggcggtgacctgctgaccctgttgtctaagttcgaagacagattgccagaggatatggctaggttctacttggccgagatggtcatcgccatagactcagtccaccagctgcattatgttcacagggacattaagcctgataacattctgatggacatgaacggacatatccggctcgccgatttcgggagttgcctgaagctgatggaagatggcactgtgcagtcctccgtagccgtcggcaccccagactatatcagtccagagattcttcaagccatggaggatggcaaggggagatacggtcctgaatgtgattggtggagcctcggggtgtgtatgtacgagatgctgtacggcgagactcctttctatgcggaatctctggtcgaaacttacggtaaaatcatgaaccataaagaacggtttcagtttcctgcacaggtcaccgacgtgagtgagaatgcgaaggacctgattcgtcgtctcatctgctcgcgggagcatcggctgggtcaaaatggaatcgaagattttaagaaacatccgttcttttccgggatagactgggacaacatccggaactgcgaggctccatacattcctgaggtgtcttctcccactgatacaagtaatttcgatgtagatgacgattgccttaagaattctgagaccatgcctccacctactcacactgcctttagcggccaccatctcccatttgtaggcttcacttataccagctcctgcgtcttaagcgacagatcctgcctgcgagtgactgctggccctacctcactggaccttgacgtgaatgtgcaacggaccctagataacaacttagccaccgaggcctatgagaggcgcattaagcgactcgaacaagaaaaattggaactgtcaaggaagctgcaggagtctacccagaccgtgcaggctctccagtattccaccgttgatggcccattgactgcctccaaagatctggaaatcaagaaccttaaagaggagatcgagaagttgcggaaacaggtgaccgagtcgagccatctagagcagcagctggaagaagcgaacgcggtccgtcaagaactcgacgacgcgtttcgacagattaaagcatacgaaaagcagatcaaaacgctgcagcaggagagagaggacctgaataaagagctggtgcaggcctccgagagactgaaaaaccagagtaaagagctgaaggacgctcattgccagcgtaagctggctatgcaggaattcatggaaatcaacgagcgtctgacggagctccacacacagaaacagaaacttgcaagacacgtacgcgacaaagaagaagaggtagacctcgtcatgcagaaagttgaatccctccgacaggaactgaggagaaccgagagggccaaaaaggaactggaggtgcataccgaagccctggcggcagaggcatctaaggacagaaagctgagagagcagtccgaacactatagcaagcagctggaaaacgaactggagggtttgaagcaaaagcagatttcatatagtcctggtgtgtgcagtattgaacatcagcaggagatcaccaagctgaagacagatcttgaaaagaagagcatcttttatgaagaagagctctcaaagagagagggcatccacgccaatgaaatcaaaaacctcaagaaagagctgcacgactccgaggggcagcaattggcgctgaataaggaaattatgatcctgaaggacaagctagagaaaaccagacgcgaaagccagagcgaacgcgaagagttcgagagcgaattcaagcagcagtatgagcgcgagaaggttctcctaactgaggagaacaagaagcttacctcagaattggacaaactgacaactctctatgaaaacttatcaattcataatcaacaacttgaggaggaagtgaaggacctcgcagataaaaaagagtcagtcgcgcattgggaggcccagatcacagaaattatccagtgggtgagcgatgagaaagatgctagagggtatctgcaagccctggcgagcaagatgacagaggaactcgaggccctgcgtaattctagtttgggaacaagagccaccgacatgccttggaagatgcggagattcgctaagctcgacatgtccgcaagactggaactgcaaagcgccctggatgccgaaatacgggcaaaacaggcaatccaagaggaactgaacaaggttaaagcatcaaacataataactgagtgtaaactgaaagattctgaaaaaaagaacttggagctcctgtcagagattgagcagctgataaaggacactgaagaactccgcagcgaaaaagggatagagcaccaagactcccagcatagcttcctggcctttctcaacactccaacggacgcactagaccagttcgagaccgatccagtggaaaacacttacgtgtggaatccaagtgtcaaatttcatattcagagcaggtccacatccccctctacctcgagtgaagccgagcctgtcaagacggtggactccacccccctcagtgtgcatacacccaccctgaggaaaaaaggatgccccggatctacaggtttccctcccaaaaggaagacccatcaattttttgtaaaaagtttcacaacaccaaccaaatgccaccagtgcactagcctaatggtgggactgattcgtcagggttgtagttgcgaagtgtgcggcttttcctgtcacatcacgtgtgtaaacaaggcacctaccacatgcccagtccctccagaacaaaccaagggacccctgggaatcgatcctcagaaaggtatcggcaccgcctatgaaggacacgtgcgtattccaaagcccgcaggagtgaagaaaggctggcagagagcactggccatagtgtgcgattttaagttatttttatacgatattgcagagggtaaagccagccagccttccgtggtcataagccaggtgattgacatgcgagacgaagagttctcagtatcctcggtgttggcatccgacgtgatccatgcctcccggaaggatattccgtgtattttccgcgtcaccgcctcccagcttagcgcctcaaacaataagtgctctattctaatgcttgccgacactgaaaacgagaagaataagtgggtgggcgtactttccgaactgcacaagatcctcaaaaagaacaaatttcgcgatagatcagtctacgtccctaaagaggcctacgacagtactttgcccctcatcaagaccacacaagccgcagcaatcatcgatcatgagaggattgccctggggaatgaggaaggtctgtttgttgtacacgtcacaaaagatgagatcataagggtgggggataataaaaagatacatcaaatcgagctgatcccaaacgatcagctggtggcagtcatcagcggcagaaaccggcacgtgcggctgttccctatgtccgctttagacgggagggaaacagacttctataagctgtctgagactaaggggtgccaaaccgtgacaagtggcaaggttcgtcacggggctctcacatgcttatgtgtcgccatgaagaggcaggttctctgttacgagctgtttcaatctaagacgcgacaccgtaaatttaaagaaatccaggtgccatataacgttcagtggatggccattttttctgaacagctatgcgtaggattccaatctgggtttcttcggtaccctcttaatggagaaggtaatccttattctatgcttcatagtaacgaccacactctgtctttcatcgctcaccagcccatggacgcgatttgcgcagtggagatctcaagtaaagagtacctcctgtgcttcaactccatcggtatctacaccgactgtcagggccgtaggagccgtcaacaggagctgatgtggccagccaatcccagcagttgttgctacaacgccccatatttaagtgtttactctgaaaacgctgtcgacatatttgacgtcaactcaatggagtggattcagactctccccttgaaaaaagtcagacctctgaataatgaaggatctcttaatctgctggggctcgagacaatacgactgatttactttaagaacaagatggctgaaggagacgaattggtggtgccagagacatcagataactccagaaagcagatggtccggaatataaataacaaacgcagatatagttttagagtgcctgaagaagagcgcatgcagcagaggcgagaaatgctcagggacccagaaatgcgaaataagttgatatccaatccaactaattttaaccacattgcccatatgggccctggcgacgggatccagattttgaaggacctgcctatgaatcctagaccacaagagtcccgcacagtcttttcgggatctgtcagcatccctagcatcactaaaagtcgacctgagccaggcagatccatgagtgctagcagcgggctttccgctcggtctagcgctcagaacggcagcgctctgaagagggagttctctggcggttcgtactctgccaaacgtcagcccatgccctcaccttccgaggggtctctgagtagcggcggaatggaccaaggttccgacgcccctgccagagacttcgatggcgaggatagcgattccccgcgacactccaccgcctctaattcatctaatctgagctctcccccaagtcccgctagtccacgcaagacgaagagtctaagcctggaatccaccgatcggggatcatgggaccctta

SEQ ID NO: 284529 - DNA, 3147 bp, Artificial Sequence
  derived and/or modified sequence
taagaaggaattcacgcgaacgagattaagaatctgaagaaggagctgcacgactccgaggggcagcagctcgctcttaataaagagatcatgatattgaaagacaaactggaaaaaacacggcgagagtcccagtctgaacgcgaagagttcgaatccgagttcaaacaacagtatgagcgggagaaggtgctgctgactgaagagaacaagaaactcaccagtgagctggacaagctgaccaccttgtacgaaaacctttcgattcataaccagcagcttgaggaagaggtgaaagatcttgcagacaaaaaggagtctgttgctcactgggaggcccagatcaccgagattattcaatgggtgagcgacgagaaggacgctcgcggatatctgcaggctctcgccagcaagatgaccgaagagctggaagcactacgaaattcaagtctcgggacccgagcaactgacatgccatggaagatgcgacgctttgcaaaacttgacatgagcgcccgtctggagcttcagtctgccctagacgccgagatccgggcaaaacaggcgattcaggaggagctaaacaaagtgaaagcaagcaatattattacagagtgtaaactcaaggattctgaaaaaaagaacctcgagctgctttccgaaatagagcagttgatcaaagacacagaagaacttaggtcagaaaagggtatcgaacaccaggatagtcaacactctttcctcgccttcctgaatacgccaacagatgcgctggaccaatttgaaacggacccagttgagaacacttacgtgtggaatccctctgtgaagtttcacattcagtcccggagcacaagccccagcactagcagtgaagcagagccagttaaaaccgttgacagcacaccgctatccgtccacaccccaaccctcagaaagaagggatgccctggcagcaccggctttccccctaaaaggaaaactcaccaattctttgtcaagtcatttaccactccgacaaaatgccaccaatgtacttccctgatggttggacttattagacaggggtgtagttgcgaggtttgtggcttcagttgccatatcacctgcgtcaacaaggccccaacaacctgtccagtgcctccggaacaaacgaagggccctctcgggatcgatcctcagaaagggatagggacggcctatgagggacacgttagaatacccaaacccgctggtgtcaagaagggttggcaacgcgctctggcaatcgtttgcgactttaagctgtttctctacgatatcgcagagggaaaggcttcacaaccctccgtggtcatctctcaggtgatcgatatgagagacgaagaattctcggtctcttctgtgcttgcgtccgacgtgatccatgccagcaggaaggatatcccttgtatcttcagggtgacggcctcccagttatccgcctctaacaataaatgctcaatcctgatgttggccgataccgaaaacgagaaaaataagtgggtaggcgtgctgtcagagcttcacaaaatccttaaaaaaaacaagtttagagatagatcagtgtacgtaccaaaggaagcatatgactccactcttcccctcatcaaaaccacccaggcggctgcgattatcgatcacgaacgaatagccctgggtaacgaagaagggctcttcgtcgttcatgttacgaaggatgagatcattcgcgtgggcgacaacaaaaagattcaccagatagagctgattccaaatgaccagctggtcgctgtgattagtggcaggaataggcacgtgcgcctattccctatgtcagctcttgacggacgtgagacagatttctacaaactttcagaaactaagggatgtcagacggttacttccggcaaggtgaggcacggagcactcacatgcctgtgcgtcgccatgaagaggcaggttctgtgctacgaactgttccaatctaagactagacatcgcaaattcaaggagattcaagtgccttacaacgtgcaatggatggccatattcagtgagcaattgtgtgtgggcttccagtccggatttctgagataccccctgaatggtgaaggtaatccatacagtatgttgcacagtaatgaccacaccctttcctttattgctcatcagcctatggacgccatctgcgcagtggaaataagcagcaaggagtatctgttgtgctttaactcaataggcatttataccgactgccagggacgtagatcgaggcaacaggaactcatgtggcccgcaaatccgtctagttgctgttacaatgccccatacctctctgtgtactctgagaacgctgtggacatctttgatgttaactccatggagtggatccagacactgccattgaaaaaagtgagacctcttaataatgagggcagcttgaacctgttaggtcttgagacgatcagactgatttatttcaagaacaaaatggcagagggggatgagctggttgtacctgaaacgtccgataattcccggaagcaaatggtgcggaacataaacaacaagcgtcggtacagcttccgcgttccagaggaagagcgaatgcagcaacgaagagagatgcttcgcgaccctgagatgaggaataagcttatatctaatcccacaaacttcaatcacattgcccacatggggccaggtgacggcatccaaatcctgaaggacctccccatgaacccacggccacaggaatcacgcaccgttttctcgggatccgtcagtattcccagcataaccaagtcccggccagagccaggcaggagtatgagcgcttcttccgggttgagcgcgaggtcgtcagctcaaaatggatccgctctcaagcgcgagttttcgggtgggtcctattccgccaaacgccaacccatgcctagccccagcgagggtagtctgagtagtggcggaatggaccagggtagcgacgcacccgctagggatttcgacggcgaggacagcgactccccgaggcattctaccgccagcaattccagcaacttgtcatctccaccatcacccgcttcccccagaaagacaaagtctttgagtctggaatccacagatcggggaagttgggacccatag

SEQ ID NO: 284530 - DNA, 10658 bp, Artificial Sequence
  derived and/or modified sequence
gcggcccggtgcgggtgtcggggagaccgggctctctgcccggcgcggcgcggcgcggctcggcccacgagcgaccaccgacatggagtgggctcgggcggccaagtagccgcttctccggagcccggtgccagtgccgcccgcagcccgccttccacccccggccgcgccgccggtcaggccctagggtgaagccgggaggaaaatgaagagttttcaccggaatccgttgaaaataggactgactgcaaagccttaaagaaagaaggacctcgggaggagaaacgaaaagccgcctccgggcaagacttggcgtgctccgagccgaggggctgcttcagggacctcgccccctccctttcccgctggagaaattgccgctgatgcattatccaagtggtggttgggaggatttgcagcaacatttttggttttccctcccccttctatgcattctgtttttttcctcccttttctgtttttcttcttcccgggaagtgaattgctgatgcaaatcggactttattcattaatgatgcaaccggattcgtttcaggattacgttgcacgagttgaattttgaatgaaggagaagagtttttttttttttttttaaagaagtgttgactctctagttcgttgtacttttaattattattttatttaaatatacgacttaattgtattcttttaaaaatgcattaagtatatattttatggtaatttaccctcaaaatatatgtatatgggtgaaattgaagacgcttcagttaagtgaggttactggtgtgttggatgtttaattcagcaccagcattgcatgacagttgtttgaataacaagtggtttatttttaaaaccataccttttaaaatttaggttcagataatagtaaaagtcatcataataatttaaaggaaaaccagcagaaatcgaagcaaacatgtctggagaagtgcgtttgaggcagttggagcagtttattttggacgggcccgctcagaccaatgggcagtgcttcagtgtggagacattactggatatactcatctgcctttatgatgaatgcaataattctccattgagaagagagaagaacattctcgaatacctagaatgggctaaaccatttacttctaaagtgaaacaaatgcgattacatagagaagactttgaaatattaaaggtgattggtcgaggagcttttggggaggttgctgtagtaaaactaaaaaatgcagataaagtgtttgccatgaaaatattgaataaatgggaaatgctgaaaagagctgagacagcatgttttcgtgaagaaagggatgtattagtgaatggagacaataaatggattacaaccttgcactatgctttccaggatgacaataacttatacctggttatggattattatgttggtggggatttgcttactctactcagcaaatttgaagatagattgcctgaagatatggctagattttacttggctgagatggtgatagcaattgactcagttcatcagctacattatgtacacagagacattaaacctgacaatatactgatggatatgaatggacatattcggttagcagattttggttcttgtctgaagctgatggaagatggaacggttcagtcctcagtggctgtaggaactccagattatatctctcctgaaatccttcaagccatggaagatggaaaagggagatatggacctgaatgtgactggtggtctttgggggtctgtatgtatgaaatgctttacggagaaacaccattttatgcagaatcgctggtggagacatacggaaaaatcatgaaccacaaagagaggtttcagtttccagcccaagtgactgatgtgtctgaaaatgctaaggatcttattcgaaggctcatttgtagcagagaacatcgacttggtcaaaatggaatagaagactttaagaaacacccatttttcagtggaattgattgggataatattcggaactgtgaagcaccttatattccagaagttagtagcccaacagatacatcgaattttgatgtagatgatgattgtttaaaaaattctgaaacgatgcccccaccaacacatactgcattttctggccaccatctgccatttgttggttttacatatactagtagctgtgtactttctgatcggagctgtttaagagttacggctggtcccacctcactggatcttgatgttaatgttcagaggactctagacaacaacttagcaactgaagcttatgaaagaagaattaagcgccttgagcaagaaaaacttgaactcagtagaaaacttcaagagtcaacacagactgtccaagctctgcagtattcaactgttgatggtccactaacagcaagcaaagatttagaaataaaaaacttaaaagaagaaattgaaaaactaagaaaacaagtaacagaatcaagtcatttggaacagcaacttgaagaagctaatgctgtgaggcaagaactagatgatgcttttagacaaatcaaggcttatgaaaaacaaatcaaaacgttacaacaagaaagagaagatctaaataaggaactagtccaggctagtgagcgattaaaaaaccaatccaaagagctgaaagacgcacactgtcagaggaaactggccatgcaggaattcatggagatcaatgagcggctaacagaattgcacacccaaaaacagaaacttgctcgccatgtccgagataaggaagaagaggtggacctggtgatgcaaaaagttgaaagcttaaggcaagaactgcgcagaacagaaagagccaaaaaagagctggaagttcatacagaagctctagctgctgaagcatctaaagacaggaagctacgtgaacagagtgagcactattctaagcaactggaaaatgaattggagggactgaagcaaaaacaaattagttactcaccaggagtatgcagcatagaacatcagcaagagataaccaaactaaagactgatttggaaaagaaaagtatcttttatgaagaagaattatctaaaagagaaggaatacatgcaaatgaaataaaaaatcttaagaaagaactgcatgattcagaaggtcagcaacttgctctcaacaaagaaattatgattttaaaagacaaattggaaaaaaccagaagagaaagtcaaagtgaaagggaggaatttgaaagtgagttcaaacaacaatatgaacgagaaaaagtgttgttaactgaagaaaataaaaagctgacgagtgaacttgataagcttactactttgtatgagaacttaagtatacacaaccagcagttagaagaagaggttaaagatctagcagacaagaaagaatcagttgcacattgggaagcccaaatcacagaaataattcagtgggtcagcgatgaaaaggatgcacgagggtatcttcaggccttagcttctaaaatgactgaagaattggaggcattaagaaattccagcttgggtacacgagcaacagatatgccctggaaaatgcgtcgttttgcgaaactggatatgtcagctagactggagttgcagtcggctctggatgcagaaataagagccaaacaggccatccaagaagagttgaataaagttaaagcatctaatatcataacagaatgtaaactaaaagattcagagaagaagaacttggaactactctcagaaatcgaacagctgataaaggacactgaagagcttagatctgaaaagggtatagagcaccaagactcacagcattctttcttggcatttttgaatacgcctaccgatgctctggatcaatttgaagattccttttcttcttcctcatcttcactgattgattttttggatgacactgatcccgttgagaacacatatgtatggaacccgagcgtcaagtttcacatccagtcacggtccacatctccttccacatctagtgaagctgagccagttaagactgtagactccactccactttcagttcacacaccaaccttaaggaaaaaaggatgtcctggttcaactggctttccacctaagcgcaagactcaccagttttttgtaaaatcttttactactcctaccaagtgtcatcagtgtacctccttgatggtgggtttaataagacagggctgttcatgtgaagtgtgtggattctcatgccatataacttgtgtaaacaaagctccaaccacttgtccagttcctcctgaacagacaaaaggtcccctgggtatagatcctcagaaaggaataggaacagcatatgaaggtcatgtcaggattcctaagccagctggagtgaagaaagggtggcagagagcactggctatagtgtgtgacttcaaactctttctgtacgatattgctgaaggaaaagcatctcagcccagtgttgtcattagtcaagtgattgacatgagggatgaagaattttctgtgagttcagtcttggcttctgatgttatccatgcaagtcggaaagatataccctgtatatttagggtcacagcttcccagctctcagcatctaataacaaatgttcaatcctgatgctagcagacactgagaatgagaagaataagtgggtgggagtgctgagtgaattgcacaagattttgaagaaaaacaaattcagagaccgctcagtctatgttcccaaagaggcttatgacagcactctacccctcattaaaacaacccaggcagccgcaatcatagatcatgaaagaattgctttgggaaacgaagaagggttatttgttgtacatgtcaccaaagatgaaattattagagttggtgacaataagaagattcatcagattgaactcattccaaatgatcagcttgttgctgtgatctcaggacgaaatcgtcatgtacgactttttcctatgtcagcattggatgggcgagagaccgatttttacaagctgtcagaaactaaagggtgtcaaaccgtaacttctggaaaggtgcgccatggagctctcacatgcctgtgtgtggctatgaaaaggcaggtcctctgttatgaactatttcagagcaagacccgtcacagaaaatttaaagaaattcaagtcccatataatgtccagtggatggcaatcttcagtgaacaactctgtgtgggattccagtcaggatttctaagataccccttgaatggagaaggaaatccatacagtatgctccattcaaatgaccatacactatcatttattgcacatcaaccaatggatgctatctgcgcagttgagatctccagtaaagaatatctgctgtgttttaacagcattgggatatacactgactgccagggccgaagatctagacaacaggaattgatgtggccagcaaatccttcctcttgttgttacaatgcaccatatctctcggtgtacagtgaaaatgcagttgatatctttgatgtgaactccatggaatggattcagactcttcctctcaaaaaggttcgacccttaaacaatgaaggatcattaaatcttttagggttggagaccattagattaatatatttcaaaaataagatggcagaaggggacgaactggtagtacctgaaacatcagataatagtcggaaacaaatggttagaaacattaacaataagcggcgttattccttcagagtcccagaagaggaaaggatgcagcagaggagggaaatgctacgagatccagaaatgagaaataaattaatttctaatccaactaattttaatcacatagcacacatgggtcctggagatggaatacagatcctgaaagatctgcccatgaaccctcggcctcaggaaagtcggacagtattcagtggctcagtcagtattccatctatcaccaaatcccgccctgagccaggccgctccatgagtgctagcagtggcttgtcagcaaggtcatccgcacagaatggcagcgcattaaagagggaattctctggaggaagctacagtgccaagcggcagcccatgccctccccgtcagagggctctttgtcctctggaggcatggaccaaggaagtgatgccccagcgagggactttgacggagaggactctgactctccgaggcattccacagcttccaacagttccaacctaagcagccccccaagcccagcttcaccccgaaaaaccaagagcctctccctggagagcactgaccgcgggagctgggacccgtgagctgcctcagcactgggacctctcgctctccgctccctgccactcgcctcctctcactttcatctcttccctccacctcgcctgctcggcctgaaagccaccaggggctggcagcagtagcaggacagggattcaggagttctgacgacacgactctcagatccacgcccccagcctaacagcaacaacaaagacagactttccgtagcagcttagattaacgttgatttcattccatgcacttagagttgctttcagtaacattttacccctactcccaaaggtagcttaaatagacagattacacaaatgtaagtgataagaataagattagacagattttgctttcacagtagagtctcattatagtcctaaaatagctcatgggcttctccgcatccagaagggagaattggtccctggagtggctcactaagctcttaatcagcaaacgcagtgagtatcaacctgattgttgccaggaaatccttatgaattaaaacaatgcatattttactacagtacagagtttaaatgaatacataaatgtagaagtactgaatgtatatatttaaaaggagcctcttgtattcaacaaaagatggatgcatatataagagagatgatttaatttaaagaaatatgttgtttcttgtctgtaatgtaatgtaaagggtggaaaggcctcaagctcacatttgtagagagagagcgagagaaatcagagttccctttattgccctgtcctcaaactggtcataggctctagtcacctggggagctgtagaaaacacttgcagagccaggttttgctggtttggggcatgccctgggcaccagagctttaacatttgaagccacttcagcagcagcagcaaaaggcgaactcatctctacccaagatgtttcttttcctagtggtggaatttgaacacttctcactttttattgtattttatcttccgcagataaatgtagaaatacacgattctgtcacctctgatcccttccatctgaaaggttacaaggagtgttgtagcttctgaaggtgcagaaaacaatttctaaaaatgcttttattcctgggctaatcctgtccctccctaagtcacagcgaggtgtctgtcccagggctggagatgcttcccaaggaggagtctgttttgttgagagtgggcgtgggcttcttcacataagcctggggaaggaagaaaaaacggctttcattaccaaataatgtaaaacctcaaaagcaagggcttcaacagccttaaccaaatattattccccatagccagtggaaaatggatgtgacaaccccagtgcgcaggccagagtgagtgagcccagcacggcgctccgactggcttcctctctcaggtgctggattgtggggttagtggcatttccagctggattcctcctgttgtagttgccataaggaaatgagatgcagaatcagaaggatctatttctacagaatcatttcaccagttaagcacatgagtagagaaagagataaaaataaaagtatctcatgaaggaaagagattttgcctctcttttacttttcacctaagtttctctgagaaatagagacaggattctctctttaaaattcagtgaaaatgaagaaagttttcctgcagttgctaacctgagttgcagtgtttaaggccatcatttcactgctgctgtctgtgactccacgtctgtgtcactgaggtgacctgcgtgtcactgaggtggccaccatgctggcctgcggcatgtgcagggagctgaggctgtttccaggtgatgctgctgtgtggagaaggttctgagatgcagtgagggaagaaaggatcctgctggggattccattgtaagcacctataatcgggaattttcatgtaacagctttgacatttaaacattctgagtttggtgccagctcagatttgattatattttattttggatgggtgtaattcacagcacagttctaatctcccaaatctttctgctttttagaatgaagtataaaaatacttttctcacctgaataccaagggttggccctttagttggatcattgtcatatgacttggtagatccttgtcctcagcacctcacgtgagagaagggagtcagccagccggccccctgcttggtgctcgtgaccagctcgcaccccttctgtccacccttctctcctctcctccccactctccccaccctcctcactctccccaccctcctcactctccccaccctcccctcctctcctcctcactcttcccaccctccccatccccaccctccccatcctcctcttccctttccccttgccttctcctctctcccttctcttctcaggcagggaggaggccatcccaagccgagattaacaggacttgacataagccattagtttgtagctttgacaagtaattatgaatttttgttgcttataggtgcttattttgcaaaggatgcttttaagatcaaaataataaccctacctaaagtctagctccactgctatgggtcatactcttcagcctcccaacagggcagagagagagagctactgaggcttgtctaggttgccaggctaactgggcgacttgtccatattcaccccatggattgcaccatggcactctttgatttttccactgcaatggcaagtaatctcatcagtcataatagagcagtcccgaatgcgtgcagattctaaaagcagggctttaggagagaaacactgccagggggaatagttttggggagggttttcccaaaataacggtcatcctactgggtttatcccacccttaaatatgaagcctgttacctccagaagcttctgagaagaatgatgtgaaaagacagggagtgggttctaggcaaagaaaacataatgaccattcagaggagtcagtagcacagctcacagataaagtattttattactatctgaagttttcttttgttttcatgcaggacattttaaaaacgtatatggcagcagaaacctgtttctcaatagaaaaaatacattcagaggcatttctgggatagtctatctgtgttagtatttggtgctatctatgtccagccaagttatctaccctcaaattctgactaatcatgtttgtgctttgggtatttaaaattacatacatatatattctttttgccaaaaacaaaagtcttgcttcttgtcaaatgattgctaaagtagatcttacattttttgttattatgtatgtatttatacacatccccaacacacttagtgatttctgttatttcctagggagcacagctttaaggctatgagatacaactaaaaggagcccatctatttggttttccagccaattattgtactcacatttcaggggagaatctgaaattcctgtcatgtttacagcaacaatctatcattcctggctagctctcagcctctctctccttccataggttagaattatgtcattttgttacttagtggccacgtctatttctgagaaagactggttacatttatgtggcatctcaggtatcattaaggaaaagccagagcaggggtgagcagaggtcaaaaccacagacgcagcagggccatttgccgcctttggccgggatcacaaccactgcagtctcccagcaggtaggccttgccaagcctaaggctccccatccaatctagacagaggggcgctcagagcagactttgccgtagcccatgtctggtgagcacaacagggaatgaattgggcactccactcccccgtctctctggcccagccctgaactagatgagctgcatttcatggagcccattttaaaatctctttccttatgactttgttactcaagtccagagttctctgtgcacttctgctagataaggagtgtaagccctgccccccagcactggcagcacgctgggccctccccacacaggacaccgtgcagttccgggggaagctgactcaaatcaaccttgaaatctcatgaaaacaaaatgacttgtctttttatttgatagtgtaatatcattcattttataaattttttagggtttttctcgtaatattgtacagttttgcatggcctggtgtgatcattttttggttagaatataatgctgacaaatgtggatggaggggaagatactgctttagcctatcactccttattttattttgtttggttttatgccctcagtgtcttagggaactttttaagagatcctctgctaccaaacaatgatgtggattcttttgcacagaaatatttaaggtgggatggtaaaaaatgtcacaaaagactcctcaccaatactttatgttgatatcacttaatattaaccagactttgctgtattgcaataaaacagagaactgtt

SEQ ID NO: 284531 - DNA, 10610 bp, Artificial Sequence
  derived and/or modified sequence
gcggcccggtgcgggtgtcggggagaccgggctctctgcccggcgcggcgcggcgcggctcggcccacgagcgaccaccgacatggagtgggctcgggcggccaagtagccgcttctccggagcccggtgccagtgccgcccgcagcccgccttccacccccggccgcgccgccggtcaggccctagggtgaagccgggaggaaaatgaagagttttcaccggaatccgttgaaaataggactgactgcaaagccttaaagaaagaaggacctcgggaggagaaacgaaaagccgcctccgggcaagacttggcgtgctccgagccgaggggctgcttcagggacctcgccccctccctttcccgctggagaaattgccgctgatgcattatccaagtggtggttgggaggatttgcagcaacatttttggttttccctcccccttctatgcattctgtttttttcctcccttttctgtttttcttcttcccgggaagtgaattgctgatgcaaatcggactttattcattaatgatgcaaccggattcgtttcaggattacgttgcacgagttgaattttgaatgaaggagaagagtttttttttttttttttaaagaagtgttgactctctagttcgttgtacttttaattattattttatttaaatatacgacttaattgtattcttttaaaaatgcattaagtatatattttatggtaatttaccctcaaaatatatgtatatgggtgaaattgaagacgcttcagttaagtgaggttactggtgtgttggatgtttaattcagcaccagcattgcatgacagttgtttgaataacaagtggtttatttttaaaaccataccttttaaaatttaggttcagataatagtaaaagtcatcataataatttaaaggaaaaccagcagaaatcgaagcaaacatgtctggagaagtgcgtttgaggcagttggagcagtttattttggacgggcccgctcagaccaatgggcagtgcttcagtgtggagacattactggatatactcatctgcctttatgatgaatgcaataattctccattgagaagagagaagaacattctcgaatacctagaatgggctaaaccatttacttctaaagtgaaacaaatgcgattacatagagaagactttgaaatattaaaggtgattggtcgaggagcttttggggaggttgctgtagtaaaactaaaaaatgcagataaagtgtttgccatgaaaatattgaataaatgggaaatgctgaaaagagctgagacagcatgttttcgtgaagaaagggatgtattagtgaatggagacaataaatggattacaaccttgcactatgctttccaggatgacaataacttatacctggttatggattattatgttggtggggatttgcttactctactcagcaaatttgaagatagattgcctgaagatatggctagattttacttggctgagatggtgatagcaattgactcagttcatcagctacattatgtacacagagacattaaacctgacaatatactgatggatatgaatggacatattcggttagcagattttggttcttgtctgaagctgatggaagatggaacggttcagtcctcagtggctgtaggaactccagattatatctctcctgaaatccttcaagccatggaagatggaaaagggagatatggacctgaatgtgactggtggtctttgggggtctgtatgtatgaaatgctttacggagaaacaccattttatgcagaatcgctggtggagacatacggaaaaatcatgaaccacaaagagaggtttcagtttccagcccaagtgactgatgtgtctgaaaatgctaaggatcttattcgaaggctcatttgtagcagagaacatcgacttggtcaaaatggaatagaagactttaagaaacacccatttttcagtggaattgattgggataatattcggaactgtgaagcaccttatattccagaagttagtagcccaacagatacatcgaattttgatgtagatgatgattgtttaaaaaattctgaaacgatgcccccaccaacacatactgcattttctggccaccatctgccatttgttggttttacatatactagtagctgtgtactttctgatcggagctgtttaagagttacggctggtcccacctcactggatcttgatgttaatgttcagaggactctagacaacaacttagcaactgaagcttatgaaagaagaattaagcgccttgagcaagaaaaacttgaactcagtagaaaacttcaagagtcaacacagactgtccaagctctgcagtattcaactgttgatggtccactaacagcaagcaaagatttagaaataaaaaacttaaaagaagaaattgaaaaactaagaaaacaagtaacagaatcaagtcatttggaacagcaacttgaagaagctaatgctgtgaggcaagaactagatgatgcttttagacaaatcaaggcttatgaaaaacaaatcaaaacgttacaacaagaaagagaagatctaaataaggaactagtccaggctagtgagcgattaaaaaaccaatccaaagagctgaaagacgcacactgtcagaggaaactggccatgcaggaattcatggagatcaatgagcggctaacagaattgcacacccaaaaacagaaacttgctcgccatgtccgagataaggaagaagaggtggacctggtgatgcaaaaagttgaaagcttaaggcaagaactgcgcagaacagaaagagccaaaaaagagctggaagttcatacagaagctctagctgctgaagcatctaaagacaggaagctacgtgaacagagtgagcactattctaagcaactggaaaatgaattggagggactgaagcaaaaacaaattagttactcaccaggagtatgcagcatagaacatcagcaagagataaccaaactaaagactgatttggaaaagaaaagtatcttttatgaagaagaattatctaaaagagaaggaatacatgcaaatgaaataaaaaatcttaagaaagaactgcatgattcagaaggtcagcaacttgctctcaacaaagaaattatgattttaaaagacaaattggaaaaaaccagaagagaaagtcaaagtgaaagggaggaatttgaaagtgagttcaaacaacaatatgaacgagaaaaagtgttgttaactgaagaaaataaaaagctgacgagtgaacttgataagcttactactttgtatgagaacttaagtatacacaaccagcagttagaagaagaggttaaagatctagcagacaagaaagaatcagttgcacattgggaagcccaaatcacagaaataattcagtgggtcagcgatgaaaaggatgcacgagggtatcttcaggccttagcttctaaaatgactgaagaattggaggcattaagaaattccagcttgggtacacgagcaacagatatgccctggaaaatgcgtcgttttgcgaaactggatatgtcagctagactggagttgcagtcggctctggatgcagaaataagagccaaacaggccatccaagaagagttgaataaagttaaagcatctaatatcataacagaatgtaaactaaaagattcagagaagaagaacttggaactactctcagaaatcgaacagctgataaaggacactgaagagcttagatctgaaaagggtatagagcaccaagactcacagcattctttcttggcatttttgaatacgcctaccgatgctctggatcaatttgaaactgatcccgttgagaacacatatgtatggaacccgagcgtcaagtttcacatccagtcacggtccacatctccttccacatctagtgaagctgagccagttaagactgtagactccactccactttcagttcacacaccaaccttaaggaaaaaaggatgtcctggttcaactggctttccacctaagcgcaagactcaccagttttttgtaaaatcttttactactcctaccaagtgtcatcagtgtacctccttgatggtgggtttaataagacagggctgttcatgtgaagtgtgtggattctcatgccatataacttgtgtaaacaaagctccaaccacttgtccagttcctcctgaacagacaaaaggtcccctgggtatagatcctcagaaaggaataggaacagcatatgaaggtcatgtcaggattcctaagccagctggagtgaagaaagggtggcagagagcactggctatagtgtgtgacttcaaactctttctgtacgatattgctgaaggaaaagcatctcagcccagtgttgtcattagtcaagtgattgacatgagggatgaagaattttctgtgagttcagtcttggcttctgatgttatccatgcaagtcggaaagatataccctgtatatttagggtcacagcttcccagctctcagcatctaataacaaatgttcaatcctgatgctagcagacactgagaatgagaagaataagtgggtgggagtgctgagtgaattgcacaagattttgaagaaaaacaaattcagagaccgctcagtctatgttcccaaagaggcttatgacagcactctacccctcattaaaacaacccaggcagccgcaatcatagatcatgaaagaattgctttgggaaacgaagaagggttatttgttgtacatgtcaccaaagatgaaattattagagttggtgacaataagaagattcatcagattgaactcattccaaatgatcagcttgttgctgtgatctcaggacgaaatcgtcatgtacgactttttcctatgtcagcattggatgggcgagagaccgatttttacaagctgtcagaaactaaagggtgtcaaaccgtaacttctggaaaggtgcgccatggagctctcacatgcctgtgtgtggctatgaaaaggcaggtcctctgttatgaactatttcagagcaagacccgtcacagaaaatttaaagaaattcaagtcccatataatgtccagtggatggcaatcttcagtgaacaactctgtgtgggattccagtcaggatttctaagataccccttgaatggagaaggaaatccatacagtatgctccattcaaatgaccatacactatcatttattgcacatcaaccaatggatgctatctgcgcagttgagatctccagtaaagaatatctgctgtgttttaacagcattgggatatacactgactgccagggccgaagatctagacaacaggaattgatgtggccagcaaatccttcctcttgttgttacaatgcaccatatctctcggtgtacagtgaaaatgcagttgatatctttgatgtgaactccatggaatggattcagactcttcctctcaaaaaggttcgacccttaaacaatgaaggatcattaaatcttttagggttggagaccattagattaatatatttcaaaaataagatggcagaaggggacgaactggtagtacctgaaacatcagataatagtcggaaacaaatggttagaaacattaacaataagcggcgttattccttcagagtcccagaagaggaaaggatgcagcagaggagggaaatgctacgagatccagaaatgagaaataaattaatttctaatccaactaattttaatcacatagcacacatgggtcctggagatggaatacagatcctgaaagatctgcccatgaaccctcggcctcaggaaagtcggacagtattcagtggctcagtcagtattccatctatcaccaaatcccgccctgagccaggccgctccatgagtgctagcagtggcttgtcagcaaggtcatccgcacagaatggcagcgcattaaagagggaattctctggaggaagctacagtgccaagcggcagcccatgccctccccgtcagagggctctttgtcctctggaggcatggaccaaggaagtgatgccccagcgagggactttgacggagaggactctgactctccgaggcattccacagcttccaacagttccaacctaagcagccccccaagcccagcttcaccccgaaaaaccaagagcctctccctggagagcactgaccgcgggagctgggacccgtgagctgcctcagcactgggacctctcgctctccgctccctgccactcgcctcctctcactttcatctcttccctccacctcgcctgctcggcctgaaagccaccaggggctggcagcagtagcaggacagggattcaggagttctgacgacacgactctcagatccacgcccccagcctaacagcaacaacaaagacagactttccgtagcagcttagattaacgttgatttcattccatgcacttagagttgctttcagtaacattttacccctactcccaaaggtagcttaaatagacagattacacaaatgtaagtgataagaataagattagacagattttgctttcacagtagagtctcattatagtcctaaaatagctcatgggcttctccgcatccagaagggagaattggtccctggagtggctcactaagctcttaatcagcaaacgcagtgagtatcaacctgattgttgccaggaaatccttatgaattaaaacaatgcatattttactacagtacagagtttaaatgaatacataaatgtagaagtactgaatgtatatatttaaaaggagcctcttgtattcaacaaaagatggatgcatatataagagagatgatttaatttaaagaaatatgttgtttcttgtctgtaatgtaatgtaaagggtggaaaggcctcaagctcacatttgtagagagagagcgagagaaatcagagttccctttattgccctgtcctcaaactggtcataggctctagtcacctggggagctgtagaaaacacttgcagagccaggttttgctggtttggggcatgccctgggcaccagagctttaacatttgaagccacttcagcagcagcagcaaaaggcgaactcatctctacccaagatgtttcttttcctagtggtggaatttgaacacttctcactttttattgtattttatcttccgcagataaatgtagaaatacacgattctgtcacctctgatcccttccatctgaaaggttacaaggagtgttgtagcttctgaaggtgcagaaaacaatttctaaaaatgcttttattcctgggctaatcctgtccctccctaagtcacagcgaggtgtctgtcccagggctggagatgcttcccaaggaggagtctgttttgttgagagtgggcgtgggcttcttcacataagcctggggaaggaagaaaaaacggctttcattaccaaataatgtaaaacctcaaaagcaagggcttcaacagccttaaccaaatattattccccatagccagtggaaaatggatgtgacaaccccagtgcgcaggccagagtgagtgagcccagcacggcgctccgactggcttcctctctcaggtgctggattgtggggttagtggcatttccagctggattcctcctgttgtagttgccataaggaaatgagatgcagaatcagaaggatctatttctacagaatcatttcaccagttaagcacatgagtagagaaagagataaaaataaaagtatctcatgaaggaaagagattttgcctctcttttacttttcacctaagtttctctgagaaatagagacaggattctctctttaaaattcagtgaaaatgaagaaagttttcctgcagttgctaacctgagttgcagtgtttaaggccatcatttcactgctgctgtctgtgactccacgtctgtgtcactgaggtgacctgcgtgtcactgaggtggccaccatgctggcctgcggcatgtgcagggagctgaggctgtttccaggtgatgctgctgtgtggagaaggttctgagatgcagtgagggaagaaaggatcctgctggggattccattgtaagcacctataatcgggaattttcatgtaacagctttgacatttaaacattctgagtttggtgccagctcagatttgattatattttattttggatgggtgtaattcacagcacagttctaatctcccaaatctttctgctttttagaatgaagtataaaaatacttttctcacctgaataccaagggttggccctttagttggatcattgtcatatgacttggtagatccttgtcctcagcacctcacgtgagagaagggagtcagccagccggccccctgcttggtgctcgtgaccagctcgcaccccttctgtccacccttctctcctctcctccccactctccccaccctcctcactctccccaccctcctcactctccccaccctcccctcctctcctcctcactcttcccaccctccccatccccaccctccccatcctcctcttccctttccccttgccttctcctctctcccttctcttctcaggcagggaggaggccatcccaagccgagattaacaggacttgacataagccattagtttgtagctttgacaagtaattatgaatttttgttgcttataggtgcttattttgcaaaggatgcttttaagatcaaaataataaccctacctaaagtctagctccactgctatgggtcatactcttcagcctcccaacagggcagagagagagagctactgaggcttgtctaggttgccaggctaactgggcgacttgtccatattcaccccatggattgcaccatggcactctttgatttttccactgcaatggcaagtaatctcatcagtcataatagagcagtcccgaatgcgtgcagattctaaaagcagggctttaggagagaaacactgccagggggaatagttttggggagggttttcccaaaataacggtcatcctactgggtttatcccacccttaaatatgaagcctgttacctccagaagcttctgagaagaatgatgtgaaaagacagggagtgggttctaggcaaagaaaacataatgaccattcagaggagtcagtagcacagctcacagataaagtattttattactatctgaagttttcttttgttttcatgcaggacattttaaaaacgtatatggcagcagaaacctgtttctcaatagaaaaaatacattcagaggcatttctgggatagtctatctgtgttagtatttggtgctatctatgtccagccaagttatctaccctcaaattctgactaatcatgtttgtgctttgggtatttaaaattacatacatatatattctttttgccaaaaacaaaagtcttgcttcttgtcaaatgattgctaaagtagatcttacattttttgttattatgtatgtatttatacacatccccaacacacttagtgatttctgttatttcctagggagcacagctttaaggctatgagatacaactaaaaggagcccatctatttggttttccagccaattattgtactcacatttcaggggagaatctgaaattcctgtcatgtttacagcaacaatctatcattcctggctagctctcagcctctctctccttccataggttagaattatgtcattttgttacttagtggccacgtctatttctgagaaagactggttacatttatgtggcatctcaggtatcattaaggaaaagccagagcaggggtgagcagaggtcaaaaccacagacgcagcagggccatttgccgcctttggccgggatcacaaccactgcagtctcccagcaggtaggccttgccaagcctaaggctccccatccaatctagacagaggggcgctcagagcagactttgccgtagcccatgtctggtgagcacaacagggaatgaattgggcactccactcccccgtctctctggcccagccctgaactagatgagctgcatttcatggagcccattttaaaatctctttccttatgactttgttactcaagtccagagttctctgtgcacttctgctagataaggagtgtaagccctgccccccagcactggcagcacgctgggccctccccacacaggacaccgtgcagttccgggggaagctgactcaaatcaaccttgaaatctcatgaaaacaaaatgacttgtctttttatttgatagtgtaatatcattcattttataaattttttagggtttttctcgtaatattgtacagttttgcatggcctggtgtgatcattttttggttagaatataatgctgacaaatgtggatggaggggaagatactgctttagcctatcactccttattttattttgtttggttttatgccctcagtgtcttagggaactttttaagagatcctctgctaccaaacaatgatgtggattcttttgcacagaaatatttaaggtgggatggtaaaaaatgtcacaaaagactcctcaccaatactttatgttgatatcacttaatattaaccagactttgctgtattgcaataaaacagagaactgtt

SEQ ID NO: 284532 - DNA, 3786 bp, Artificial Sequence
  derived and/or modified sequence
agaaggaatacatgcaaatgaaataaaaaatcttaagaaagaactgcatgattcagaaggtcagcaacttgctctcaacaaagaaattatgattttaaaagacaaattggaaaaaaccagaagagaaagtcaaagtgaaagggaggaatttgaaagtgagttcaaacaacaatatgaacgagaaaaagtgttgttaactgaagaaaataaaaagctgacgagtgaacttgataagcttactactttgtatgagaacttaagtatacacaaccagcagttagaagaagaggttaaagatctagcagacaagaaagaatcagttgcacattgggaagcccaaatcacagaaataattcagtgggtcagcgatgaaaaggatgcacgagggtatcttcaggccttagcttctaaaatgactgaagaattggaggcattaagaaattccagcttgggtacacgagcaacagatatgccctggaaaatgcgtcgttttgcgaaactggatatgtcagctagactggagttgcagtcggctctggatgcagaaataagagccaaacaggccatccaagaagagttgaataaagttaaagcatctaatatcataacagaatgtaaactaaaagattcagagaagaagaacttggaactactctcagaaatcgaacagctgataaaggacactgaagagcttagatctgaaaagggtatagagcaccaagactcacagcattctttcttggcatttttgaatacgcctaccgatgctctggatcaatttgaaactgatcccgttgagaacacatatgtatggaacccgagcgtcaagtttcacatccagtcacggtccacatctccttccacatctagtgaagctgagccagttaagactgtagactccactccactttcagttcacacaccaaccttaaggaaaaaaggatgtcctggttcaactggctttccacctaagcgcaagactcaccagttttttgtaaaatcttttactactcctaccaagtgtcatcagtgtacctccttgatggtgggtttaataagacagggctgttcatgtgaagtgtgtggattctcatgccatataacttgtgtaaacaaagctccaaccacttgtccagttcctcctgaacagacaaaaggtcccctgggtatagatcctcagaaaggaataggaacagcatatgaaggtcatgtcaggattcctaagccagctggagtgaagaaagggtggcagagagcactggctatagtgtgtgacttcaaactctttctgtacgatattgctgaaggaaaagcatctcagcccagtgttgtcattagtcaagtgattgacatgagggatgaagaattttctgtgagttcagtcttggcttctgatgttatccatgcaagtcggaaagatataccctgtatatttagggtcacagcttcccagctctcagcatctaataacaaatgttcaatcctgatgctagcagacactgagaatgagaagaataagtgggtgggagtgctgagtgaattgcacaagattttgaagaaaaacaaattcagagaccgctcagtctatgttcccaaagaggcttatgacagcactctacccctcattaaaacaacccaggcagccgcaatcatagatcatgaaagaattgctttgggaaacgaagaagggttatttgttgtacatgtcaccaaagatgaaattattagagttggtgacaataagaagattcatcagattgaactcattccaaatgatcagcttgttgctgtgatctcaggacgaaatcgtcatgtacgactttttcctatgtcagcattggatgggcgagagaccgatttttacaagctgtcagaaactaaagggtgtcaaaccgtaacttctggaaaggtgcgccatggagctctcacatgcctgtgtgtggctatgaaaaggcaggtcctctgttatgaactatttcagagcaagacccgtcacagaaaatttaaagaaattcaagtcccatataatgtccagtggatggcaatcttcagtgaacaactctgtgtgggattccagtcaggatttctaagataccccttgaatggagaaggaaatccatacagtatgctccattcaaatgaccatacactatcatttattgcacatcaaccaatggatgctatctgcgcagttgagatctccagtaaagaatatctgctgtgttttaacagcattgggatatacactgactgccagggccgaagatctagacaacaggaattgatgtggccagcaaatccttcctcttgttgttacaatgcaccatatctctcggtgtacagtgaaaatgcagttgatatctttgatgtgaactccatggaatggattcagactcttcctctcaaaaaggttcgacccttaaacaatgaaggatcattaaatcttttagggttggagaccattagattaatatatttcaaaaataagatggcagaaggggacgaactggtagtacctgaaacatcagataatagtcggaaacaaatggttagaaacattaacaataagcggcgttattccttcagagtcccagaagaggaaaggatgcagcagaggagggaaatgctacgagatccagaaatgagaaataaattaatttctaatccaactaattttaatcacatagcacacatgggtcctggagatggaatacagatcctgaaagatctgcccatgaaccctcggcctcaggaaagtcggacagtattcagtggctcagtcagtattccatctatcaccaaatcccgccctgagccaggccgctccatgagtgctagcagtggcttgtcagcaaggtcatccgcacagaatggcagcgcattaaagagggaattctctggaggaagctacagtgccaagcggcagcccatgccctccccgtcagagggctctttgtcctctggaggcatggaccaaggaagtgatgccccagcgagggactttgacggagaggactctgactctccgaggcattccacagcttccaacagttccaacctaagcagccccccaagcccagcttcaccccgaaaaaccaagagcctctccctggagagcactgaccgcgggagctgggacccgtgagctgcctcagcactgggacctctcgctctccgctccctgccactcgcctcctctcactttcatctcttccctccacctcgcctgctcggcctgaaagccaccaggggctggcagcagtagcaggacagggattcaggagttctgacgacacgactctcagatccacgcccccagcctaacagcaacaacaaagacagactttccgtagcagcttagattaacgttgatttcattccatgcacttagagttgctttcagtaacattttacccctactcccaaaggtagcttaaatagacagattacacaaatgtaagtgataagaataagattagacagattttgctttcacagtagagtctcattatagtcctaaaatagctcatgggcttctccgcatccagaagggagaattggtccctggagtggctcactaagctcttaatcagcaaacgcagtgagtatcaacctgattgttgccaggaaatccttatgaattaaaacaatgcatattttactacagtacagagtttaaatgaatacataaatgtagaagtactgaatgtatatatttaaaaggagcctcttgtattcaacaaaagatggatgcatatataagagagatgatttaatttaaagaaa

SEQ ID NO: 284533 - DNA, 5265 bp, Artificial Sequence
  derived and/or modified sequence
atgagcggcgaggtgagactgagacagctggagcagttcatcctggacggccccgcccagaccaacggccagtgcttcagcgtggagaccctgctggacatcctgatctgcctgtacgacgagtgcaacaacagccccctgagaagagagaagaacatcctggagtacctggagtgggccaagcccttcaccagcaaggtgaagcagatgagactgcacagagaggacttcgagatcctgaaggtgatcggcagaggcgccttcggcgaggtggccgtggtgaagctgaagaacgccgacaaggtgttcgccatgaagatcctgaacaagtgggagatgctgaagagagccgagaccgcctgcttcagagaggagagagacgtgctggtgaacggcgacaacaagtggatcaccaccctgcactacgccttccaggacgacaacaacctgtacctggtgatggactactacgtgggcggcgacctgctgaccctgctgagcaagttcgaggacagactgcccgaggacatggccagattctacctggccgagatggtgatcgccatcgacagcgtgcaccagctgcactacgtgcacagagacatcaagcccgacaacatcctgatggacatgaacggccacatcagactggccgacttcggcagctgcctgaagctgatggaggacggcaccgtgcagagcagcgtggccgtgggcacccccgactacatcagccccgagatcctgcaggccatggaggacggcaagggcagatacggccccgagtgcgactggtggagcctgggcgtgtgcatgtacgagatgctgtacggcgagacccccttctacgccgagagcctggtggagacctacggcaagatcatgaaccacaaggagagattccagttccccgcccaggtgaccgacgtgagcgagaacgccaaggacctgatcagaagactgatctgcagcagagagcacagactgggccagaacggcatcgaggacttcaagaagcaccccttcttcagcggcatcgactgggacaacatcagaaactgcgaggccccctacatccccgaggtgagcagccccaccgacaccagcaacttcgacgtggacgacgactgcctgaagaacagcgagaccatgcccccccccacccacaccgccttcagcggccaccacctgcccttcgtgggcttcacctacaccagcagctgcgtgctgagcgacagaagctgcctgagagtgaccgccggccccaccagcctggacctggacgtgaacgtgcagagaaccctggacaacaacctggccaccgaggcctacgagagaagaatcaagagactggagcaggagaagctggagctgagcagaaagctgcaggagagcacccagaccgtgcaggccctgcagtacagcaccgtggacggccccctgaccgccagcaaggacctggagatcaagaacctgaaggaggagatcgagaagctgagaaagcaggtgaccgagagcagccacctggagcagcagctggaggaggccaacgccgtgagacaggagctggacgacgccttcagacagatcaaggcctacgagaagcagatcaagaccctgcagcaggagagagaggacctgaacaaggagctggtgcaggccagcgagagactgaagaaccagagcaaggagctgaaggacgcccactgccagagaaagctggccatgcaggagttcatggagatcaacgagagactgaccgagctgcacacccagaagcagaagctggccagacacgtgagagacaaggaggaggaggtggacctggtgatgcagaaggtggagagcctgagacaggagctgagaagaaccgagagagccaagaaggagctggaggtgcacaccgaggccctggccgccgaggccagcaaggacagaaagctgagagagcagagcgagcactacagcaagcagctggagaacgagctggagggcctgaagcagaagcagatcagctacagccccggcgtgtgcagcatcgagcaccagcaggagatcaccaagctgaagaccgacctggagaagaagagcatcttctacgaggaggagctgagcaagagagagggcatccacgccaacgagatcaagaacctgaagaaggagctgcacgacagcgagggccagcagctggccctgaacaaggagatcatgatcctgaaggacaagctggagaagaccagaagagagagccagagcgagagagaggagttcgagagcgagttcaagcagcagtacgagagagagaaggtgctgctgaccgaggagaacaagaagctgaccagcgagctggacaagctgaccaccctgtacgagaacctgagcatccacaaccagcagctggaggaggaggtgaaggacctggccgacaagaaggagagcgtggcccactgggaggcccagatcaccgagatcatccagtgggtgagcgacgagaaggacgccagaggctacctgcaggccctggccagcaagatgaccgaggagctggaggccctgagaaacagcagcctgggcaccagagccaccgacatgccctggaagatgagaagattcgccaagctggacatgagcgccagactggagctgcagagcgccctggacgccgagatcagagccaagcaggccatccaggaggagctgaacaaggtgaaggccagcaacatcatcaccgagtgcaagctgaaggacagcgagaagaagaacctggagctgctgagcgagatcgagcagctgatcaaggacaccgaggagctgagaagcgagaagggcatcgagcaccaggacagccagcacagcttcctggccttcctgaacacccccaccgacgccctggaccagttcgagaccgaccccgtggagaacacctacgtgtggaaccccagcgtgaagttccacatccagagcagaagcaccagccccagcaccagcagcgaggccgagcccgtgaagaccgtggacagcacccccctgagcgtgcacacccccaccctgagaaagaagggctgccccggcagcaccggcttcccccccaagagaaagacccaccagttcttcgtgaagagcttcaccacccccaccaagtgccaccagtgcaccagcctgatggtgggcctgatcagacagggctgcagctgcgaggtgtgcggcttcagctgccacatcacctgcgtgaacaaggcccccaccacctgccccgtgccccccgagcagaccaagggccccctgggcatcgacccccagaagggcatcggcaccgcctacgagggccacgtgagaatccccaagcccgccggcgtgaagaagggctggcagagagccctggccatcgtgtgcgacttcaagctgttcctgtacgacatcgccgagggcaaggccagccagcccagcgtggtgatcagccaggtgatcgacatgagagacgaggagttcagcgtgagcagcgtgctggccagcgacgtgatccacgccagcagaaaggacatcccctgcatcttcagagtgaccgccagccagctgagcgccagcaacaacaagtgcagcatcctgatgctggccgacaccgagaacgagaagaacaagtgggtgggcgtgctgagcgagctgcacaagatcctgaagaagaacaagttcagagacagaagcgtgtacgtgcccaaggaggcctacgacagcaccctgcccctgatcaagaccacccaggccgccgccatcatcgaccacgagagaatcgccctgggcaacgaggagggcctgttcgtggtgcacgtgaccaaggacgagatcatcagagtgggcgacaacaagaagatccaccagatcgagctgatccccaacgaccagctggtggccgtgatcagcggcagaaacagacacgtgagactgttccccatgagcgccctggacggcagagagaccgacttctacaagctgagcgagaccaagggctgccagaccgtgaccagcggcaaggtgagacacggcgccctgacctgcctgtgcgtggccatgaagagacaggtgctgtgctacgagctgttccagagcaagaccagacacagaaagttcaaggagatccaggtgccctacaacgtgcagtggatggccatcttcagcgagcagctgtgcgtgggcttccagagcggcttcctgagataccccctgaacggcgagggcaacccctacagcatgctgcacagcaacgaccacaccctgagcttcatcgcccaccagcccatggacgccatctgcgccgtggagatcagcagcaaggagtacctgctgtgcttcaacagcatcggcatctacaccgactgccagggcagaagaagcagacagcaggagctgatgtggcccgccaaccccagcagctgctgctacaacgccccctacctgagcgtgtacagcgagaacgccgtggacatcttcgacgtgaacagcatggagtggatccagaccctgcccctgaagaaggtgagacccctgaacaacgagggcagcctgaacctgctgggcctggagaccatcagactgatctacttcaagaacaagatggccgagggcgacgagctggtggtgcccgagaccagcgacaacagcagaaagcagatggtgagaaacatcaacaacaagagaagatacagcttcagagtgcccgaggaggagagaatgcagcagagaagagagatgctgagagaccccgagatgagaaacaagctgatcagcaaccccaccaacttcaaccacatcgcccacatgggccccggcgacggcatccagatcctgaaggacctgcccatgaaccccagaccccaggagagcagaaccgtgttcagcggcagcgtgagcatccccagcatcaccaagagcagacccgagcccggcagaagcatgagcgccagcagcggcctgagcgccagaagcagcgcccagaacggcagcgccctgaagagagagttcagcggcggcagctacagcgccaagagacagcccatgcccagccccagcgagggcagcctgagcagcggcggcatggaccagggcagcgacgcccccgccagagacttcgacggcgaggacagcgacagccccagacacagcaccgccagcaacagcagcaacctgagcagcccccccagccccgccagccccagaaagaccaagagcctgagcctggagagcaccgacagaggcagctgggacccctag

SEQ ID NO: 284534 - DNA, 3147 bp, Artificial Sequence
  derived and/or modified sequence
tgagagggcatccacgccaacgagatcaagaacctgaagaaggagctgcacgacagcgagggccagcagctggccctgaacaaggagatcatgatcctgaaggacaagctggagaagaccagaagagagagccagagcgagagagaggagttcgagagcgagttcaagcagcagtacgagagagagaaggtgctgctgaccgaggagaacaagaagctgaccagcgagctggacaagctgaccaccctgtacgagaacctgagcatccacaaccagcagctggaggaggaggtgaaggacctggccgacaagaaggagagcgtggcccactgggaggcccagatcaccgagatcatccagtgggtgagcgacgagaaggacgccagaggctacctgcaggccctggccagcaagatgaccgaggagctggaggccctgagaaacagcagcctgggcaccagagccaccgacatgccctggaagatgagaagattcgccaagctggacatgagcgccagactggagctgcagagcgccctggacgccgagatcagagccaagcaggccatccaggaggagctgaacaaggtgaaggccagcaacatcatcaccgagtgcaagctgaaggacagcgagaagaagaacctggagctgctgagcgagatcgagcagctgatcaaggacaccgaggagctgagaagcgagaagggcatcgagcaccaggacagccagcacagcttcctggccttcctgaacacccccaccgacgccctggaccagttcgagaccgaccccgtggagaacacctacgtgtggaaccccagcgtgaagttccacatccagagcagaagcaccagccccagcaccagcagcgaggccgagcccgtgaagaccgtggacagcacccccctgagcgtgcacacccccaccctgagaaagaagggctgccccggcagcaccggcttcccccccaagagaaagacccaccagttcttcgtgaagagcttcaccacccccaccaagtgccaccagtgcaccagcctgatggtgggcctgatcagacagggctgcagctgcgaggtgtgcggcttcagctgccacatcacctgcgtgaacaaggcccccaccacctgccccgtgccccccgagcagaccaagggccccctgggcatcgacccccagaagggcatcggcaccgcctacgagggccacgtgagaatccccaagcccgccggcgtgaagaagggctggcagagagccctggccatcgtgtgcgacttcaagctgttcctgtacgacatcgccgagggcaaggccagccagcccagcgtggtgatcagccaggtgatcgacatgagagacgaggagttcagcgtgagcagcgtgctggccagcgacgtgatccacgccagcagaaaggacatcccctgcatcttcagagtgaccgccagccagctgagcgccagcaacaacaagtgcagcatcctgatgctggccgacaccgagaacgagaagaacaagtgggtgggcgtgctgagcgagctgcacaagatcctgaagaagaacaagttcagagacagaagcgtgtacgtgcccaaggaggcctacgacagcaccctgcccctgatcaagaccacccaggccgccgccatcatcgaccacgagagaatcgccctgggcaacgaggagggcctgttcgtggtgcacgtgaccaaggacgagatcatcagagtgggcgacaacaagaagatccaccagatcgagctgatccccaacgaccagctggtggccgtgatcagcggcagaaacagacacgtgagactgttccccatgagcgccctggacggcagagagaccgacttctacaagctgagcgagaccaagggctgccagaccgtgaccagcggcaaggtgagacacggcgccctgacctgcctgtgcgtggccatgaagagacaggtgctgtgctacgagctgttccagagcaagaccagacacagaaagttcaaggagatccaggtgccctacaacgtgcagtggatggccatcttcagcgagcagctgtgcgtgggcttccagagcggcttcctgagataccccctgaacggcgagggcaacccctacagcatgctgcacagcaacgaccacaccctgagcttcatcgcccaccagcccatggacgccatctgcgccgtggagatcagcagcaaggagtacctgctgtgcttcaacagcatcggcatctacaccgactgccagggcagaagaagcagacagcaggagctgatgtggcccgccaaccccagcagctgctgctacaacgccccctacctgagcgtgtacagcgagaacgccgtggacatcttcgacgtgaacagcatggagtggatccagaccctgcccctgaagaaggtgagacccctgaacaacgagggcagcctgaacctgctgggcctggagaccatcagactgatctacttcaagaacaagatggccgagggcgacgagctggtggtgcccgagaccagcgacaacagcagaaagcagatggtgagaaacatcaacaacaagagaagatacagcttcagagtgcccgaggaggagagaatgcagcagagaagagagatgctgagagaccccgagatgagaaacaagctgatcagcaaccccaccaacttcaaccacatcgcccacatgggccccggcgacggcatccagatcctgaaggacctgcccatgaaccccagaccccaggagagcagaaccgtgttcagcggcagcgtgagcatccccagcatcaccaagagcagacccgagcccggcagaagcatgagcgccagcagcggcctgagcgccagaagcagcgcccagaacggcagcgccctgaagagagagttcagcggcggcagctacagcgccaagagacagcccatgcccagccccagcgagggcagcctgagcagcggcggcatggaccagggcagcgacgcccccgccagagacttcgacggcgaggacagcgacagccccagacacagcaccgccagcaacagcagcaacctgagcagcccccccagccccgccagccccagaaagaccaagagcctgagcctggagagcaccgacagaggcagctgggacccctag

SEQ ID NO: 284535 - protein, 1732 aa, Artificial Sequence
  derived and/or modified sequence
MSGEVRLRQLEQFILDGPAQTNGQCFSVETLLDILICLYDECNNSPLRREKNILEYLEWAKPFTSKVKQMRLHREDFEILKVIGRGAFGEVAVVKLKNADKVFAMKILNKWEMLKRAETACFREERDVLVNGDNKWITTLHYAFQDDNNLYLVMDYYVGGDLLTLLSKFEDRLPEDMARFYLAEMVIAIDSVHQLHYVHRDIKPDNILMDMNGHIRLADFGSCLKLMEDGTVQSSVAVGTPDYISPEILQAMEDGKGRYGPECDWWSLGVCMYEMLYGETPFYAESLVETYGKIMNHKERFQFPAQVTDVSENAKDLIRRLICSREHRLGQNGIEDFKKHPFFSGIDWDNIRNCEAPYIPEVSSPTDTSNFDVDDDCLKNSETMPPPTHTAFSGHHLPFVGFTYTSSCVLSDRSCLRVTAGPTSLDLDVNVQRTLDNNLATEAYERRIKRLEQEKLELSRKLQESTQTVQALQYSTVDGPLTASKDLEIKNLKEEIEKLRKQVTESSHLEQQLEEANAVRQELDDAFRQIKAYEKQIKTLQQEREDLNKELVQASERLKNQSKELKDAHCQRKLAMQEFMEINERLTELHTQKQKLARHVRDKEEEVDLVMQKVESLRQELRRTERAKKELEVHTEALAAEASKDRKLREQSEHYSKQLENELEGLKQKQISYSPGVCSIEHQQEITKLKTDLEKKSIFYEEELSKREGIHANEIKNLKKELHDSEGQQLALNKEIMILKDKLEKTRRESQSEREEFESEFKQQYEREKVLLTEENKKLTSELDKLTTLYENLSIHNQQLEEEVKDLADKKESVAHWEAQITEIIQWVSDEKDARGYLQALASKMTEELEALRNSSLGTRATDMPWKMRRFAKLDMSARLELQSALDAEIRAKQAIQEELNKVKASNIITECKLKDSEKKNLELLSEIEQLIKDTEELRSEKGIEHQDSQHSFLAFLNTPTDALDQFERSPSCTPASKGRRTVDSTPLSVHTPTLRKKGCPGSTGFPPKRKTHQFFVKSFTTPTKCHQCTSLMVGLIRQGCSCEVCGFSCHITCVNKAPTTCPVPPEQTKGPLGIDPQKGIGTAYEGHVRIPKPAGVKKGWQRALAIVCDFKLFLYDIAEGKASQPSVVISQVIDMRDEEFSVSSVLASDVIHASRKDIPCIFRVTASQLSASNNKCSILMLADTENEKNKWVGVLSELHKILKKNKFRDRSVYVPKEAYDSTLPLIKTTQAAAIIDHERIALGNEEGLFVVHVTKDEIIRVGDNKKIHQIELIPNDQLVAVISGRNRHVRLFPMSALDGRETDFYKLSETKGCQTVTSGKVRHGALTCLCVAMKRQVLCYELFQSKTRHRKFKEIQVPYNVQWMAIFSEQLCVGFQSGFLRYPLNGEGNPYSMLHSNDHTLSFIAHQPMDAICAVEISSKEYLLCFNSIGIYTDCQGRRSRQQELMWPANPSSCCYNAPYLSVYSENAVDIFDVNSMEWIQTLPLKKVRPLNNEGSLNLLGLETIRLIYFKNKMAEGDELVVPETSDNSRKQMVRNINNKRRYSFRVPEEERMQQRREMLRDPEMRNKLISNPTNFNHIAHMGPGDGIQILKDLPMNPRPQESRTVFSGSVSIPSITKSRPEPGRSMSASSGLSARSSAQNGSALKREFSGGSYSAKRQPMPSPSEGSLSSGGMDQGSDAPARDFDGEDSDSPRHSTASNSSNLSSPPSPASPRKTKSLSLESTDRGSWDP

SEQ ID NO: 284536 - protein, 1699 aa, Artificial Sequence
  derived and/or modified sequence
MSGEVRLRQLEQFILDGPAQTNGQCFSVETLLDILICLYDECNNSPLRREKNILEYLEWAKPFTSKVKQMRLHREDFEILKVIGRGAFGEVAVVKLKNADKVFAMKILNKWEMLKRAETACFREERDVLVNGDNKWITTLHYAFQDDNNLYLVMDYYVGGDLLTLLSKFEDRLPEDMARFYLAEMVIAIDSVHQLHYVHRDIKPDNILMDMNGHIRLADFGSCLKLMEDGTVQSSVAVGTPDYISPEILQAMEDGKGRYGPECDWWSLGVCMYEMLYGETPFYAESLVETYGKIMNHKERFQFPAQVTDVSENAKDLIRRLICSREHRLGQNGIEDFKKHPFFSGIDWDNIRNCEAPYIPEVSSPTDTSNFDVDDDCLKNSETMPPPTHTAFSGHHLPFVGFTYTSSCVLSDRSCLRVTAGPTSLDLDVNVQRTLDNNLATEAYERRIKRLEQEKLELSRKLQESTQTVQALQYSTVDGPLTASKDLEIKNLKEEIEKLRKQVTESSHLEQQLEEANAVRQELDDAFRQIKAYEKQIKTLQQEREDLNKELVQASERLKNQSKELKDAHCQRKLAMQEFMEINERLTELHTQKQKLARHVRDKEEEVDLVMQKVESLRQELRRTERAKKELEVHTEALAAEASKDRKLREQSEHYSKQLENELEGLKQKQISYSPGVCSIEHQQEITKLKTDLEKKSIFYEEELSKREGIHANEIKNLKKELHDSEGQQLALNKEIMILKDKLEKTRRESQSEREEFESEFKQQYEREKVLLTEENKKLTSELDKLTTLYENLSIHNQQLEEEVKDLADKKESVAHWEAQITEIIQWVSDEKDARGYLQALASKMTEELEALRNSSLGTRATDMPWKMRRFAKLDMSARLELQSALDAEIRAKQAIQEELNKVKASNIITECKLKDSEKKNLELLSEIEQLIKDTEELRSEKASKGRRTVDSTPLSVHTPTLRKKGCPGSTGFPPKRKTHQFFVKSFTTPTKCHQCTSLMVGLIRQGCSCEVCGFSCHITCVNKAPTTCPVPPEQTKGPLGIDPQKGIGTAYEGHVRIPKPAGVKKGWQRALAIVCDFKLFLYDIAEGKASQPSVVISQVIDMRDEEFSVSSVLASDVIHASRKDIPCIFRVTASQLSASNNKCSILMLADTENEKNKWVGVLSELHKILKKNKFRDRSVYVPKEAYDSTLPLIKTTQAAAIIDHERIALGNEEGLFVVHVTKDEIIRVGDNKKIHQIELIPNDQLVAVISGRNRHVRLFPMSALDGRETDFYKLSETKGCQTVTSGKVRHGALTCLCVAMKRQVLCYELFQSKTRHRKFKEIQVPYNVQWMAIFSEQLCVGFQSGFLRYPLNGEGNPYSMLHSNDHTLSFIAHQPMDAICAVEISSKEYLLCFNSIGIYTDCQGRRSRQQELMWPANPSSCCYNAPYLSVYSENAVDIFDVNSMEWIQTLPLKKVRPLNNEGSLNLLGLETIRLIYFKNKMAEGDELVVPETSDNSRKQMVRNINNKRRYSFRVPEEERMQQRREMLRDPEMRNKLISNPTNFNHIAHMGPGDGIQILKDLPMNPRPQESRTVFSGSVSIPSITKSRPEPGRSMSASSGLSARSSAQNGSALKREFSGGSYSAKRQPMPSPSEGSLSSGGMDQGSDAPARDFDGEDSDSPRHSTASNSSNLSSPPSPASPRKTKSLSLESTDRGSWDP

SEQ ID NO: 284537 - DNA, 5199 bp, Artificial Sequence
  derived and/or modified sequence
atgagcggagaagtgaggcttagacagctcgagcagtttatcctggatggacccgcacagacgaatggtcaatgctttagtgtcgaaacactgctggacatcctaatctgtctgtacgatgagtgtaacaactctccactgagaagggagaagaacattttggagtacctggagtgggccaaaccctttacttcaaaggtgaaacagatgcggctgcacagagaagattttgaaatcctgaaggtgattgggcgcggcgctttcggcgaagtggctgtcgttaagctgaagaatgccgacaaagtgttcgcaatgaagatccttaataagtgggagatgcttaagagagccgagacagcttgcttcagagaggaacgcgatgttctcgttaacggtgacaacaagtggataacaactttgcactacgcctttcaagatgacaacaacttgtatttagtaatggattactacgttggaggggatctgttgacattgctgtccaagtttgaggatcggttgccggaggacatggcaaggttctacctcgccgaaatggtgattgccatagattcagtacaccagctccactatgtgcatagagacattaagcccgacaacatcctgatggacatgaatgggcacatccggttagccgatttcggctcttgtctgaagctaatggaagacggaactgtgcagtctagcgttgcagtggggaccccagattatatttctcctgaaatccttcaggctatggaggacgggaaaggacggtatggcccagagtgcgattggtggtccctgggggtctgcatgtacgagatgctgtacggggagacaccgttttatgccgaaagcctggtcgagacgtatggcaaaatcatgaaccacaaagagagattccagttcccagctcaggttacggatgtcagcgaaaatgcgaaagacctaattaggagactgatatgcagccgagagcatagactgggccagaacggaatcgaggactttaaaaaacacccgtttttttcgggaatcgactgggataacatccgaaactgcgaggcgccatacattcctgaagtaagcagccccacagacacatccaactttgatgtcgacgatgattgccttaagaactccgaaaccatgccacctcctacacatactgcatttagtggacatcatctgccctttgttggatttacctatacaagctcatgtgtactgtcggatcgatcatgtttaagagtgaccgcaggacccacaagtctggacctcgatgtaaacgtccagcgcacgttggataacaacctggccaccgaggcttacgaaaggcggatcaagcggcttgagcaggaaaagctcgagctgtccaggaagcttcaggaatccactcaaacagtgcaggctttgcagtattcgactgtcgatggtccccttaccgcctctaaggacttggagattaagaatctcaaagaggagatcgagaaactgagaaaacaggtcacagagtcaagccacctggaacagcaactggaggaggctaacgctgttcgacaggagctcgacgacgcatttcggcaaatcaaggcttatgaaaagcagatcaagacactccagcaggaacgcgaggatctcaataaggaactggtgcaggcaagcgagcgccttaagaatcagagcaaggagctaaaagacgcgcactgtcagcgcaaactcgctatgcaggaattcatggagattaatgagcgcctcaccgagctgcacacgcagaaacagaaacttgcccggcatgtccgggacaaagaggaggaggtcgatcttgtgatgcaaaaggttgagagcctcagacaggaactgagaaggaccgaaagggcgaaaaaggagctcgaagtacataccgaggccctcgccgccgaggcctccaaggatagaaagttgcgagaacagtctgaacattactcaaaacaactagagaatgaattggaagggctgaaacaaaagcagatctcctactcccccggagtatgctctatagaacatcaacaggaaatcaccaagctaaagactgacctggagaaaaagtccattttctatgaggaggagctgtcgaaacgagagggaattcacgcaaatgagatcaaaaatttaaagaaagagctccacgactccgagggccagcaactggctctgaacaaggagatcatgatcctgaaagacaaactggagaaaaccagaagagaatcccaatccgaacgtgaggagttcgagtccgaatttaaacaacagtatgagcgggagaaggttctcttgacagaagagaacaagaaactgacttctgaactcgacaaacttaccactctttacgagaatctcagtatccacaatcagcagctagaagaagaggtcaaagatttagccgacaagaaggaatccgtagctcactgggaggctcagattaccgagattattcagtgggtctcagatgaaaaagatgccaggggctacctgcaagcactggcctccaaaatgacagaagaattagaggcactccggaattcaagtctgggcactcgtgcaacagatatgccttggaaaatgagaagattcgccaagctggatatgtccgcccggctcgagctgcaaagtgctttagatgcagagataagagccaagcaggctatccaggaagaacttaataaggtaaaggctagcaacatcatcaccgagtgcaaactaaaagacagtgagaaaaagaaccttgagcttctctccgaaatagagcaactcattaaagatacagaagagttacgaagcgaaaaaggaattgagcaccaggattcccagcattccttcctggcattcctgaacacaccaacagacgccctagaccagtttgagcgttcaccatcgtgtaccccagcgagtaaaggtaggagaaccgtggactcgacccccctgagtgtgcatactcctaccctgcgtaaaaaggggtgccccggtagcacaggctttcctcctaagaggaaaacccaccaattctttgtgaaaagtttcactacacctaccaaatgccatcaatgcacaagcttgatggtgggactgatcaggcagggttgcagttgcgaagtgtgcggattcagctgccacatcacctgtgtcaacaaagcccctaccacttgtcccgtgccacccgagcagaccaagggccccttaggcattgatccccagaaagggatcggtactgcttacgaagggcatgttcgcatcccgaagcctgctggggtgaagaagggatggcaacgagccttagctatcgtttgcgactttaaactctttttgtacgatattgctgaaggaaaagcaagtcaacccagcgtggttatctcccaagtcattgatatgagggacgaggaattctcagtgtcctctgttttagccagtgacgttatccatgctagtcggaaggacatcccttgcatcttccgcgtgaccgcctcacagctgagcgcctcaaataataagtgttccatcctgatgctggccgacaccgaaaatgagaaaaacaagtgggtgggtgtgttatccgagctgcacaagatccttaagaaaaacaaatttcgcgaccgttctgtctatgtgcctaaagaggcatatgacagtaccctaccactgataaagacgacgcaggccgcagccattatcgaccacgagcggattgcccttgggaacgaggaaggcctgttcgttgtacacgtgacaaaggacgagatcattagggttggagataataagaagattcaccaaattgagttaatccccaacgaccagctggttgctgtgatttcggggcgtaaccgacacgtgagattgtttccaatgtcagccctggacgggagagaaacagacttttataaactgagcgagaccaaggggtgccagaccgtcacctccggtaaggtgagacatggtgcactcacctgcctttgcgttgcgatgaaacggcaagtcctgtgttatgagctgttccagagtaagacaaggcaccgtaagtttaaggagattcaagtgccctataacgtacagtggatggccatcttttctgagcaactgtgtgtgggtttccaatctggcttcttacgttacccactaaatggcgaagggaacccttattctatgttacactcaaacgatcacacattgagcttcatagcccatcagccgatggacgccatctgtgcagttgagatatctagcaaggagtatctgctctgcttcaatagcatcggcatctacacagattgtcaggggcgcaggtccaggcaacaggagctgatgtggccagcaaatccctcttcttgttgctataacgccccgtatctcagcgtttattccgagaacgctgttgatatttttgacgttaacagcatggaatggattcagaccttgccgctgaagaaagtgcggccacttaataacgaaggctccttaaacctactaggccttgagaccattcgcctcatctacttcaaaaataagatggcagagggggacgagttagtggtgccggaaacgagtgacaactctagaaagcagatggtccggaatattaacaacaaacgccgatactcattccgagtgccagaggaagaacgaatgcagcagagaagggagatgttacgggatccagagatgagaaacaaactgatatccaatccgactaatttcaaccatatcgcgcatatggggcccggcgatggcattcagatactgaaagacttaccaatgaatccacgccctcaggaatcccggaccgtgtttagcgggagtgtgtcaataccatctatcacaaagtcaaggcctgagccggggagatcaatgtcagccagttctggactcagtgcacggtcctcagcccagaacggcagcgccctgaaacgcgagttcagtggtggtagttacagcgccaagcggcagccgatgcccagtcccagcgaaggatccctgtcttccggagggatggaccaggggagcgatgctcctgcaagggactttgatggagaagatagcgactcgccccgccacagcactgcttctaattcatccaatctcagctctcctccctccccagctagcccacggaaaactaagtccttgtctctcgagtctaccgaccgagggagctgggatccctag

SEQ ID NO: 284538 - DNA, 5100 bp, Artificial Sequence
  derived and/or modified sequence
atgtcgggagaggtacgactgcgacagctagaacagttcattctggacgggcccgcacagacaaatgggcagtgcttcagcgtcgagacactgctggatattttaatttgcctatacgatgagtgtaacaactcgcccttgaggcgcgagaagaacatcctcgaatacttagaatgggccaaaccgtttacctccaaagtgaagcagatgcggctgcacagagaggacttcgagatcctgaaggtaatcggtagaggtgcattcggtgaagtcgccgtcgtgaaactcaaaaacgctgataaggtgtttgccatgaagatactcaacaaatgggagatgttaaaacgagccgaaactgcctgctttcgcgaggaacgggacgtgctggttaacggcgacaacaaatggatcaccacgctccactatgcatttcaggacgataataatctgtacttggtgatggattactacgtgggcggcgaccttcttactttgttgagtaagtttgaagatcggctgcccgaggatatggcccggttctatctcgctgaaatggtcatcgccattgacagtgttcaccagctccactatgtccacagagatataaagccggataatatcctgatggacatgaatggacacattaggctggctgatttcggctcttgtttaaagctcatggaggacggcaccgtacagagcagcgtggctgtgggcacgcccgactacataagtccagaaattttgcaggccatggaagacggcaagggacggtatgggccagaatgcgattggtggagcctgggagtgtgtatgtacgagatgctgtatggagagactcccttctatgctgaaagcctcgtggagacatatggtaaaattatgaatcacaaggaacggtttcagttccccgcccaggtgaccgacgtatcagagaacgccaaggatctgatcagacggctgatttgctccagagaacaccgcctggggcagaatggtatagaggacttcaaaaaacatccctttttcagtgggatagactgggataatatcaggaactgcgaagccccatacattcccgaagtgtcttcacccaccgacaccagtaatttcgatgtggacgacgactgtctgaaaaactcggaaactatgcctcccccgactcacaccgccttctccggccatcaccttccttttgtcggatttacgtatacctcaagctgtgtcctgagtgacagaagttgccttcgggtcactgccggacctaccagccttgatctggacgtgaacgtgcagaggacactggataacaatctggcaacggaggcttatgagcggagaatcaaacgtttggaacaggaaaaactggaactgtctaggaaattacaagaaagtacccagacagtgcaggccttgcagtactcaacagtggacggacctctgactgcaagcaaagacctggaaatcaagaacctaaaggaagagatcgagaagctgcgcaagcaagtcacagaatctagccacctcgagcagcagctcgaagaggctaatgccgttcgtcaggagcttgacgacgccttccgtcaaattaaagcgtacgagaaacagattaaaacactgcaacaggagcgcgaggaccttaataaagagctggtgcaagcctccgaacgtctgaaaaaccaatctaaggagttgaaagatgcccactgccagaggaagcttgctatgcaggagttcatggaaatcaatgagaggctgactgagctgcatactcagaaacagaagctggcaaggcatgtacgtgataaagaagaagaagtggacctggtcatgcagaaagtggaatctctgcgccaagagttacgaaggacggagcgagctaagaaagagctggaagttcacaccgaggccctggctgcagaagcctcaaaagataggaaactgcgcgagcagagtgagcactattctaagcagctggagaatgagctcgaggggttgaagcaaaaacaaatttcctacagtcccggtgtgtgttccatcgaacaccagcaggagatcacaaagttgaagactgacctggagaaaaagagcatcttctatgaagaggagctatctaaaagggagggaatccacgcaaatgagatcaagaacctcaagaaggaactacatgattccgagggacagcagttggcgttaaataaggaaatcatgatccttaaagataagctcgagaaaacccggcgggagagccagtctgagagagaagaatttgagagcgaattcaaacagcaatacgagagggagaaggttctactgacggaagaaaataagaaactaacaagcgaactggataaactgaccacactctacgagaacctatccatccacaaccagcagctggaagaagaggttaaagatctggccgacaagaaggagtccgtggctcattgggaggcccagattacggaaatcatccagtgggtttcagacgaaaaggatgctagggggtacctgcaggcacttgctagcaaaatgacagaagagctcgaggccctacggaacagttcgctgggcacacgggctaccgacatgccatggaaaatgcgtcgctttgcaaaacttgatatgtccgcacgcctcgaactccagtctgctctagatgccgagatccgagccaaacaagccatccaggaggagctgaacaaagtaaaagcatctaacataattactgagtgtaagctgaaggatagcgagaaaaagaacctagaactcctctcagaaatcgagcagctgatcaaagacacagaggagctacggagcgaaaaggcttccaagggtcggagaacagtagattccacccccctcagcgtgcacacccctacactcaggaaaaaggggtgtcctggaagcacaggttttccaccaaaacggaagacccatcaattctttgttaagagtttcacaacacctaccaagtgtcaccagtgtacctccctgatggtgggtttgatacgacagggctgcagctgcgaagtttgtggcttttcatgccatattacttgtgtgaacaaggctcctactacctgcccagttcccccagagcagacaaagggccctttgggcatcgaccctcaaaaagggataggcacagcttatgagggccatgtgcgtatccccaaacctgccggcgtgaaaaaggggtggcagagggctctggctattgtatgcgacttcaagttattcttgtacgatattgccgaaggaaaggcttcccagccctccgtcgtgataagccaggtgatcgacatgcgggatgaagaattttccgtgtcttcggtgttggccagtgatgtcattcacgcctctaggaaagacattccatgcatttttagggtgacggcaagtcagttgagcgcaagcaacaataagtgctctatcctgatgctggcagacactgaaaacgagaagaacaagtgggttggagtgttaagcgagctgcataaaatcttaaaaaagaacaagtttagagaccgcagcgtgtacgtccctaaagaagcctatgattccacattgcccctgatcaagaccactcaggcagctgcgatcatcgatcacgagcggattgccctggggaatgaggaggggcttttcgtcgtccatgtgactaaggacgaaatcataagagttggagacaacaagaaaattcaccagatagagcttattcccaatgaccaactggtggctgtgatatctgggagaaaccgccatgtgcgcctgttccccatgagcgcactagatggtagagagacggacttttataaactctcagagactaagggctgccagaccgtgactagtgggaaggtgagacatggggccctcacatgcctgtgtgtggctatgaagcgtcaggtgttatgttatgagttattccagagtaagacaagacacagaaagttcaaagagattcaagtgccttataacgttcaatggatggctatctttagcgagcagctctgcgtggggtttcaatcggggttcctcagatacccccttaatggcgagggcaacccttattctatgctccattcaaatgaccataccctgtcgtttatcgcacaccagcctatggacgccatctgtgctgttgagatctctagcaaagagtacttgctatgctttaacagtatcggtatttatactgactgtcaaggcaggaggtctcgccaacaggagctgatgtggccggccaatccttcctcctgctgttataatgcaccctacctctcagtatactccgaaaacgccgtggacatctttgacgtaaactctatggaatggatccagacactgcccctcaaaaaggtgaggcctctgaacaatgagggctcactaaatttactcgggctggaaaccattcgcctgatctacttcaaaaataagatggcagagggggacgagctggttgtgcccgaaaccagcgacaacagccggaagcagatggtgcgcaacattaataacaagcgtagatattctttccgggtgcccgaggaagaacggatgcagcagaggcgcgagatgcttcgtgatcctgaaatgcggaacaagttgatttccaacccaactaattttaatcatattgctcatatggggcccggagacgggatacaaatcctgaaagatctgcctatgaatccaaggcctcaggaatcccgcactgtgttttctggtagcgtgtccatccccagtattaccaagagcaggccagaacccggccgcagtatgagtgcctcatctgggctctcagccagatcttccgcacagaacggcagcgccttaaaaagagaattttcaggtggaagctactccgcaaagagacaacctatgcccagtccgtccgaaggatctctatccagcggaggaatggaccaggggtctgacgcccccgcgagagactttgatggggaagactcggactcacccagacattcaacagcgtcaaacagctccaacctctcatcacccccttctcctgcatcacctcgtaagacaaaaagcctttccctcgagagcacagacaggggctcttgggacccttag

SEQ ID NO: 284539 - DNA, 5199 bp, Artificial Sequence
  derived and/or modified sequence
atgtctggagaggtgcggctgcggcagctggagcagttcatcctggatggccctgcccagaccaacggccagtgcttctctgtggagaccctgctggacatcctgatctgcctgtatgatgagtgcaacaacagccccctgcggcgggagaagaacatcctggagtacctggagtgggccaagcccttcaccagcaaggtgaagcagatgaggctgcacagagaagattttgagatcctgaaggtgattggccgcggggccttcggggaggtggccgtggtgaagctgaagaatgctgacaaggtgtttgccatgaagatcctgaacaagtgggagatgctgaagagagctgagacagcctgcttccgggaggagagagatgtgctggtgaatggagacaacaagtggatcaccaccctgcactacgccttccaggatgacaacaacctgtacctggtgatggactactacgtgggcggggacctgctgaccctgctgagcaagtttgaggaccggctgcctgaggacatggcccgcttctacctggccgagatggtgattgccattgattctgtgcaccagctgcactacgtgcaccgggacatcaagccagacaacatcctgatggacatgaatggccacatccggctggccgactttggcagctgcctgaagctgatggaggatggcaccgtgcagagctctgtggccgtgggcaccccagactacatcagccctgagatcctgcaggccatggaggatggcaagggccgctatggcccagaatgtgactggtggagcctgggcgtgtgcatgtatgagatgctgtatggagagacccccttctacgccgagagcctggtggagacctacggcaagatcatgaaccacaaggagcgcttccagtttcctgcccaggtgacagatgtgtctgaaaatgccaaggacctgatcagaagactcatctgcagccgggagcaccggctgggccagaatggaattgaggacttcaagaagcaccccttcttcagcggcatcgactgggacaacatccggaactgtgaggccccctacatccctgaggtgagcagccccacagacaccagcaactttgatgtggatgatgactgcctgaagaacagcgagaccatgcccccacccacccacacagccttcagcggccaccacctgccctttgtgggcttcacctacaccagcagctgtgtgctgagtgacaggagctgcctgcgggtgacagctggccccaccagcctggacctggatgtgaatgtgcagaggaccctggacaacaacctggccacagaggcctatgaaagacgcatcaagaggctggagcaggagaagctggagctgagcaggaagctgcaggagagcacccagacagtgcaggccctgcagtacagcacagtggatggccccctgacagccagcaaggacctggagatcaagaacctgaaggaggagattgagaagctgaggaagcaggtgacagagagcagccacctggagcagcagctggaggaggccaatgctgtgcggcaggagctggatgatgccttccggcagatcaaggcctatgagaagcagatcaagaccctgcagcaggagcgggaggacctgaacaaggagctggtgcaggccagcgagcggctgaagaaccagagcaaggagctgaaggatgcccactgccagaggaagctggccatgcaggagttcatggagatcaatgaaaggctgacagagctgcacacccagaagcagaagctggcccggcacgtgcgggacaaggaggaggaggtggacctggtgatgcagaaggtggagagcctgcggcaggagctgcggaggacagagcgggccaagaaggagctggaggtgcacacagaggccctggccgctgaggccagcaaggacaggaagctgcgggagcagagcgagcactacagcaagcagctggagaatgagctggagggcctgaagcagaagcagatctcctacagccctggggtgtgcagcattgagcaccagcaggagatcaccaagctgaagacagacctggagaagaagagcatcttctatgaggaggagctgagcaagcgggagggcatccacgccaatgagatcaagaacctgaagaaggagctgcatgattctgagggccagcagctggccctgaacaaggagatcatgatcctgaaggacaagctggagaagacccggcgggagagccagagcgagcgggaggagtttgaaagtgagttcaagcagcagtatgagcgggagaaggtgctgctgacagaggagaacaagaagctgaccagcgagctggacaagctgaccaccctgtatgagaacctgagcatccacaaccagcagctggaggaggaggtgaaggacctggccgacaagaaggagagcgtggcccactgggaggcccagatcacagagatcatccagtgggtgtctgatgagaaggatgcccggggctacctgcaggccctggccagcaagatgacagaggagctggaggccctgaggaacagcagcctgggcacccgggccacagacatgccctggaagatgagaagatttgccaagctggacatgtctgcccggctggagctgcagagcgccctggatgctgagatccgggccaagcaggccatccaggaggagctgaacaaggtgaaggccagcaacatcatcacagagtgcaagctgaaggacagcgagaagaagaacctggagctgctgtctgaaattgagcagctgatcaaggacacagaggagctgcggtctgagaagggcatcgagcaccaggacagccagcacagcttcctggccttcctgaacacccccacagatgccctggaccagtttgagaggagccccagctgcaccccagccagcaagggccgcaggacagtggacagcacccccctgtctgtgcacacccccaccctgaggaagaagggctgccccggcagcacaggcttcccccccaagaggaagacccaccagttctttgtgaagagcttcaccacccccaccaagtgccaccagtgcaccagcctgatggtgggcctcatccggcagggctgcagctgtgaggtgtgtggcttcagctgccacatcacctgtgtgaacaaggcccccaccacctgccctgtgcccccagagcagaccaagggccccctgggcatcgacccccagaagggcattggaacagcctatgagggccacgtgcgcatccccaagccagctggggtgaagaagggctggcagagggccctggccatcgtgtgtgacttcaagctgttcctgtatgacattgctgagggcaaggccagccagcccagcgtggtgatcagccaggtgattgacatgagagatgaggagttctctgtgtcctctgtgctggccagtgatgtgattcatgccagcaggaaggacatcccctgcatcttccgggtgacagccagccagctgagcgccagcaacaacaagtgcagcatcctgatgctggccgacacagaaaatgagaagaacaagtgggtgggcgtgctgtctgagctgcacaagatcctgaagaagaacaagttccgggacagatctgtgtatgtgcccaaggaggcctatgacagcaccctgcccctcatcaagaccacccaggccgccgccatcatcgaccacgagagaattgccctgggcaatgaggagggcctgtttgtggtgcacgtgaccaaggatgagatcatccgggtgggggacaacaagaagatccaccagatcgagctgatccccaatgaccagctggtggccgtcatcagcggcaggaacagacatgtgcggctcttccccatgtctgccctggatggccgggagacagacttctacaagctgtctgagaccaagggctgccagacagtgaccagcggcaaggtgcgccacggggccctgacctgcctgtgtgtggccatgaagaggcaggtgctgtgctatgagctgttccagagcaagaccaggcacaggaagttcaaggagatccaggtgccctacaacgtgcagtggatggccatcttcagcgagcagctgtgtgtgggcttccagagcggcttcctgcgctaccccctgaatggagagggcaacccctacagcatgctgcacagcaatgaccacaccctgtccttcatcgcccaccagcccatggatgccatctgtgctgtggagatcagcagcaaggagtacctgctgtgcttcaacagcatcggcatctacacagactgccagggcagaagaagccggcagcaggagctgatgtggccagccaaccccagcagctgctgctacaatgccccctacctgtctgtgtacagtgaaaatgctgtggacatctttgatgtgaacagcatggagtggatccagaccctgcccctgaagaaggtgcggcccctgaacaatgaaggcagcctgaacctgctgggcctggagaccatccgcctcatctacttcaagaacaagatggccgagggagatgagctggtggtgcctgagaccagtgacaacagcaggaagcagatggtgaggaacatcaacaacaagaggcgctacagcttccgggtgcctgaggaggagaggatgcagcagaggcgggagatgctgcgggaccctgagatgaggaacaagctgatcagcaaccccaccaacttcaaccacatcgcccacatgggccctggagatggcatccagatcctgaaggacctgcccatgaacccccggccccaggagagcaggacagtgttttctggctctgtgtccatccccagcatcaccaagagcaggcctgagcccggccgctccatgtctgccagcagcggcctgagcgcccggagcagcgcccagaatggcagcgccctgaagcgggagttcagcggcggcagctacagcgccaagaggcagcccatgcccagccccagcgagggcagcctgagcagcggcggcatggaccagggcagtgatgccccagcccgggactttgatggagaagattctgacagccccaggcacagcacagccagcaacagcagcaacctgagcagcccccccagccctgccagccccaggaagaccaagagcctgagcctggagagcacagaccggggctcctgggacccctag

SEQ ID NO: 284540 - DNA, 5100 bp, Artificial Sequence
  derived and/or modified sequence
atgtctggagaggtgcggctgcggcagctggagcagttcatcctggatggccctgcccagaccaacggccagtgcttctctgtggagaccctgctggacatcctgatctgcctgtatgatgagtgcaacaacagccccctgcggcgggagaagaacatcctggagtacctggagtgggccaagcccttcaccagcaaggtgaagcagatgaggctgcacagagaagattttgagatcctgaaggtgattggccgcggggccttcggggaggtggccgtggtgaagctgaagaatgctgacaaggtgtttgccatgaagatcctgaacaagtgggagatgctgaagagagctgagacagcctgcttccgggaggagagagatgtgctggtgaatggagacaacaagtggatcaccaccctgcactacgccttccaggatgacaacaacctgtacctggtgatggactactacgtgggcggggacctgctgaccctgctgagcaagtttgaggaccggctgcctgaggacatggcccgcttctacctggccgagatggtgattgccattgattctgtgcaccagctgcactacgtgcaccgggacatcaagccagacaacatcctgatggacatgaatggccacatccggctggccgactttggcagctgcctgaagctgatggaggatggcaccgtgcagagctctgtggccgtgggcaccccagactacatcagccctgagatcctgcaggccatggaggatggcaagggccgctatggcccagaatgtgactggtggagcctgggcgtgtgcatgtatgagatgctgtatggagagacccccttctacgccgagagcctggtggagacctacggcaagatcatgaaccacaaggagcgcttccagtttcctgcccaggtgacagatgtgtctgaaaatgccaaggacctgatcagaagactcatctgcagccgggagcaccggctgggccagaatggaattgaggacttcaagaagcaccccttcttcagcggcatcgactgggacaacatccggaactgtgaggccccctacatccctgaggtgagcagccccacagacaccagcaactttgatgtggatgatgactgcctgaagaacagcgagaccatgcccccacccacccacacagccttcagcggccaccacctgccctttgtgggcttcacctacaccagcagctgtgtgctgagtgacaggagctgcctgcgggtgacagctggccccaccagcctggacctggatgtgaatgtgcagaggaccctggacaacaacctggccacagaggcctatgaaagacgcatcaagaggctggagcaggagaagctggagctgagcaggaagctgcaggagagcacccagacagtgcaggccctgcagtacagcacagtggatggccccctgacagccagcaaggacctggagatcaagaacctgaaggaggagattgagaagctgaggaagcaggtgacagagagcagccacctggagcagcagctggaggaggccaatgctgtgcggcaggagctggatgatgccttccggcagatcaaggcctatgagaagcagatcaagaccctgcagcaggagcgggaggacctgaacaaggagctggtgcaggccagcgagcggctgaagaaccagagcaaggagctgaaggatgcccactgccagaggaagctggccatgcaggagttcatggagatcaatgaaaggctgacagagctgcacacccagaagcagaagctggcccggcacgtgcgggacaaggaggaggaggtggacctggtgatgcagaaggtggagagcctgcggcaggagctgcggaggacagagcgggccaagaaggagctggaggtgcacacagaggccctggccgctgaggccagcaaggacaggaagctgcgggagcagagcgagcactacagcaagcagctggagaatgagctggagggcctgaagcagaagcagatctcctacagccctggggtgtgcagcattgagcaccagcaggagatcaccaagctgaagacagacctggagaagaagagcatcttctatgaggaggagctgagcaagcgggagggcatccacgccaatgagatcaagaacctgaagaaggagctgcatgattctgagggccagcagctggccctgaacaaggagatcatgatcctgaaggacaagctggagaagacccggcgggagagccagagcgagcgggaggagtttgaaagtgagttcaagcagcagtatgagcgggagaaggtgctgctgacagaggagaacaagaagctgaccagcgagctggacaagctgaccaccctgtatgagaacctgagcatccacaaccagcagctggaggaggaggtgaaggacctggccgacaagaaggagagcgtggcccactgggaggcccagatcacagagatcatccagtgggtgtctgatgagaaggatgcccggggctacctgcaggccctggccagcaagatgacagaggagctggaggccctgaggaacagcagcctgggcacccgggccacagacatgccctggaagatgagaagatttgccaagctggacatgtctgcccggctggagctgcagagcgccctggatgctgagatccgggccaagcaggccatccaggaggagctgaacaaggtgaaggccagcaacatcatcacagagtgcaagctgaaggacagcgagaagaagaacctggagctgctgtctgaaattgagcagctgatcaaggacacagaggagctgcggtctgagaaggccagcaaaggaagaagaacagtggacagcacccccctgtctgtgcacacccccaccctgaggaagaagggctgccccggcagcacaggcttcccccccaagaggaagacccaccagttctttgtgaagagcttcaccacccccaccaagtgccaccagtgcaccagcctgatggtgggcctcatccggcagggctgcagctgtgaggtgtgtggcttcagctgccacatcacctgtgtgaacaaggcccccaccacctgccctgtgcccccagagcagaccaagggccccctgggcatcgacccccagaagggcatcggcacagcctatgagggccacgtgcgcatccccaagccagctggggtgaagaagggctggcagagggccctggccatcgtgtgtgacttcaagctgttcctgtatgacattgctgagggcaaggccagccagcccagcgtggtgatcagccaggtgattgacatgagagatgaggagttctctgtgtcctctgtgctggccagtgatgtgatccacgccagcaggaaggacatcccctgcatcttccgggtgacagccagccagctgagcgccagcaacaacaagtgcagcatcctgatgctggccgacacagaaaatgagaagaacaagtgggtgggcgtgctgtctgagctgcacaagatcctgaagaagaacaagttccgggacagatctgtgtatgtgcccaaggaggcctatgacagcaccctgcccctcatcaagaccacccaggccgccgccatcatcgaccacgagcgcatcgccctgggcaatgaggagggcctgtttgtggtgcacgtgaccaaggatgagatcatccgggtgggggacaacaagaagatccaccagatcgagctgatccccaatgaccagctggtggccgtcatctctggaagaaacagacatgtgcggctcttccccatgtctgccctggatggccgggagacagacttctacaagctgtctgagaccaagggctgccagacagtgaccagcggcaaggtgagacatggagccctgacctgcctgtgtgtggccatgaagaggcaggtgctgtgctatgagctgttccagagcaagaccaggcacaggaagttcaaggagatccaggtgccctacaacgtgcagtggatggccatcttcagcgagcagctgtgtgtgggcttccagagcggcttcctgcgctaccccctgaatggagagggcaacccctacagcatgctgcacagcaatgaccacaccctgtccttcatcgcccaccagcccatggatgccatctgtgctgtggagatcagcagcaaggagtacctgctgtgcttcaacagcatcggcatctacacagactgccagggccgccgcagccggcagcaggagctgatgtggccagccaaccccagcagctgctgctacaatgccccctacctgtctgtgtacagtgaaaatgctgtggacatctttgatgtgaacagcatggagtggatccagaccctgcccctgaagaaggtgcggcccctgaacaatgaaggcagcctgaacctgctgggcctggagaccatccgcctcatctacttcaagaacaagatggccgagggagatgagctggtggtgcctgagaccagtgacaacagcaggaagcagatggtgaggaacatcaacaacaagaggcgctacagcttccgggtgcctgaggaggagaggatgcagcagaggcgggagatgctgcgggaccctgagatgaggaacaagctgatcagcaaccccaccaacttcaaccacatcgcccacatgggccctggagatggcatccagatcctgaaggacctgcccatgaacccccggccccaggagagcaggacagtgttcagcggctctgtgtccatccccagcatcaccaagagcaggcctgagcccggccgctccatgtctgccagcagcggcctgagcgcccggagcagcgcccagaatggaagtgccctgaagcgggagttcagcggcggcagctacagcgccaagaggcagcccatgcccagccccagcgagggcagcctgagcagcggcggcatggaccagggcagtgatgccccagcccgggactttgatggagaggacagcgacagccccaggcacagcacagccagcaacagcagcaacctgagcagcccccccagccctgccagccccaggaagaccaagagcctgagcctggagagcacagaccggggctcctgggacccctag

SEQ ID NO: 284541 - DNA, 5199 bp, Artificial Sequence
  derived and/or modified sequence
atgagcggcgaggtgcggctgcggcagctggagcagttcatcctggatggacccgcacagacaaacgggcagtgctttagcgtcgaaacattgctagatatcttaatttgcttatacgacgagtgtaacaattctcctctccgccgggaaaaaaacattctggaatatctcgagtgggccaagccctttacctctaaggtcaagcagatgaggctgcatcgggaagatttcgaaatcctgaaggtcatcgggagaggcgctttcggtgaggttgccgttgtgaagctcaagaacgctgataaggtgttcgctatgaagatcctcaataagtgggagatgctaaagagggctgagaccgcttgttttagagaagagagagatgtgctggtgaacggggacaataagtggataaccaccctacactacgctttccaggatgacaacaatttatacctggtgatggattactatgtcgggggggacctgttgactttactgagtaagttcgaagacagactgcctgaggatatggccaggttttacctcgccgaaatggtcatcgccattgattcagtgcatcagctccactacgtgcaccgtgatatcaagcctgacaatattttgatggacatgaacggccatattcggctcgctgattttggatcatgtctgaagttaatggaagatggaactgtgcagtcttcagtcgctgtcggtacccccgattacataagccccgagattctccaggccatggaggatggaaaaggcagatacggcccggagtgcgattggtggtccctaggagtgtgcatgtatgagatgctgtacggcgaaacgcctttttacgcggagtctttagtggagacatacggcaaaatcatgaaccacaaggaaagattccagtttccagcccaggtcaccgatgtgtccgaaaacgccaaagatttgatcaggcgtttgatctgcagccgagagcatcgactcgggcagaatggaatcgaagactttaaaaagcaccccttcttctctggtattgattgggataacattaggaattgtgaggctccttacatccccgaggtgtccagtccaacagatacctctaacttcgatgtagacgatgattgtctcaaaaacagcgagaccatgcccccaccaactcacaccgcttttagcggccatcacctgccattcgttggctttacctacactagctcttgtgtgctgtcagacagatcctgccttagggtaaccgctggaccaacatccctggacctcgatgtcaacgtgcaaagaacactggataacaacctggcaactgaggcatacgagaggagaatcaagaggctagagcaggagaagcttgaattgagccgaaagctccaggaatccacgcaaacagtacaggcgcttcagtatagcaccgtggatggcccactcacagctagcaaggatttagaaatcaagaatctcaaggaagaaatagagaaactaaggaagcaggtaaccgagtcctcacacctggaacagcagctggaggaagccaacgcagtacgtcaggaactggatgacgctttccggcagatcaaggcgtacgagaaacagataaaaaccttacaacaggaacgcgaggatttgaataaggaattggtgcaggctagcgagcgactgaagaaccagagcaaggaattgaaggatgctcactgccagagaaaattagctatgcaggaatttatggagattaatgagcgacttacagagctgcatacccagaagcagaaactcgcacgccatgttcgggacaaggaggaggaggttgatctggttatgcaaaaggtggagtctcttcggcaggagcttcgaagaactgagcgagctaaaaaggaactagaagttcataccgaggctctggccgccgaagcatccaaggatcgcaagcttagggaacagagcgagcactactcaaaacagttggagaatgagttagaagggctgaagcagaagcagatcagctacagccctggagtgtgtagcattgagcaccaacaggagatcaccaaactcaagaccgacctggagaaaaagagtatcttttacgaggaagagctgagtaaacgggaaggaattcacgcgaatgagataaagaatctcaaaaaagaacttcacgacagtgaaggtcaacaactggcacttaataaggaaatcatgattctaaaggacaagctcgagaagacacggcgtgagtcacagtcagaaagggaggaattcgagtccgagttcaagcaacagtatgagagagaaaaggtactgctgactgaagagaacaaaaagctcacaagcgaactcgataagctgaccaccttgtatgaaaacctgtccatacataaccagcagctcgaagaggaggtaaaggacctagcagataaaaaggagtctgtggcgcactgggaggcccagatcacggagattatccagtgggtcagtgatgaaaaagacgctcgggggtatctgcaggcactggcctcaaagatgaccgaggagttggaggcactccgcaattcgagcctggggacaagagcaacagacatgccttggaaaatgaggaggttcgccaagcttgatatgtccgctcgactcgaactgcagtctgctctggatgctgagattcgggccaagcaggctatccaggaggaactcaataaggtgaaggccagtaacattattacagaatgtaagcttaaggattccgagaaaaaaaacctggaactcctgtctgagatcgaacagttaattaaggacaccgaggagctgcgaagtgaaaaggggatcgaacatcaagactcccaacattccttcttagctttcctcaacactcccacggacgcacttgaccagtttgaacggtcaccgtcatgtacaccagcctccaagggcaggcgcactgtcgactccacgccactatctgtacatactccgaccttgcgcaaaaagggctgccctggctcaactggatttccacctaaacggaaaactcaccagttttttgtcaagtcctttacaacccctacgaagtgccaccagtgcacctccctgatggtgggcctgatacgccaaggctgcagctgcgaagtgtgtggcttctcttgtcatataacatgtgtgaataaggcaccgactacctgtcccgtccctccagagcagaccaaaggccctcttgggatcgatccacaaaagggtattggaacagcttatgaagggcatgtgcgaatcccgaagcctgcaggcgtaaagaaggggtggcagcgggccctggctatcgtgtgtgacttcaaactatttctctatgatatcgctgaaggtaaagcctcacaaccatcggtagtgatctctcaggtcatcgatatgcgcgatgaagagtttagcgtgtcatcagtgcttgcctccgatgtcattcacgcaagccgtaaagacattccgtgcattttccgcgtcactgcctctcagctgagcgccagtaataataagtgctctattctcatgctggccgataccgaaaacgaaaagaacaagtgggtgggagtgctgtcagagctacataaaatactgaagaaaaataaattccgcgaccggtctgtctatgtacccaaggaagcttatgactccactctccctctgataaagaccacccaagccgcagccatcatcgaccatgaacgcattgccctaggcaacgaggagggcctgttcgtggttcacgtaaccaaggatgagataatccgagttggcgataataagaaaatccaccaaatcgaactaatccccaatgaccagttagtggctgtgataagtggaagaaatagacatgtgcggttgtttccaatgagcgcgctggatggacgagaaactgacttctacaagctttcagagaccaagggatgccagaccgtcacgtctgggaaggtccgccacggcgccctgacttgcctgtgtgtcgcaatgaagaggcaagtgctctgttatgagttgttccagagtaagactaggcaccggaagtttaaggagatacaggtgccctacaatgtgcagtggatggctatcttcagcgaacaattgtgcgtagggttccagtccggtttcctcagatatccactgaacggcgaaggcaacccatactccatgctacattcgaacgatcacacattatcctttatagcgcaccagcccatggatgctatttgcgctgttgaaatctcttcgaaagagtacctcctgtgctttaatagcataggtatctacaccgattgccagggccgcagaagtaggcaacaagagttaatgtggccagccaacccaagctcctgctgctacaacgccccctatctgtccgtgtattctgaaaatgcagtagacatttttgatgttaatagcatggagtggatccagactcttccccttaagaaagtgcgacctctcaataacgagggctccttgaatctgttaggtcttgaaactataagattgatttacttcaaaaataagatggctgagggggacgaattagttgtgccggagacatcagataatagtcgaaagcagatggtgcggaatatcaacaataagaggaggtacagcttcagggtccctgaagaggaaaggatgcagcagcgaagagagatgttgagagaccccgagatgcgcaacaagttaatcagtaatcccactaactttaatcatatagctcacatgggcccaggcgacggtattcagatactgaaggacctgcccatgaacccaagaccgcaggagagccggacggtgtttagtggctccgtatcgattcccagcatcaccaagtccagacccgagccgggccgcagcatgtccgcctctagtggcctcagcgcacgttccagcgcacagaacggttccgccctgaagcgcgagtttagtggcgggagctacagcgccaagcggcagcccatgccttctccctctgagggatctctgagctctgggggcatggaccagggttccgatgcaccagcacgggactttgacggcgaggactctgatagccctaggcattccactgcatcaaattcaagtaatctttcgtctccgcctagcccagcttccccaaggaagacaaaaagcctgagcctagagagcaccgaccgtggcagctgggatccttag

SEQ ID NO: 284542 - DNA, 5100 bp, Artificial Sequence
  derived and/or modified sequence
atgagcggcgaggtgcggctgcggcagctggagcagttcatcctggatgggcccgcccagacaaacggacagtgtttctctgtagagacccttctcgatatcctgatctgcttgtacgacgagtgtaacaactcacctctgcggcgcgagaaaaatattctagaatacttagaatgggccaaaccttttaccagtaaagtgaaacagatgagattacacagagaggatttcgaaattttgaaagtgattggccggggcgcattcggagaggtagctgttgtgaagcttaaaaacgccgacaaagtctttgccatgaagatcctgaacaagtgggagatgctgaaacgggcagagacagcttgctttcgggaggaacgcgatgttctggtcaacggcgacaacaaatggataacaactctccactacgccttccaggatgacaataatctgtacctggtcatggattactatgtgggcggagaccttctgacactcctttctaagttcgaggaccgcttacccgaagatatggcccgcttctacctagctgaaatggttatcgcgatcgacagcgtgcaccagctgcattacgtacaccgtgatataaagccagacaatatcttaatggatatgaatggtcacatcaggctcgctgacttcggatcctgcctgaaattgatggaggatgggacggtccagagttccgtggccgttggaactcctgactacatcagtcctgaaatcctgcaggccatggaggacggtaaagggcggtatggtcctgaatgcgattggtggtccctgggggtgtgcatgtacgaaatgctgtacggggagacaccattttacgcagaatccctggtggagacctacgggaaaattatgaatcataaggagcggttccaattcccagcccaggtgacagacgtctctgaaaacgcaaaagacctaatcaggcgcctgatttgttcacgcgagcatcggctcggacagaacggcattgaagactttaaaaaacaccctttcttcagcggaatagattgggacaacatacgtaactgtgaagcaccgtacattccagaggtgtcaagtcctaccgatacctccaacttcgacgtcgatgacgattgcctgaagaattccgaaactatgcccccgcctactcatacagcctttagtgggcatcatcttccatttgtggggttcacatacacatccagctgcgtgctcagcgatcggagctgtttgcgcgttaccgctggccctacatccctggacctggatgtgaatgtgcagagaacattagataataacctggccacagaggcttacgagcggaggatcaaacgtctcgaacaggaaaaattggagctttcacggaaactccaggaatctacgcagaccgtacaggccttgcaatattctactgtggatggccccctgaccgctagcaaagacctcgagattaaaaatctgaaggaggaaatcgagaaactacggaagcaggttacagagtcctcgcacctggaacagcagttggaagaggctaatgctgtgcggcaggagcttgacgacgcgtttcggcaaattaaggcctacgaaaagcagatcaaaactctgcagcaggagagggaggatctgaataaggaactcgttcaagcttccgaacgacttaaaaaccagagcaaggagctcaaagacgcgcactgtcaaagaaagctggccatgcaggagttcatggaaatcaacgaaaggcttacagaacttcacacacagaagcagaaacttgcgaggcatgtaagggacaaggaggaggaggtggacctggtgatgcagaaggttgaatctctgaggcaggaattgaggaggactgaaagggccaagaaagagttagaggttcacactgaagcactcgcagcggaagcaagcaaggacaggaagttacgcgaacagagcgaacactattctaagcaactcgagaatgagctggagggtctgaagcagaaacaaatttcatattcccctggcgtttgctctatagaacaccaacaggaaataacgaagctgaaaacagatctcgaaaagaaaagtatcttttatgaagaggaactctccaagagggaaggcatccatgctaatgagattaaaaacctcaaaaaagagttgcatgatagcgagggacagcaactcgccctcaataaggagatcatgatactgaaggacaaactagagaagaccagacgggaaagccagagtgagcgggaggaatttgaatcagagttcaagcagcagtatgagcgggaaaaggttctcctgaccgaagagaataagaagctaacttctgaactagacaagctgacgacactctacgaaaacctgtccattcataaccagcagctcgaggaagaggtgaaggacctagctgataaaaaggagagtgtcgctcactgggaagcccagatcacggaaataatccagtgggtttctgatgaaaaggacgcaagaggttatttgcaagccctggcctcgaaaatgacagaagaacttgaggctcttcgaaactcttctctaggcacgagagcaacagatatgccttggaagatgcgaagattcgccaagttggacatgtctgcaagactcgagctccaaagcgcattggacgccgaaattagagctaaacaggctattcaagaagaacttaataaggtgaaggcaagtaacattattaccgaatgcaaactgaaagacagtgaaaagaaaaacttggagcttctctctgaaatcgaacagttgatcaaggacacagaggaattgaggagtgaaaaagcttccaaggggaggaggacagtggactccactcctctgtcggttcatactccaaccctgaggaagaaggggtgcccaggctctactggtttcccccccaagaggaagacacaccaattcttcgtcaagagcttcaccacacctacaaagtgtcatcagtgtaccagcttgatggtggggctaatccgacaggggtgcagttgcgaagtttgtggcttctcctgccacatcacatgcgttaacaaggcgccgaccacttgtccagttccgcctgagcaaaccaagggcccgttaggcattgacccccagaaggggataggcaccgcttatgaaggacacgtcaggatcccgaagcctgcaggggtgaaaaaaggctggcaaagagctctggcaatcgtctgtgactttaaactgtttttatacgatatagccgaagggaaagctagccagcctagcgtagtgatatcccaggtgattgacatgcgtgatgaagagttttcagtgtcctctgttctggcctctgatgtgattcatgcttcaaggaaagatattccttgcatttttcgggtaaccgctagtcagttaagtgccagcaataataagtgtagcattctcatgctcgcggatacggagaacgaaaagaacaaatgggtcggggtgctgagcgagttgcacaagatcctgaaaaagaataaattccgtgaccggtcagtctacgttcctaaggaagcatacgatagtactcttcctctgataaaaacaactcaggcagccgctattatcgatcacgagagaattgctctgggcaacgaagagggcttatttgtggttcacgtaacaaaggacgaaatcattagagtcggcgataacaaaaagattcaccagattgaactgatcccaaatgaccagcttgtggcagtaatcagcggacggaaccgccacgtccgactgttcccaatgtccgccttagacggaagagaaaccgacttttataagctgtccgaaactaagggatgccagacggttacaagcgggaaggtccggcacggtgccctgacctgtctatgcgtcgcaatgaagcgccaggtgctctgctacgaattgtttcaaagcaaaacaagacatcggaagttcaaggagatccaggttccttacaacgtccagtggatggcaatctttagcgagcagctgtgcgtcggattccagtccggctttcttcggtatcctctgaatggggagggaaacccatactcaatgctgcatagcaacgatcatacactctccttcatcgcgcaccagcctatggacgctatttgcgcagtggagatctcaagcaaggagtatctgctgtgcttcaattcaataggtatttacacagactgtcagggacgcagatcacggcagcaagaactgatgtggcccgccaatccttcgagctgttgctataatgccccgtacttatctgtttatagcgaaaatgccgttgacatcttcgatgtgaactcaatggaatggattcaaaccctccctcttaagaaggtgcgccccctcaataacgaaggtagtctgaacttgctgggcctggagaccattcgactgatatactttaagaacaagatggctgagggggatgaactcgtggtccctgagacatccgataatagcaggaaacaaatggttcggaatattaataacaagcggcgatattccttcagggtcccagaggaagaacgaatgcagcagaggcgcgaaatgctaagagatcccgaaatgcgcaataaactgatctcaaatcctactaacttcaatcacatcgctcacatggggcccggcgatggcatacagattctgaaggacctgcctatgaacccgcggccacaagaatctcggacggtcttttcaggctcagtctctattccatccattaccaaatctcggcctgagcccgggaggtcgatgagcgcatccagtgggctgagcgccaggtcctccgcccaaaacggcagtgccctcaagagggaattttcaggcggtagctatagcgcaaagcgccaaccgatgccatccccatctgaaggaagcctctctagtggcggaatggaccagggcagcgacgctcccgcccgggacttcgacggcgaggacagtgacagcccaaggcactccactgcctcgaactcttctaacctgagttccccaccaagccccgccagccctagaaaaaccaagtccttgtctctggaaagcacagacagaggctcctgggacccctag

SEQ ID NO: 284543 - DNA, 5198 bp, Artificial Sequence
  derived and/or modified sequence
atgtcgggggaagttcggctacggcaattagagcagtttattctggacgggcctgcacaaaccaatgggcagtgcttctcagttgaaacactgcttgatattcttatctgtctgtacgacgaatgcaacaactctcccctccgccgagagaagaatatattggagtatctggagtgggctaagccattcacttccaaagtgaaacagatgcggctccacagggaagacttcgagatattaaaggttatcggccgtggggcttttggtgaagtggctgtggtcaagctgaagaacgccgataaggtgtttgcaatgaaaatcctcaacaagtgggagatgctaaagagagctgagacagcttgttttcgagaagaacgggacgtgctggtcaacggcgataataagtggatcacaacactccattacgcctttcaagatgacaacaacctgtatctggttatggattattatgtgggaggcgacctcctcacacttctcagcaaattcgaagatagactacctgaagacatggccagattttacttagctgagatggtgatcgctatcgactccgtgcaccagctacattatgtccatcgggatatcaagcctgacaacatacttatggacatgaacggacatatcaggctcgcggacttcggcagctgtttgaagctcatggaggatgggaccgtgcagtcatcagttgccgtgggtacgcctgactacatatccccagaaatcctgcaggccatggaagacggcaagggtcggtatggcccagagtgcgactggtggagtctgggggtatgcatgtatgagatgctttacggcgagacacccttttatgcggagagccttgtggagacctacggaaagattatgaaccacaaagagaggttccagtttccggcacaagtgactgatgtctcagagaacgccaaagatctgatacgcaggttgatttgctcacgagaacacagactcggacaaaatggcattgaggactttaaaaaacatcctttcttctcaggaattgactgggataacatcagaaattgtgaggccccttacattcctgaagtgagtagccctacagacacaagcaattttgacgtggacgacgactgcctcaaaaactccgagacaatgccccctccgacccatactgcgttctcaggtcatcatttaccgttcgttggattcacgtacaccagcagttgtgtactctctgaccgaagctgcttgagggtcactgctggacccacctcactggatctcgacgtgaatgtccagcgaaccctcgacaacaatctggccaccgaagcatacgagcgcaggatcaagcggcttgagcaggagaagcttgaactatctcggaagctgcaggagtccactcaaacagtccaggcccttcagtactcgacagtagacgggcctttaacagcttccaaggatctggagattaaaaatctgaaggaggagatcgagaaactgcgaaagcaggtcacagagtcctctcacttggaacagcaacttgaggaggctaacgccgtgcgccaggagcttgacgatgcattccggcagataaaggcgtatgagaaacagataaagacccttcaacaagaaagggaggatctgaataaggagctggtacaggcctccgagaggctgaagaaccagtcaaaagagctcaaggacgcacattgtcagaggaaactcgctatgcaggaatttatggagatcaatgaaagactgaccgagcttcacactcaaaagcagaagctggcacggcacgtgcgtgataaagaggaggaagttgacttggttatgcagaaagtggaatctctgagacaagagcttcgtagaactgaacgcgctaagaaggagctcgaagtgcataccgaagccctggctgctgaggcatccaaggaccggaaactccgggaacaaagtgagcattacagcaagcagctggaaaacgaattagagggcttgaagcagaagcagatcagttacagtcctggcgtgtgttcaatcgagcaccagcaggagatcactaagctgaagactgatctcgaaaaaaaatcaatcttctacgaggaagagttgtctaagagagagggcatccacgccaacgagataaaaaacttaaagaaggaattacacgactccgagggtcagcagcttgcgctgaacaaagaaattatgattctcaaggacaagttggagaagacaaggagggagtctcagtccgaaagagaagaattcgaatccgagtttaaacagcagtacgaacgcgagaaggtgttgctgaccgaagaaaataaaaagctaactagcgagctggacaaactcaccaccctttacgagaacctttctatacataatcagcagctggaggaagaagtgaaagacctggccgacaaaaaggagagcgtggctcattgggaggcacagattacagaaattatacagtgggtctcagacgaaaaggacgccaggggctatttgcaggcactcgcgagtaagatgaccgaggaattggaggcattacggaacagtagtcttggaacacgtgctacggacatgccatggaaaatgcgcagattcgccaaactcgatatgtccgccaggctggagctccagagcgccctcgacgctgaaattagagctaagcaggccattcaggaagagctgaacaaagtcaaagcgagtaatatcattaccgagtgtaagctgaaggactccgaaaaaaagaaccttgaactgttgtccgagatcgagcagctgattaaggacaccgaagagttacgctccgaaaaggggatagaacaccaggactcccagcattctttcctggccttccttaataccccgaccgatgcgctggaccagttcgagcgctctcctagttgcaccccggcaagtaaagggcgacggaccgtggatagcactccattatcagttcacacccctaccctccggaaaaagggttgccccggttctaccggattccccccaaagcgcaaaactcaccagttttttgtgaaatccttcaccactcctaccaagtgccaccagtgcactagcctgatggtgggactgatccgtcagggttgttcttgtgaggtttgtggcttctcctgtcacattacctgtgtcaacaaagcaccaaccacttgtccggttcctccagagcagacaaaagggccactcggcattgacccccagaagggcataggaaccgcctatgaaggccatgtccggatcccaaagccggctggagtcaagaagggatggcagcgcgctctggcgattgtctgcgactttaaactcttcctgtacgacatcgctgaagggaaggccagccagccatccgttgtcatttcccaggtgattgacatgcgcgatgaagaatttagcgtgtcttccgtcctcgccagcgacgtgatccacgcttcaaggaaggacatcccgtgcatcttcagggtgactgccagccaactttctgctagcaataacaaatgttccatcctgatgctcgcggacaccgaaaatgagaagaataagtgggtgggcgtcctgtcagaactccataaaatactcaaaaagaacaagttccgggaccgcagcgtgtacgtgcctaaagaggcctatgattctacactacctctcataaagacaactcaggccgcagcaatcatcgatcatgaacggatcgccctcggtaatgaagaaggtctcttcgtggtacatgtcaccaaggacgaaattattcgcgtaggggacaataagaagatccaccagatagagctgatccctaatgaccagttagtggcagtcatatcaggcagaaaccgtcatgtcaggctgttcccaatgagtgccctggatggccgagagactgacttttacaagctgagcgagactaagggctgtcagaccgtcacctccggcaaagtgaggcacggcgctttaacctgtctgtgcgtggccatgaaacgccaggtcctctgttacgaactatttcaaagtaagacccggcacaggaaatttaaggaaatccaggtcccctacaacgttcagtggatggccattttctccgagcaactttgtgtgggttttcagtctggatttttacgctatcctttaaacggtgagggaaacccttattctatgctgcactctaatgaccacacgctatcattcatcgcacatcaaccaatggatgcaatttgtgcagtggagattagttctaaggagtacctactgtgtttcaattctattgggatctatactgactgtcaggggcgaagatcccgccagcaggagctcatgtggcccgcaaatccgagctcatgctgttataacgctccttaccttagcgtttattccgaaaatgccgttgacatcttcgacgtcaactctatggagtggatccagaccttgcccctgaagaaggtgcgcccactcaacaatgagggctcccttaatctcttgggactggagactattcgcctcatttattttaaaaataaaatggctgagggcgatgagttggtcgtcccggaaacaagtgataattcccggaaacaaatggtcaggaacattaataataaacgacgttactcatttcgggttcctgaggaagagcggatgcagcagcgaagagagatgctgcgtgacccagagatgcgtaacaaactgatcagtaaccccaccaatttcaaccatatcgcccatatggggccaggtgatggtattcaaattctcaaggacctccctatgaatcccaggccccaggaaagccgcacagtattttccggaagcgtgtccattccatctatcacaaaatcaagacctgagccaggcagatcaatgtctgcttctagtgggctctctgctcgctcctctgcccagaacggcagcgccctcaagagagagttctctggaggaagctacagtgcaaaacgccagcctatgcctagcccaagtgagggatcactttcaagcggtggcatggatcagggttctgacgcacccgcaagggacttcgacggagaggacagcgatagccctcggcactccacagcttccaacagctcaaatttgagctcacccccttcgccagctagccctcggaaaactaaatcactgtcactggaaagcactgaccgtggctcttgggatcctta

SEQ ID NO: 284544 - DNA, 5100 bp, Artificial Sequence
  derived and/or modified sequence
atgtcgggtgaggtaaggctgcggcaactggagcagtttatcttagacggcccagcacagaccaatgggcaatgttttagcgtagagacattattggacatcctgatatgtctgtatgatgagtgtaataactcacctttacgccgagagaaaaacatcctcgaataccttgagtgggcgaaacctttcaccagcaaagtgaaacagatgcgcctccatcgtgaggactttgagatcctaaaggtgattgggagaggtgccttcggcgaggtcgccgttgtaaagctgaagaatgccgataaggtctttgccatgaagattttgaataagtgggaaatgctcaagcgagccgaaaccgcttgcttcagagaagaacgagacgtgttggtgaacggtgacaataagtggattacaacacttcactacgcatttcaggacgacaataatctctacctagtaatggattattatgttggaggggaccttctcacactcttaagcaagttcgaagacagattgccggaggacatggcaagattctacctggccgagatggtcatagccattgactctgtgcaccagctgcactatgtccacagagacatcaaacctgataacattctgatggacatgaatggccatattcgcctggccgacttcgggagctgtttaaagctgatggaggacgggactgtgcagtcgtctgtggctgtggggacacctgactacatttccccagagatcctgcaggcaatggaggacggaaaagggcgatacgggcctgaatgtgactggtggtctctaggtgtgtgtatgtatgagatgctttacggggaaacccccttttatgctgagtccctggtcgagacttatggaaagattatgaaccacaaagagcggttccagtttcccgcacaggtgaccgacgtgagcgaaaacgcaaaagatctgatccgtcgtctgatatgttcccgggaacatcgattgggacaaaatggcatagaagactttaaaaaacatccctttttctcaggcattgactgggataacataaggaattgcgaggccccttatatccccgaggtttcctccccaaccgacacatcaaactttgacgtggacgacgattgcctgaagaattccgaaacgatgcccccaccaacccacacggcgttttctggtcatcatcttcccttcgtcggcttcacatacactagctcctgtgtcctatctgaccgaagttgcctgcgggtgacagccggacccacgagcctggacttggacgtcaacgtgcagcgaacactcgataacaaccttgccactgaagcgtatgagcgaagaattaagcgcctggaacaggagaaactagagttgagcagaaagttgcaggagtctacacaaacagttcaggctctgcaatactccactgtcgacggacccctcacagctagtaaagacctggagattaagaatttgaaggaggagattgagaagctccggaagcaggtgaccgagtcttctcaccttgagcagcagctggaggaggccaacgctgtccgccaggagctggacgacgcctttcggcagatcaaggcttacgagaagcagatcaaaaccctgcaacaggaaagggaagatttaaataaagaactggtgcaagccagtgagagacttaagaatcagtcaaaggagttgaaagacgcacactgccaaaggaaattggctatgcaagagtttatggagatcaacgaaaggctgactgagctgcatacccagaagcagaagcttgcccgtcacgttcgcgataaagaggaggaggtagaccttgtgatgcaaaaggtggagtctcttcgacaagagctgcgacgcacagagagagccaaaaaggagctggaggtgcataccgaggccttggcagcagaggcttcgaaggatcgcaagctgcgtgaacaaagcgaacattatagtaaacagctggaaaacgaactggaaggtctcaaacaaaagcagatctcttattccccaggagtgtgtagcatagagcatcagcaggagattacaaagctgaagacggacctggaaaaaaagagcattttctacgaggaggaattgagcaagagagagggtattcacgctaacgagattaagaacttgaagaaagaactccacgatagcgagggtcaacagctggctctcaataaagagattatgatcctgaaggataagctcgagaaaactagacgtgaaagccagtcagagagagaggagttcgagagcgagtttaaacagcagtatgagcgtgaaaaggtgcttctgacggaggagaataaaaagctgaccagcgaattagataaactgacaacactgtatgagaatctcagcattcataaccagcagctcgaagaggaagtgaaagatcttgcagataagaaggaatcagtggctcattgggaagctcagataactgaaataatccagtgggtttctgatgaaaaggatgcacgaggatacctgcaggcactggcatccaaaatgaccgaggagctcgaggccttacgcaactcaagtctgggcacgcgcgcaactgacatgccatggaagatgagaaggttcgcaaagctcgatatgagtgctcggctagagttacaaagtgccctcgatgcagaaattcgggcaaaacaggcaatccaggaggaactgaacaaggttaaggcaagcaacatcattactgaatgtaagcttaaggatagtgagaaaaaaaaccttgagctcttaagcgagatagaacaattgatcaaggatacagaagagttgcggagcgagaaggcaagcaaaggacggagaacagtggattcaacgcctttgtctgtgcatacgcctaccttgaggaaaaagggttgtccgggtagtaccggctttccgccaaagcgcaagacacaccagttctttgtgaaaagttttaccacgcccaccaaatgccatcagtgtaccagtttgatggttgggctgatcaggcagggctgtagctgcgaagtctgcggcttttcctgtcacattacttgcgtgaacaaggcccctaccacatgtccggtgccgcctgagcagacaaagggccctctgggcatcgacccgcaaaaggggataggcaccgcgtacgaggggcatgtgcggatccccaaacctgctggcgtcaagaagggttggcagcgtgccttagccatagtgtgcgacttcaaattgtttctgtacgacatagctgagggcaaggccagccagcctagcgtggtcatctcccaggtgatcgatatgcgtgatgaggaattctcggtgtccagtgtgttggcttctgatgttatccacgcctccaggaaagacataccatgcatttttcgagtgacagcaagccagctaagtgccagcaacaacaagtgcagcattttgatgttggccgacactgagaatgagaagaacaaatgggtgggggtactctcagaactccacaagattctcaagaaaaataaattccgggaccgttccgtctacgtgcctaaggaggcatacgacagcacgcttccgttgataaaaacgacccaagctgcggctataattgaccacgaaagaattgccctgggaaatgaagaaggattatttgtcgtgcatgtaacgaaggacgaaattatccgggtcggagacaataaaaaaattcatcagatagaattgatacctaatgaccagctggtggccgtgatctccgggagaaatcggcatgtacgtctgtttcctatgtcggcactagacggaagggagaccgatttctataagttgtcggagacaaaggggtgccagaccgtgacatccgggaaggttagacacggcgcactgacttgtctctgcgtcgctatgaagcgtcaggtgctgtgctatgagctgtttcagagtaagactcggcataggaagtttaaagagatccaggttccatacaacgtgcagtggatggctatttttagcgagcaactgtgtgtaggcttccagagcggcttcctgcgttaccctttgaacggcgaagggaacccgtactcaatgctccattctaacgaccatactctgagcttcatcgcccatcagccaatggacgctatctgtgccgtggagatttcttccaaagaataccttctttgttttaattctattggcatctatacagactgccaggggagaaggagtcggcagcaggagcttatgtggcccgctaatccttcctcctgctgttacaatgctccctacctgagcgtgtactcagagaatgcggtggatatttttgacgtgaatagcatggagtggatccagacactgccgctcaaaaaggtgcgacccctaaataatgaagggagcctgaatctgctgggtctggaaacaatccgtcttatttactttaaaaacaagatggccgagggggatgagctcgtcgttcctgagaccagcgacaactcgcgaaagcaaatggtacgcaacatcaataataaaagaagatattcatttcgagttcctgaggaggagaggatgcagcagagacgggagatgctgagagaccccgaaatgagaaacaagctgatcagcaatcctaccaatttcaaccatatcgcccacatgggtcctggggacgggattcaaatcctgaaggacttgcctatgaaccccaggccccaggaatcccgaaccgtgttctccggcagcgtaagtatcccctctatcactaagtccagaccagagccaggtcggtccatgagtgcttcctctggtctttctgcgaggtcgtctgctcagaacggttcagccttaaagagagaattctcaggcggatcatactctgccaaacggcagccaatgccgagccccagcgagggcagtttgtccagtgggggaatggatcagggctctgatgccccagcccgtgacttcgacggggaggacagcgactcccctaggcacagcacagcttcaaactcatctaacctgtcatctccgccatctccagcctcaccaagaaaaacaaaaagtctatcgttggagagcaccgacagaggtagttgggatccttag

SEQ ID NO: 284545 - DNA, 5732 bp, Artificial Sequence
  derived and/or modified sequence
atttgcagcaacatttttggttttccctcccccttctatgcattctgtttttttcctcccttttctgtttttcttcttcccgggaagtgaattgctgatgcaaatcggactttattcattaatgatgcaaccggattcgtttcaggattacgttgcacgagttgaattttgaatgaaggagaagagtttttttttttttttttaaagaagtgttgactctctagttcgttgtacttttaattattattttatttaaatatacgacttaattgtattcttttaaaaatgcattaagtatatattttatggtaatttaccctcaaaatatatgtatatgggtgaaattgaagacgcttcagttaagtgaggttactggtgtgttggatgtttaattcagcaccagcattgcatgacagttgtttgaataacaagtggtttatttttaaaaccataccttttaaaatttaggttcagataatagtaaaagtcatcataataatttaaaggaaaaccagcagaaatcgaagcaaacatgtctggagaagtgcgtttgaggcagttggagcagtttattttggacgggcccgctcagaccaatgggcagtgcttcagtgtggagacattactggatatactcatctgcctttatgatgaatgcaataattctccattgagaagagagaagaacattctcgaatacctagaatgggctaaaccatttacttctaaagtgaaacaaatgcgattacatagagaagactttgaaatattaaaggtgattggtcgaggagcttttggggaggttgctgtagtaaaactaaaaaatgcagataaagtgtttgccatgaaaatattgaataaatgggaaatgctgaaaagagctgagacagcatgttttcgtgaagaaagggatgtattagtgaatggagacaataaatggattacaaccttgcactatgctttccaggatgacaataacttatacctggttatggattattatgttggtggggatttgcttactctactcagcaaatttgaagatagattgcctgaagatatggctagattttacttggctgagatggtgatagcaattgactcagttcatcagctacattatgtacacagagacattaaacctgacaatatactgatggatatgaatggacatattcggttagcagattttggttcttgtctgaagctgatggaagatggaacggttcagtcctcagtggctgtaggaactccagattatatctctcctgaaatccttcaagccatggaagatggaaaagggagatatggacctgaatgtgactggtggtctttgggggtctgtatgtatgaaatgctttacggagaaacaccattttatgcagaatcgctggtggagacatacggaaaaatcatgaaccacaaagagaggtttcagtttccagcccaagtgactgatgtgtctgaaaatgctaaggatcttattcgaaggctcatttgtagcagagaacatcgacttggtcaaaatggaatagaagactttaagaaacacccatttttcagtggaattgattgggataatattcggaactgtgaagcaccttatattccagaagttagtagcccaacagatacatcgaattttgatgtagatgatgattgtttaaaaaattctgaaacgatgcccccaccaacacatactgcattttctggccaccatctgccatttgttggttttacatatactagtagctgtgtactttctgatcggagctgtttaagagttacggctggtcccacctcactggatcttgatgttaatgttcagaggactctagacaacaacttagcaactgaagcttatgaaagaagaattaagcgccttgagcaagaaaaacttgaactcagtagaaaacttcaagagtcaacacagactgtccaagctctgcagtattcaactgttgatggtccactaacagcaagcaaagatttagaaataaaaaacttaaaagaagaaattgaaaaactaagaaaacaagtaacagaatcaagtcatttggaacagcaacttgaagaagctaatgctgtgaggcaagaactagatgatgcttttagacaaatcaaggcttatgaaaaacaaatcaaaacgttacaacaagaaagagaagatctaaataaggaactagtccaggctagtgagcgattaaaaaaccaatccaaagagctgaaagacgcacactgtcagaggaaactggccatgcaggaattcatggagatcaatgagcggctaacagaattgcacacccaaaaacagaaacttgctcgccatgtccgagataaggaagaagaggtggacctggtgatgcaaaaagttgaaagcttaaggcaagaactgcgcagaacagaaagagccaaaaaagagctggaagttcatacagaagctctagctgctgaagcatctaaagacaggaagctacgtgaacagagtgagcactattctaagcaactggaaaatgaattggagggactgaagcaaaaacaaattagttactcaccaggagtatgcagcatagaacatcagcaagagataaccaaactaaagactgatttggaaaagaaaagtatcttttatgaagaagaattatctaaaagagaaggaatacatgcaaatgaaataaaaaatcttaagaaagaactgcatgattcagaaggtcagcaacttgctctcaacaaagaaattatgattttaaaagacaaattggaaaaaaccagaagagaaagtcaaagtgaaagggaggaatttgaaagtgagttcaaacaacaatatgaacgagaaaaagtgttgttaactgaagaaaataaaaagctgacgagtgaacttgataagcttactactttgtatgagaacttaagtatacacaaccagcagttagaagaagaggttaaagatctagcagacaagaaagaatcagttgcacattgggaagcccaaatcacagaaataattcagtgggtcagcgatgaaaaggatgcacgagggtatcttcaggccttagcttctaaaatgactgaagaattggaggcattaagaaattccagcttgggtacacgagcaacagatatgccctggaaaatgcgtcgttttgcgaaactggatatgtcagctagactggagttgcagtcggctctggatgcagaaataagagccaaacaggccatccaagaagagttgaataaagttaaagcatctaatatcataacagaatgtaaactaaaagattcagagaagaagaacttggaactactctcagaaatcgaacagctgataaaggacactgaagagcttagatctgaaaagggtatagagcaccaagactcacagcattctttcttggcatttttgaatacgcctaccgatgctctggatcaatttgaacgctctccatcctgtactccagctagcaaaggcagacgtactgtagactccactccactttcagttcacacaccaaccttaaggaaaaaaggatgtcctggttcaactggctttccacctaagcgcaagactcaccagttttttgtaaaatcttttactactcctaccaagtgtcatcagtgtacctccttgatggtgggtttaataagacagggctgttcatgtgaagtgtgtggattctcatgccatataacttgtgtaaacaaagctccaaccacttgtccagttcctcctgaacagacaaaaggtcccctgggtatagatcctcagaaaggaataggaacagcatatgaaggtcatgtcaggattcctaagccagctggagtgaagaaagggtggcagagagcactggctatagtgtgtgacttcaaactctttctgtacgatattgctgaaggaaaagcatctcagcccagtgttgtcattagtcaagtgattgacatgagggatgaagaattttctgtgagttcagtcttggcttctgatgttatccatgcaagtcggaaagatataccctgtatatttagggtcacagcttcccagctctcagcatctaataacaaatgttcaatcctgatgctagcagacactgagaatgagaagaataagtgggtgggagtgctgagtgaattgcacaagattttgaagaaaaacaaattcagagaccgctcagtctatgttcccaaagaggcttatgacagcactctacccctcattaaaacaacccaggcagccgcaatcatagatcatgaaagaattgctttgggaaacgaagaagggttatttgttgtacatgtcaccaaagatgaaattattagagttggtgacaataagaagattcatcagattgaactcattccaaatgatcagcttgttgctgtgatctcaggacgaaatcgtcatgtacgactttttcctatgtcagcattggatgggcgagagaccgatttttacaagctgtcagaaactaaagggtgtcaaaccgtaacttctggaaaggtgcgccatggagctctcacatgcctgtgtgtggctatgaaaaggcaggtcctctgttatgaactatttcagagcaagacccgtcacagaaaatttaaagaaattcaagtcccatataatgtccagtggatggcaatcttcagtgaacaactctgtgtgggattccagtcaggatttctaagataccccttgaatggagaaggaaatccatacagtatgctccattcaaatgaccatacactatcatttattgcacatcaaccaatggatgctatctgcgcagttgagatctccagtaaagaatatctgctgtgttttaacagcattgggatatacactgactgccagggccgaagatctagacaacaggaattgatgtggccagcaaatccttcctcttgttgttacaatgcaccatatctctcggtgtacagtgaaaatgcagttgatatctttgatgtgaactccatggaatggattcagactcttcctctcaaaaaggttcgacccttaaacaatgaaggatcattaaatcttttagggttggagaccattagattaatatatttcaaaaataagatggcagaaggggacgaactggtagtacctgaaacatcagataatagtcggaaacaaatggttagaaacattaacaataagcggcgttattccttcagagtcccagaagaggaaaggatgcagcagaggagggaaatgctacgagatccagaaatgagaaataaattaatttctaatccaactaattttaatcacatagcacacatgggtcctggagatggaatacagatcctgaaagatctgcccatgaaccctcggcctcaggaaagtcggacagtattcagtggctcagtcagtattccatctatcaccaaatcccgccctgagccaggccgctccatgagtgctagcagtggcttgtcagcaaggtcatccgcacagaatggcagcgcattaaagagggaattctctggaggaagctacagtgccaagcggcagcccatgccctccccgtcagagggctctttgtcctctggaggcatggaccaaggaagtgatgccccagcgagggactttgacggagaggactctgactctccgaggcattccacagcttccaacagttccaacctaagcagccccccaagcccagcttcaccccgaaaaaccaagagcctctccctggagagcactgaccgcgggagctgggacccgtgag

SEQ ID NO: 284546 - DNA, 5158 bp, Artificial Sequence
  derived and/or modified sequence
ggaaaaccagcagaaatcgaagcaaacatgtctggagaagtgcgtttgaggcagttggagcagtttattttggacgggcccgctcagaccaatgggcagtgcttcagtgtggagacattactggatatactcatctgcctttatgatgaatgcaataattctccattgagaagagagaagaacattctcgaatacctagaatgggctaaaccatttacttctaaagtgaaacaaatgcgattacatagagaagactttgaaatattaaaggtgattggtcgaggagcttttggggaggttgctgtagtaaaactaaaaaatgcagataaagtgtttgccatgaaaatattgaataaatgggaaatgctgaaaagagctgagacagcatgttttcgtgaagaaagggatgtattagtgaatggagacaataaatggattacaaccttgcactatgctttccaggatgacaataacttatacctggttatggattattatgttggtggggatttgcttactctactcagcaaatttgaagatagattgcctgaagatatggctagattttacttggctgagatggtgatagcaattgactcagttcatcagctacattatgtacacagagacattaaacctgacaatatactgatggatatgaatggacatattcggttagcagattttggttcttgtctgaagctgatggaagatggaacggttcagtcctcagtggctgtaggaactccagattatatctctcctgaaatccttcaagccatggaagatggaaaagggagatatggacctgaatgtgactggtggtctttgggggtctgtatgtatgaaatgctttacggagaaacaccattttatgcagaatcgctggtggagacatacggaaaaatcatgaaccacaaagagaggtttcagtttccagcccaagtgactgatgtgtctgaaaatgctaaggatcttattcgaaggctcatttgtagcagagaacatcgacttggtcaaaatggaatagaagactttaagaaacacccatttttcagtggaattgattgggataatattcggaactgtgaagcaccttatattccagaagttagtagcccaacagatacatcgaattttgatgtagatgatgattgtttaaaaaattctgaaacgatgcccccaccaacacatactgcattttctggccaccatctgccatttgttggttttacatatactagtagctgtgtactttctgatcggagctgtttaagagttacggctggtcccacctcactggatcttgatgttaatgttcagaggactctagacaacaacttagcaactgaagcttatgaaagaagaattaagcgccttgagcaagaaaaacttgaactcagtagaaaacttcaagagtcaacacagactgtccaagctctgcagtattcaactgttgatggtccactaacagcaagcaaagatttagaaataaaaaacttaaaagaagaaattgaaaaactaagaaaacaagtaacagaatcaagtcatttggaacagcaacttgaagaagctaatgctgtgaggcaagaactagatgatgcttttagacaaatcaaggcttatgaaaaacaaatcaaaacgttacaacaagaaagagaagatctaaataaggaactagtccaggctagtgagcgattaaaaaaccaatccaaagagctgaaagacgcacactgtcagaggaaactggccatgcaggaattcatggagatcaatgagcggctaacagaattgcacacccaaaaacagaaacttgctcgccatgtccgagataaggaagaagaggtggacctggtgatgcaaaaagttgaaagcttaaggcaagaactgcgcagaacagaaagagccaaaaaagagctggaagttcatacagaagctctagctgctgaagcatctaaagacaggaagctacgtgaacagagtgagcactattctaagcaactggaaaatgaattggagggactgaagcaaaaacaaattagttactcaccaggagtatgcagcatagaacatcagcaagagataaccaaactaaagactgatttggaaaagaaaagtatcttttatgaagaagaattatctaaaagagaaggaatacatgcaaatgaaataaaaaatcttaagaaagaactgcatgattcagaaggtcagcaacttgctctcaacaaagaaattatgattttaaaagacaaattggaaaaaaccagaagagaaagtcaaagtgaaagggaggaatttgaaagtgagttcaaacaacaatatgaacgagaaaaagtgttgttaactgaagaaaataaaaagctgacgagtgaacttgataagcttactactttgtatgagaacttaagtatacacaaccagcagttagaagaagaggttaaagatctagcagacaagaaagaatcagttgcacattgggaagcccaaatcacagaaataattcagtgggtcagcgatgaaaaggatgcacgagggtatcttcaggccttagcttctaaaatgactgaagaattggaggcattaagaaattccagcttgggtacacgagcaacagatatgccctggaaaatgcgtcgttttgcgaaactggatatgtcagctagactggagttgcagtcggctctggatgcagaaataagagccaaacaggccatccaagaagagttgaataaagttaaagcatctaatatcataacagaatgtaaactaaaagattcagagaagaagaacttggaactactctcagaaatcgaacagctgataaaggacactgaagagcttagatctgaaaaggctagcaaaggcagacgtactgtagactccactccactttcagttcacacaccaaccttaaggaaaaaaggatgtcctggttcaactggctttccacctaagcgcaagactcaccagttttttgtaaaatcttttactactcctaccaagtgtcatcagtgtacctccttgatggtgggtttaataagacagggctgttcatgtgaagtgtgtggattctcatgccatataacttgtgtaaacaaagctccaaccacttgtccagttcctcctgaacagacaaaaggtcccctgggtatagatcctcagaaaggaataggaacagcatatgaaggtcatgtcaggattcctaagccagctggagtgaagaaagggtggcagagagcactggctatagtgtgtgacttcaaactctttctgtacgatattgctgaaggaaaagcatctcagcccagtgttgtcattagtcaagtgattgacatgagggatgaagaattttctgtgagttcagtcttggcttctgatgttatccatgcaagtcggaaagatataccctgtatatttagggtcacagcttcccagctctcagcatctaataacaaatgttcaatcctgatgctagcagacactgagaatgagaagaataagtgggtgggagtgctgagtgaattgcacaagattttgaagaaaaacaaattcagagaccgctcagtctatgttcccaaagaggcttatgacagcactctacccctcattaaaacaacccaggcagccgcaatcatagatcatgaaagaattgctttgggaaacgaagaagggttatttgttgtacatgtcaccaaagatgaaattattagagttggtgacaataagaagattcatcagattgaactcattccaaatgatcagcttgttgctgtgatctcaggacgaaatcgtcatgtacgactttttcctatgtcagcattggatgggcgagagaccgatttttacaagctgtcagaaactaaagggtgtcaaaccgtaacttctggaaaggtgcgccatggagctctcacatgcctgtgtgtggctatgaaaaggcaggtcctctgttatgaactatttcagagcaagacccgtcacagaaaatttaaagaaattcaagtcccatataatgtccagtggatggcaatcttcagtgaacaactctgtgtgggattccagtcaggatttctaagataccccttgaatggagaaggaaatccatacagtatgctccattcaaatgaccatacactatcatttattgcacatcaaccaatggatgctatctgcgcagttgagatctccagtaaagaatatctgctgtgttttaacagcattgggatatacactgactgccagggccgaagatctagacaacaggaattgatgtggccagcaaatccttcctcttgttgttacaatgcaccatatctctcggtgtacagtgaaaatgcagttgatatctttgatgtgaactccatggaatggattcagactcttcctctcaaaaaggttcgacccttaaacaatgaaggatcattaaatcttttagggttggagaccattagattaatatatttcaaaaataagatggcagaaggggacgaactggtagtacctgaaacatcagataatagtcggaaacaaatggttagaaacattaacaataagcggcgttattccttcagagtcccagaagaggaaaggatgcagcagaggagggaaatgctacgagatccagaaatgagaaataaattaatttctaatccaactaattttaatcacatagcacacatgggtcctggagatggaatacagatcctgaaagatctgcccatgaaccctcggcctcaggaaagtcggacagtattcagtggctcagtcagtattccatctatcaccaaatcccgccctgagccaggccgctccatgagtgctagcagtggcttgtcagcaaggtcatccgcacagaatggcagcgcattaaagagggaattctctggaggaagctacagtgccaagcggcagcccatgccctccccgtcagagggctctttgtcctctggaggcatggaccaaggaagtgatgccccagcgagggactttgacggagaggactctgactctccgaggcattccacagcttccaacagttccaacctaagcagccccccaagcccagcttcaccccgaaaaaccaagagcctctccctggagagcactgaccgcgggagctgggacccgtgagctgcctcagcactgggacctctcgctctcc

SEQ ID NO: 284547 - DNA, 5199 bp, Artificial Sequence
  derived and/or modified sequence
atgagcggcgaggtgagactgagacagctggagcagttcatcctggacggccccgcccagaccaacggccagtgcttcagcgtggagaccctgctggacatcctgatctgcctgtacgacgagtgcaacaacagccccctgagaagagagaagaacatcctggagtacctggagtgggccaagcccttcaccagcaaggtgaagcagatgagactgcacagagaggacttcgagatcctgaaggtgatcggcagaggcgccttcggcgaggtggccgtggtgaagctgaagaacgccgacaaggtgttcgccatgaagatcctgaacaagtgggagatgctgaagagagccgagaccgcctgcttcagagaggagagagacgtgctggtgaacggcgacaacaagtggatcaccaccctgcactacgccttccaggacgacaacaacctgtacctggtgatggactactacgtgggcggcgacctgctgaccctgctgagcaagttcgaggacagactgcccgaggacatggccagattctacctggccgagatggtgatcgccatcgacagcgtgcaccagctgcactacgtgcacagagacatcaagcccgacaacatcctgatggacatgaacggccacatcagactggccgacttcggcagctgcctgaagctgatggaggacggcaccgtgcagagcagcgtggccgtgggcacccccgactacatcagccccgagatcctgcaggccatggaggacggcaagggcagatacggccccgagtgcgactggtggagcctgggcgtgtgcatgtacgagatgctgtacggcgagacccccttctacgccgagagcctggtggagacctacggcaagatcatgaaccacaaggagagattccagttccccgcccaggtgaccgacgtgagcgagaacgccaaggacctgatcagaagactgatctgcagcagagagcacagactgggccagaacggcatcgaggacttcaagaagcaccccttcttcagcggcatcgactgggacaacatcagaaactgcgaggccccctacatccccgaggtgagcagccccaccgacaccagcaacttcgacgtggacgacgactgcctgaagaacagcgagaccatgcccccccccacccacaccgccttcagcggccaccacctgcccttcgtgggcttcacctacaccagcagctgcgtgctgagcgacagaagctgcctgagagtgaccgccggccccaccagcctggacctggacgtgaacgtgcagagaaccctggacaacaacctggccaccgaggcctacgagagaagaatcaagagactggagcaggagaagctggagctgagcagaaagctgcaggagagcacccagaccgtgcaggccctgcagtacagcaccgtggacggccccctgaccgccagcaaggacctggagatcaagaacctgaaggaggagatcgagaagctgagaaagcaggtgaccgagagcagccacctggagcagcagctggaggaggccaacgccgtgagacaggagctggacgacgccttcagacagatcaaggcctacgagaagcagatcaagaccctgcagcaggagagagaggacctgaacaaggagctggtgcaggccagcgagagactgaagaaccagagcaaggagctgaaggacgcccactgccagagaaagctggccatgcaggagttcatggagatcaacgagagactgaccgagctgcacacccagaagcagaagctggccagacacgtgagagacaaggaggaggaggtggacctggtgatgcagaaggtggagagcctgagacaggagctgagaagaaccgagagagccaagaaggagctggaggtgcacaccgaggccctggccgccgaggccagcaaggacagaaagctgagagagcagagcgagcactacagcaagcagctggagaacgagctggagggcctgaagcagaagcagatcagctacagccccggcgtgtgcagcatcgagcaccagcaggagatcaccaagctgaagaccgacctggagaagaagagcatcttctacgaggaggagctgagcaagagagagggcatccacgccaacgagatcaagaacctgaagaaggagctgcacgacagcgagggccagcagctggccctgaacaaggagatcatgatcctgaaggacaagctggagaagaccagaagagagagccagagcgagagagaggagttcgagagcgagttcaagcagcagtacgagagagagaaggtgctgctgaccgaggagaacaagaagctgaccagcgagctggacaagctgaccaccctgtacgagaacctgagcatccacaaccagcagctggaggaggaggtgaaggacctggccgacaagaaggagagcgtggcccactgggaggcccagatcaccgagatcatccagtgggtgagcgacgagaaggacgccagaggctacctgcaggccctggccagcaagatgaccgaggagctggaggccctgagaaacagcagcctgggcaccagagccaccgacatgccctggaagatgagaagattcgccaagctggacatgagcgccagactggagctgcagagcgccctggacgccgagatcagagccaagcaggccatccaggaggagctgaacaaggtgaaggccagcaacatcatcaccgagtgcaagctgaaggacagcgagaagaagaacctggagctgctgagcgagatcgagcagctgatcaaggacaccgaggagctgagaagcgagaagggcatcgagcaccaggacagccagcacagcttcctggccttcctgaacacccccaccgacgccctggaccagttcgagagaagccccagctgcacccccgccagcaagggcagaagaaccgtggacagcacccccctgagcgtgcacacccccaccctgagaaagaagggctgccccggcagcaccggcttcccccccaagagaaagacccaccagttcttcgtgaagagcttcaccacccccaccaagtgccaccagtgcaccagcctgatggtgggcctgatcagacagggctgcagctgcgaggtgtgcggcttcagctgccacatcacctgcgtgaacaaggcccccaccacctgccccgtgccccccgagcagaccaagggccccctgggcatcgacccccagaagggcatcggcaccgcctacgagggccacgtgagaatccccaagcccgccggcgtgaagaagggctggcagagagccctggccatcgtgtgcgacttcaagctgttcctgtacgacatcgccgagggcaaggccagccagcccagcgtggtgatcagccaggtgatcgacatgagagacgaggagttcagcgtgagcagcgtgctggccagcgacgtgatccacgccagcagaaaggacatcccctgcatcttcagagtgaccgccagccagctgagcgccagcaacaacaagtgcagcatcctgatgctggccgacaccgagaacgagaagaacaagtgggtgggcgtgctgagcgagctgcacaagatcctgaagaagaacaagttcagagacagaagcgtgtacgtgcccaaggaggcctacgacagcaccctgcccctgatcaagaccacccaggccgccgccatcatcgaccacgagagaatcgccctgggcaacgaggagggcctgttcgtggtgcacgtgaccaaggacgagatcatcagagtgggcgacaacaagaagatccaccagatcgagctgatccccaacgaccagctggtggccgtgatcagcggcagaaacagacacgtgagactgttccccatgagcgccctggacggcagagagaccgacttctacaagctgagcgagaccaagggctgccagaccgtgaccagcggcaaggtgagacacggcgccctgacctgcctgtgcgtggccatgaagagacaggtgctgtgctacgagctgttccagagcaagaccagacacagaaagttcaaggagatccaggtgccctacaacgtgcagtggatggccatcttcagcgagcagctgtgcgtgggcttccagagcggcttcctgagataccccctgaacggcgagggcaacccctacagcatgctgcacagcaacgaccacaccctgagcttcatcgcccaccagcccatggacgccatctgcgccgtggagatcagcagcaaggagtacctgctgtgcttcaacagcatcggcatctacaccgactgccagggcagaagaagcagacagcaggagctgatgtggcccgccaaccccagcagctgctgctacaacgccccctacctgagcgtgtacagcgagaacgccgtggacatcttcgacgtgaacagcatggagtggatccagaccctgcccctgaagaaggtgagacccctgaacaacgagggcagcctgaacctgctgggcctggagaccatcagactgatctacttcaagaacaagatggccgagggcgacgagctggtggtgcccgagaccagcgacaacagcagaaagcagatggtgagaaacatcaacaacaagagaagatacagcttcagagtgcccgaggaggagagaatgcagcagagaagagagatgctgagagaccccgagatgagaaacaagctgatcagcaaccccaccaacttcaaccacatcgcccacatgggccccggcgacggcatccagatcctgaaggacctgcccatgaaccccagaccccaggagagcagaaccgtgttcagcggcagcgtgagcatccccagcatcaccaagagcagacccgagcccggcagaagcatgagcgccagcagcggcctgagcgccagaagcagcgcccagaacggcagcgccctgaagagagagttcagcggcggcagctacagcgccaagagacagcccatgcccagccccagcgagggcagcctgagcagcggcggcatggaccagggcagcgacgcccccgccagagacttcgacggcgaggacagcgacagccccagacacagcaccgccagcaacagcagcaacctgagcagcccccccagccccgccagccccagaaagaccaagagcctgagcctggagagcaccgacagaggcagctgggacccctag

SEQ ID NO: 284548 - DNA, 5100 bp, Artificial Sequence
  derived and/or modified sequence
atgagcggcgaggtgagactgagacagctggagcagttcatcctggacggccccgcccagaccaacggccagtgcttcagcgtggagaccctgctggacatcctgatctgcctgtacgacgagtgcaacaacagccccctgagaagagagaagaacatcctggagtacctggagtgggccaagcccttcaccagcaaggtgaagcagatgagactgcacagagaggacttcgagatcctgaaggtgatcggcagaggcgccttcggcgaggtggccgtggtgaagctgaagaacgccgacaaggtgttcgccatgaagatcctgaacaagtgggagatgctgaagagagccgagaccgcctgcttcagagaggagagagacgtgctggtgaacggcgacaacaagtggatcaccaccctgcactacgccttccaggacgacaacaacctgtacctggtgatggactactacgtgggcggcgacctgctgaccctgctgagcaagttcgaggacagactgcccgaggacatggccagattctacctggccgagatggtgatcgccatcgacagcgtgcaccagctgcactacgtgcacagagacatcaagcccgacaacatcctgatggacatgaacggccacatcagactggccgacttcggcagctgcctgaagctgatggaggacggcaccgtgcagagcagcgtggccgtgggcacccccgactacatcagccccgagatcctgcaggccatggaggacggcaagggcagatacggccccgagtgcgactggtggagcctgggcgtgtgcatgtacgagatgctgtacggcgagacccccttctacgccgagagcctggtggagacctacggcaagatcatgaaccacaaggagagattccagttccccgcccaggtgaccgacgtgagcgagaacgccaaggacctgatcagaagactgatctgcagcagagagcacagactgggccagaacggcatcgaggacttcaagaagcaccccttcttcagcggcatcgactgggacaacatcagaaactgcgaggccccctacatccccgaggtgagcagccccaccgacaccagcaacttcgacgtggacgacgactgcctgaagaacagcgagaccatgcccccccccacccacaccgccttcagcggccaccacctgcccttcgtgggcttcacctacaccagcagctgcgtgctgagcgacagaagctgcctgagagtgaccgccggccccaccagcctggacctggacgtgaacgtgcagagaaccctggacaacaacctggccaccgaggcctacgagagaagaatcaagagactggagcaggagaagctggagctgagcagaaagctgcaggagagcacccagaccgtgcaggccctgcagtacagcaccgtggacggccccctgaccgccagcaaggacctggagatcaagaacctgaaggaggagatcgagaagctgagaaagcaggtgaccgagagcagccacctggagcagcagctggaggaggccaacgccgtgagacaggagctggacgacgccttcagacagatcaaggcctacgagaagcagatcaagaccctgcagcaggagagagaggacctgaacaaggagctggtgcaggccagcgagagactgaagaaccagagcaaggagctgaaggacgcccactgccagagaaagctggccatgcaggagttcatggagatcaacgagagactgaccgagctgcacacccagaagcagaagctggccagacacgtgagagacaaggaggaggaggtggacctggtgatgcagaaggtggagagcctgagacaggagctgagaagaaccgagagagccaagaaggagctggaggtgcacaccgaggccctggccgccgaggccagcaaggacagaaagctgagagagcagagcgagcactacagcaagcagctggagaacgagctggagggcctgaagcagaagcagatcagctacagccccggcgtgtgcagcatcgagcaccagcaggagatcaccaagctgaagaccgacctggagaagaagagcatcttctacgaggaggagctgagcaagagagagggcatccacgccaacgagatcaagaacctgaagaaggagctgcacgacagcgagggccagcagctggccctgaacaaggagatcatgatcctgaaggacaagctggagaagaccagaagagagagccagagcgagagagaggagttcgagagcgagttcaagcagcagtacgagagagagaaggtgctgctgaccgaggagaacaagaagctgaccagcgagctggacaagctgaccaccctgtacgagaacctgagcatccacaaccagcagctggaggaggaggtgaaggacctggccgacaagaaggagagcgtggcccactgggaggcccagatcaccgagatcatccagtgggtgagcgacgagaaggacgccagaggctacctgcaggccctggccagcaagatgaccgaggagctggaggccctgagaaacagcagcctgggcaccagagccaccgacatgccctggaagatgagaagattcgccaagctggacatgagcgccagactggagctgcagagcgccctggacgccgagatcagagccaagcaggccatccaggaggagctgaacaaggtgaaggccagcaacatcatcaccgagtgcaagctgaaggacagcgagaagaagaacctggagctgctgagcgagatcgagcagctgatcaaggacaccgaggagctgagaagcgagaaggccagcaagggcagaagaaccgtggacagcacccccctgagcgtgcacacccccaccctgagaaagaagggctgccccggcagcaccggcttcccccccaagagaaagacccaccagttcttcgtgaagagcttcaccacccccaccaagtgccaccagtgcaccagcctgatggtgggcctgatcagacagggctgcagctgcgaggtgtgcggcttcagctgccacatcacctgcgtgaacaaggcccccaccacctgccccgtgccccccgagcagaccaagggccccctgggcatcgacccccagaagggcatcggcaccgcctacgagggccacgtgagaatccccaagcccgccggcgtgaagaagggctggcagagagccctggccatcgtgtgcgacttcaagctgttcctgtacgacatcgccgagggcaaggccagccagcccagcgtggtgatcagccaggtgatcgacatgagagacgaggagttcagcgtgagcagcgtgctggccagcgacgtgatccacgccagcagaaaggacatcccctgcatcttcagagtgaccgccagccagctgagcgccagcaacaacaagtgcagcatcctgatgctggccgacaccgagaacgagaagaacaagtgggtgggcgtgctgagcgagctgcacaagatcctgaagaagaacaagttcagagacagaagcgtgtacgtgcccaaggaggcctacgacagcaccctgcccctgatcaagaccacccaggccgccgccatcatcgaccacgagagaatcgccctgggcaacgaggagggcctgttcgtggtgcacgtgaccaaggacgagatcatcagagtgggcgacaacaagaagatccaccagatcgagctgatccccaacgaccagctggtggccgtgatcagcggcagaaacagacacgtgagactgttccccatgagcgccctggacggcagagagaccgacttctacaagctgagcgagaccaagggctgccagaccgtgaccagcggcaaggtgagacacggcgccctgacctgcctgtgcgtggccatgaagagacaggtgctgtgctacgagctgttccagagcaagaccagacacagaaagttcaaggagatccaggtgccctacaacgtgcagtggatggccatcttcagcgagcagctgtgcgtgggcttccagagcggcttcctgagataccccctgaacggcgagggcaacccctacagcatgctgcacagcaacgaccacaccctgagcttcatcgcccaccagcccatggacgccatctgcgccgtggagatcagcagcaaggagtacctgctgtgcttcaacagcatcggcatctacaccgactgccagggcagaagaagcagacagcaggagctgatgtggcccgccaaccccagcagctgctgctacaacgccccctacctgagcgtgtacagcgagaacgccgtggacatcttcgacgtgaacagcatggagtggatccagaccctgcccctgaagaaggtgagacccctgaacaacgagggcagcctgaacctgctgggcctggagaccatcagactgatctacttcaagaacaagatggccgagggcgacgagctggtggtgcccgagaccagcgacaacagcagaaagcagatggtgagaaacatcaacaacaagagaagatacagcttcagagtgcccgaggaggagagaatgcagcagagaagagagatgctgagagaccccgagatgagaaacaagctgatcagcaaccccaccaacttcaaccacatcgcccacatgggccccggcgacggcatccagatcctgaaggacctgcccatgaaccccagaccccaggagagcagaaccgtgttcagcggcagcgtgagcatccccagcatcaccaagagcagacccgagcccggcagaagcatgagcgccagcagcggcctgagcgccagaagcagcgcccagaacggcagcgccctgaagagagagttcagcggcggcagctacagcgccaagagacagcccatgcccagccccagcgagggcagcctgagcagcggcggcatggaccagggcagcgacgcccccgccagagacttcgacggcgaggacagcgacagccccagacacagcaccgccagcaacagcagcaacctgagcagcccccccagccccgccagccccagaaagaccaagagcctgagcctggagagcaccgacagaggcagctgggacccctag

SEQ ID NO: 284549 - protein, 623 aa, Artificial Sequence
  derived and/or modified sequence
MPTALCPRVLAPKESEEPRKMRSPPGENPSPQGELPSPESSRRLFRRFRYQEAAGPREALQRLWDLCGGWLRPERHTKEQILELLVLEQFLAILPREIQSWVRAQEPESGEQAVAAVEALEREPGRPWQWLKHCEDPVVIDDGDSPLDQEQEQLPVEPHSDLAKNQDAQPITLAQCLGLPSRPPSQLSGDPVLQDAFLLQEENVRDTQQVTTLQLPPRIFQFNNHRSNGYILEMLGSGGKKAQIISVLSQIYVSRVSPFKDMILCFSEEDWSLLDPAQTGFYGEFIIGEDYGVSMPPNDLAAQPDLSQGEENEPRVPELQDLQGKEVPQVSYLDSPSLQPFQVEERRKREELQVPEFQACPQTVVPQNTYPAGGNPRSLENSLDEEVTIEIVLSSSGDEDSQHGPYCTEELGSPTEKQRSLPASHRSSTEAGGEVQTSKKSYVCPNCGKIFRWRVNFIRHLRSRREQEKPHECSVCGELFSDSEDLDGHLESHEAQKPYRCGACGKSFRLNSHLLSHRRIHLQPDRLQPVEKREQAASEDADKGPKEPLENGKAKLSFQCCECGKAFQRHDHLARHRSHFHLKDKARPFQCRYCVKSFTQNYDLLRHERLHMKRRSKQALNSY

SEQ ID NO: 284550 - DNA, 1872 bp, Artificial Sequence
  derived and/or modified sequence
atgcccaccgccctgtgccccagagtgctggcccccaaggagagcgaggagcccagaaagatgagaagcccccccggcgagaaccccagcccccagggcgagctgcccagccccgagagcagcagaagactgttcagaagattcagataccaggaggccgccggccccagagaggccctgcagagactgtgggacctgtgcggcggctggctgagacccgagagacacaccaaggagcagatcctggagctgctggtgctggagcagttcctggccatcctgcccagagagatccagagctgggtgagagcccaggagcccgagagcggcgagcaggccgtggccgccgtggaggccctggagagagagcccggcagaccctggcagtggctgaagcactgcgaggaccccgtggtgatcgacgacggcgacagccccctggaccaggagcaggagcagctgcccgtggagccccacagcgacctggccaagaaccaggacgcccagcccatcaccctggcccagtgcctgggcctgcccagcagaccccccagccagctgagcggcgaccccgtgctgcaggacgccttcctgctgcaggaggagaacgtgagagacacccagcaggtgaccaccctgcagctgccccccagaatcttccagttcaacaaccacagaagcaacggctacatcctggagatgctgggcagcggcggcaagaaggcccagatcatcagcgtgctgagccagatctacgtgagcagagtgagccccttcaaggacatgatcctgtgcttcagcgaggaggactggagcctgctggaccccgcccagaccggcttctacggcgagttcatcatcggcgaggactacggcgtgagcatgccccccaacgacctggccgcccagcccgacctgagccagggcgaggagaacgagcccagagtgcccgagctgcaggacctgcagggcaaggaggtgccccaggtgagctacctggacagccccagcctgcagcccttccaggtggaggagagaagaaagagagaggagctgcaggtgcccgagttccaggcctgcccccagaccgtggtgccccagaacacctaccccgccggcggcaaccccagaagcctggagaacagcctggacgaggaggtgaccatcgagatcgtgctgagcagcagcggcgacgaggacagccagcacggcccctactgcaccgaggagctgggcagccccaccgagaagcagagaagcctgcccgccagccacagaagcagcaccgaggccggcggcgaggtgcagaccagcaagaagagctacgtgtgccccaactgcggcaagatcttcagatggagagtgaacttcatcagacacctgagaagcagaagagagcaggagaagccccacgagtgcagcgtgtgcggcgagctgttcagcgacagcgaggacctggacggccacctggagagccacgaggcccagaagccctacagatgcggcgcctgcggcaagagcttcagactgaacagccacctgctgagccacagaagaatccacctgcagcccgacagactgcagcccgtggagaagagagagcaggccgccagcgaggacgccgacaagggccccaaggagcccctggagaacggcaaggccaagctgagcttccagtgctgcgagtgcggcaaggccttccagagacacgaccacctggccagacacagaagccacttccacctgaaggacaaggccagacccttccagtgcagatactgcgtgaagagcttcacccagaactacgacctgctgagacacgagagactgcacatgaagagaagaagcaagcaggccctgaacagctactag

SEQ ID NO: 284551 - DNA, 1872 bp, Artificial Sequence
  derived and/or modified sequence
atgcctacagccctgtgtccccgcgtgttagctcctaaagaatcggaagaaccacgcaagatgcgaagcccacctggtgagaatccgtcaccgcagggggaacttccctcaccagaatccagtcgcaggctttttaggcgattccgttaccaagaagctgccgggcctcgggaggcgttgcaacgactgtgggatctttgtggtggctggctgcgcccagagcggcacactaaagagcagatattggagctcttggtgctggaacagtttctggccatactcccaagggaaattcagtcctgggtccgcgcacaagagccagagagtggcgagcaggcggtcgccgccgtcgaggctttagagcgggagccaggaaggccctggcagtggctgaaacattgtgaggacccagtagtaattgatgacggggacagtccgctggatcaagagcaggaacagctcccggtggagccccacagcgacctggctaagaatcaggatgcccagccaataacactcgcacagtgcctcggcctgccgtctcgccctccaagtcagctgtccggggatccagttctccaagatgcattcctgttgcaggaggagaatgtccgcgacacccagcaggtgacgacactgcaactgcctccacgcattttccaatttaataatcaccggagcaatgggtacatcctggaaatgctcggttccggcggcaaaaaagctcagattatctcagtgctgtcccagatctacgtgtcacgcgtgagtccttttaaggatatgatcctgtgcttttcagaagaagactggtctctgctcgatcccgctcagaccggcttttacggcgagttcatcattggtgaggactacggggttagcatgccacctaatgatctggctgctcaaccggacctatcacaaggtgaggagaacgagcctcgtgttcctgagctgcaggacctgcagggtaaagaggtgccccaagttagctacctggactcacccagtctgcagccttttcaggtggaagaacggcggaaacgcgaagagctgcaggtcccagaatttcaggcatgcccgcagacggtagttccgcagaacacatatccagcaggaggaaacccccgatcactggagaactcccttgacgaggaagtaactatcgagattgtactttcctcatccggcgatgaggacagccagcacggtccatactgcactgaagaactcggatcccctaccgagaaacaacgcagcttaccagcaagccaccgcagctccacagaggcaggcggggaggtgcagacaagtaagaagtcctatgtatgtccaaattgtggaaaaatttttcgttggcgcgtgaacttcattcggcacttacgctcacgtagggaacaggagaaaccccacgaatgttctgtctgcggagaactattttctgattccgaggacctcgatgggcatctcgagagccacgaggcgcagaagccgtatcggtgtggagcatgcggcaagagtttcagactcaactcccacctccttagccaccgccgcatccacctgcagcctgatcgactccagcccgtggaaaagcgagaacaggctgcgtctgaggatgcggacaaaggccctaaagagcctctggagaatgggaaagcaaagctgtcctttcagtgttgtgagtgcggtaaggccttccagaggcacgaccacctcgcccgccacagatcccacttccatctcaaggataaggctaggccttttcagtgccgctactgtgtgaagtcgttcactcaaaactatgatctcctgagacacgagaggctccacatgaaacggaggtcaaaacaggcactcaatagctactag

SEQ ID NO: 284552 - DNA, 1872 bp, Artificial Sequence
  derived and/or modified sequence
atgcccacagccctgtgcccccgggtgctggcccccaaggagagcgaggagcccaggaagatgaggagccccccaggagagaaccccagcccccagggcgagctgcccagccctgagagcagccggcggctcttccgccgcttccgctaccaggaggccgccggcccccgggaggccctgcagaggctgtgggacctgtgtggcggctggctgcggcctgagcggcacaccaaggagcagatcctggagctgctggtgctggagcagttcctggccatcctgccccgggagatccagagctgggtgcgggcccaggagcctgagagcggggagcaggccgtggccgctgtggaggccctggagcgggagcccggccggccctggcagtggctgaagcactgtgaagatcctgtggtgattgatgatggagacagccccctggaccaggagcaggagcagctgcctgtggagccccacagcgacctggccaagaaccaggatgcccagcccatcaccctggcccagtgcctgggcctgcccagcaggcctcccagccagctgagcggggaccctgtgctgcaggatgccttcctgctgcaggaggagaatgtgcgggacacccagcaggtgaccaccctgcagctgcccccacgcatcttccagttcaacaaccacaggagcaatggctacatcctggagatgctgggcagcggcggcaagaaggcccagatcatctctgtgctgagccagatctacgtgtcccgggtgagccccttcaaggacatgatcctgtgcttcagcgaggaggactggagcctgctggaccctgcccagacaggcttctacggggagttcatcattggagaagattatggagtgtccatgcccccaaatgacctggccgcccagcctgacctgagccagggcgaggagaatgagccccgggtgcctgagctgcaggacctgcagggcaaggaggtgccccaggtgtcctacctggacagccccagcctgcagcccttccaggtggaggagaggaggaagcgggaggagctgcaggtgcctgagttccaggcctgcccccagacagtggtgccccagaacacctacccagctgggggcaaccccaggagcctggagaacagcctggatgaggaggtgaccattgaaattgtgctgagcagcagtggagatgaggacagccagcacggcccctactgcacagaggagctgggcagccccacagagaagcagaggagcctgcctgccagccacaggagcagcacagaagctggaggagaggtgcagaccagcaagaagagctatgtgtgccccaactgtgggaagatcttccgctggagggtgaacttcatccgccacctgcggagccggcgggagcaggagaagccccatgagtgcagcgtgtgtggggagctgttcagtgacagcgaggacctggatggccacctggagagccatgaggcccagaagccctaccgctgtggggcctgtgggaagagcttccggctgaacagccacctgctgagccaccggcgcatccacctgcagcctgaccggctgcagcctgtggagaagcgggagcaggccgcctctgaagatgctgacaagggccccaaggagcccctggagaatggcaaggccaagctgtccttccagtgctgtgaatgtgggaaggccttccagagacatgaccacctggcccggcacaggagccacttccacctgaaggacaaggcccggcccttccagtgccgctactgtgtgaagagcttcacccagaactatgacctgctgcggcatgagcggctgcacatgaagaggaggagcaagcaggccctgaacagctactag

SEQ ID NO: 284553 - DNA, 1872 bp, Artificial Sequence
  derived and/or modified sequence
atgcccaccgccctgtgcccccgggtgctggcccccaaggagagcgaagagccgcggaaaatgagatcaccgcctggggagaacccgtcaccacaaggggagctaccatcccccgaatccagcagaagactgtttcggaggtttcgttatcaagaagccgctggccctagggaggctttacagcggttatgggacctgtgtgggggttggctgaggccagagagacacaccaaggagcagatccttgaactgctggtgcttgagcagttcttggccattctgccccgcgagatccagagctgggtgcgcgctcaagagcccgagtcaggggaacaagcagtagccgcggtagaggccctggagcgagaaccgggccgcccctggcagtggctcaagcactgtgaggaccccgttgtgattgatgacggtgatagccccctggaccaggagcaagagcaactaccagtagaaccacattcggacctggctaagaaccaggatgcccagcccatcacccttgcgcagtgtctgggcctcccgtctagaccaccgtcccagctgtctggggatcccgtgctacaggacgcctttttacttcaggaggagaatgtgagggacacccagcaggtgaccactcttcagctgcctccccggatcttccagtttaacaatcaccgcagcaatggatatattttagaaatgctcgggagtggggggaaaaaggcccagatcataagtgttctcagccagatctacgtgtcaagagtgtcgccattcaaggatatgattctctgcttcagtgaggaagactggtccttgcttgatccggcacagacaggcttctacggggagttcattatcggcgaggattacggcgtgagtatgccaccgaacgacctagccgctcagcctgatctctcccagggggaggagaacgagcctcgtgtgcctgaactgcaagatttgcagggcaaggaagttcctcaggtgagttacctggattcacctagtctgcagccattccaggtggaggaaaggcgaaaacgtgaggaactgcaggtgcctgaatttcaagcctgcccccagactgtggtgccacagaatacatatccagcaggggggaacccaagaagcctggaaaatagtttggacgaggaggtgactatcgaaattgtgctcagcagcagcggtgatgaagatagccagcatggcccatactgtacggaagagttagggagtcccacagagaaacagcggtccttgcccgcaagccacaggtcgagcacagaagccggcggggaagttcagacatcaaaaaaaagttatgtatgtcccaactgtgggaaaatatttcggtggagggtgaatttcatccgccatctgaggagcagaagggagcaggagaagcctcacgagtgcagcgtctgcggagaacttttctctgacagcgaggacctggacggacatttagagagccatgaggcgcagaaaccatacagatgcggagcttgtggaaagagcttcaggctaaatagccatctgctgtcccacagaagaattcacctgcaacctgacaggctacaacctgtagagaaaagagaacaagctgcaagcgaggatgccgataaagggcccaaggagccactcgagaatgggaaagctaaactgtcttttcagtgctgtgaatgtggaaaagcattccagaggcatgaccatctggcccgccatcggtcacatttccaccttaaggataaagctaggccttttcagtgtcggtactgcgtgaaatccttcacgcagaactatgacctcctgagacatgaaaggctgcatatgaaacgcagaagtaaacaggcacttaacagctattag

SEQ ID NO: 284554 - DNA, 1872 bp, Artificial Sequence
  derived and/or modified sequence
atgcctactgcactttgccccagggtcctggctcctaaggagagcgaagagccccgaaaaatgagatccccaccaggcgagaacccatcaccgcagggggagttgccgtctcccgagtccagcaggcgcctgtttaggagattccgctatcaggaagcagctgggcctcgcgaggccctccagcggttgtgggacctgtgtggcggttggctgcgcccagagaggcatactaaggagcagatcctcgagctgctggttctggagcagttcctagccattctccctcgtgagattcagagttgggtaagagcccaggagcctgaaagtggagagcaggctgtagctgcagtggaggcactggagcgtgagccaggaagaccctggcagtggctgaaacactgcgaggatccggtggtcattgacgacggcgactcgccactggaccaggagcaggagcagctccctgtggaaccccatagcgatctggccaagaaccaggacgcccagccaattaccttggctcaatgcctgggacttccctcaagaccaccctcacagctgtccggggaccccgttctccaggacgcattcctgctacaggaggagaatgtgagagacacccaacaggtcacgaccttgcaactcccccctaggatttttcaatttaacaatcatcggtcgaatgggtatatccttgagatgctgggcagtggcggaaagaaggcacagatcatttcagttcttagccaaatttacgtctcccgggtttcaccattcaaagacatgatcctgtgcttcagcgaagaggactggagcctgctcgatcctgcacagaccggcttctacggcgaatttattataggcgaagactacggtgtgtcgatgcctcctaatgacctggctgcccagcctgatttaagccagggggaggaaaacgagcctcgcgtgcccgagctgcaggatcttcagggtaaggaagtccctcaggtttcttatcttgacagcccgagcctgcagccatttcaggttgaagagagacggaaaagagaggagctgcaggtacctgagtttcaggcctgtccgcagaccgtggtcccccagaacacctaccctgccggaggaaaccctcgaagtctcgaaaacagcctcgacgaggaggtcactatcgaaattgtcttgtccagctcaggcgacgaggatagccaacacggaccttactgcaccgaagaactgggttctccaaccgagaaacagcgttctctcccagcaagtcaccggtcatccaccgaggccggtggagaggtacaaacttccaaaaagagttacgtctgcccaaattgtgggaagatctttaggtggagggtgaactttatcagacatctgagatcgcgacgcgaacaggagaagccacacgaatgcagcgtgtgtggcgagctgttttcggacagtgaagatctcgacggacacctcgagagccacgaggctcagaagccgtaccggtgcggagcctgcgggaaaagttttagacttaatagtcacttactgtcacatagacgaattcacttgcagccagataggctgcagcccgtcgagaagcgcgagcaggcagcctcagaggacgccgacaagggtcccaaggaacccttggaaaatggaaaggccaagctgagttttcagtgttgcgaatgcggtaaggccttccaacggcacgaccatctcgctaggcaccggtcacacttccatttaaaagacaaagctcgacccttccaatgcagatactgtgtcaaatccttcacacagaactatgatctgttgcgacatgaacggctgcacatgaagcggagaagcaaacaagctttaaacagttactag

SEQ ID NO: 284555 - DNA, 2535 bp, Artificial Sequence
  derived and/or modified sequence
ggcccgcgcccggcctccgcggcgccgcctcccagcccagagcccagcgctcaggaaggtgcgggcgggggagaaagcaacaccattgtttttcaggcgcctccatttgcccccgagccgagccgtggctttccggatgatcgggagacgcggtctggacgggccgggaaaggagccgggcgcctgcggagaccccgcctcagcgagtacgcccggccgggcgggctgggaggatgaggacggctgccctggacttccgccgccacaggagggttttcggccggacgccgggagggagctccaggctgtgagctccatttgtaaaggtcttaataacaagaacagtgacttcggctccggagcttcaagatagtggcctgcttggcctgcccatctcggatctctccaggaggacccagccacccaagggtcgtcttctgctgctgacccccatcaaatcccatcatgcccacagccctgtgcccccgagtcttggctccgaaggaaagtgaggagcccaggaaaatgaggagcccacctggagagaaccctagcccccagggggagcttcccagccccgagtcctctcggcgtctcttccgccgtttccgctaccaggaggcggcgggcccccgggaggccctgcagcgcctctgggacctgtgcgggggctggctgcggcctgagaggcacaccaaggagcagattctggagctgctggtgctggagcagttcctggccatcctgccccgggagatccagagctgggtgcgggcgcaggagcctgagagcggagagcaggctgtggccgcggtggaggcactggaacgggagcccgggagaccctggcagtggctcaagcactgtgaagaccctgtggtgattgatgatggggacagccctctggaccaggagcaggagcagctgccggtagagccccacagcgaccttgcaaagaaccaggatgcccagcccataaccctggcacagtgcctggggctcccaagcagaccaccaagccagctcagcggggacccagttctgcaagatgctttccttcttcaggaagagaatgtgcgggacacacagcaggtgaccaccctccagctacccccgagaatttttcaatttaataatcatcgcagcaatggttatattttagaaatgttaggaagtggagggaagaaagcacagataatttcagtcctgtcacagatctacgtgagtcgggtttctccattcaaggacatgattttatgcttctctgaagaggattggtcccttctagatcctgcccagactggcttctatggagagttcatcattggggaggattacggggtctcaatgcctccaaacgacctagctgcccagccagatctctcccagggagaggagaatgagccacgcgttccagagttgcaggatctccagggcaaagaagtgccccaggtctcctacttggactctccaagtctccagccattccaggtagaagaaagaaggaaacgtgaggagctgcaggtgccagagttccaggcctgcccacagacggtggtgcctcaaaacacctacccagctggcggcaacccgcgatctctagagaacagcctggatgaagaagtgaccatcgagatcgttctctccagctctggggacgaggactcccagcatggcccgtactgcacagaagagctggggagccccacagagaagcagcgcagcctccccgcctcccaccggagcagcaccgaggccggaggcgaggtgcagacctccaagaagtcctacgtgtgtccgaactgtgggaaaatcttccgctggagggtcaacttcatccggcatctgcggagccgcagggagcaggagaagccgcacgagtgctcggtgtgcggggagctgttcagcgacagcgaggacctggatgggcacctagagagccacgaggcccagaagccttaccggtgtggtgcctgcgggaagagcttccgcctgaactcccacctgctctcccaccggcggatacacctgcagccggacagactccagccggtggagaagagagagcaggcggcatccgaggacgcggacaagggtcccaaagagccgctggaaaacggcaaggccaaactgagcttccagtgctgtgagtgtgggaaggccttccagcggcacgaccacctggctcggcaccgcagccactttcacctgaaggacaaagcccggcccttccagtgccggtactgcgtcaagagcttcacgcagaactatgacctcctccgccacgagcgcctgcacatgaagcgccgttccaagcaggctctgaactcctactgagcctctccgcctggggcggcctcaccctggctggtgctgccccctcaccttggtactgatcagcgcccccacccaggacataccttccccaggatagagagcacacctccctcctgtccttgctctcaggtagtgagcgttcgggtggtgccatgggagcactctccctcccccaggtaatgaaagagtggccaagtg

SEQ ID NO: 284556 - protein, 452 aa, Artificial Sequence
  derived and/or modified sequence
MDSSVIQRKKVAVIGGGLVGSLQACFLAKRNFQIDVYEAREDTRVATFTRGRSINLALSHRGRQALKAVGLEDQIVSQGIPMRARMIHSLSGKKSAIPYGTKSQYILSVSRENLNKDLLTAAEKYPNVKMHFNHRLLKCNPEEGMITVLGSDKVPKDVTCDLIVGCDGAYSTVRSHLMKKPRFDYSQQYIPHGYMELTIPPKNGDYAMEPNYLHIWPRNTFMMIALPNMNKSFTCTLFMPFEEFEKLLTSNDVVDFFQKYFPDAIPLIGEKLLVQDFFLLPAQPMISVKCSSFHFKSHCVLLGDAAHAIVPFFGQGMNAGFEDCLVFDELMDKFSNDLSLCLPVFSRLRIPDDHAISDLSMYNYIEVTFSRIRYHEAVQRWHWQKKVINKGLFFLGSLIAISSTYLLIHYMSPRSFLRLRRPWNWIAHFRNTTCFPAKAVDSLEQISNLISR

SEQ ID NO: 284557 - protein, 473 aa, Artificial Sequence
  derived and/or modified sequence
MDSSVIQRKKVAVIGGGLVGSLQACFLAKRNFQIDVYEAREDTRVATFTRGRSINLALSHRGRQALKAVGLEDQIVSQGIPMRARMIHSLSGKKSAIPYGTKSQYILSVSRENLNKDLLTAAEKYPNVKMHFNHRLLKCNPEEGMITVLGSDKVPKDVTCDLIVGCDGAYSTVRSHLMKKPRFDYSQQYIPHGYMELTIPPKNGDYAMEPNYLHIWPRNTFMMIALPNMNKSFTCTLFMPFEEFEKLLTSNDVVDFFQKYFPDAIPLIGEKLLVQDFFLLPAQPMISVKCSSFHFKSHCVLLGDAAHAIVPFFGQGMNAGFEDCLVFDELMDKFSNDLSLCLPVFSRLRIPDDHAISDLSMYNYIEKNMERFLHAIMPSTFIPLYTMVTFSRIRYHEAVQRWHWQKKVINKGLFFLGSLIAISSTYLLIHYMSPRSFLRLRRPWNWIAHFRNTTCFPAKAVDSLEQISNLISR

SEQ ID NO: 284558 - DNA, 1359 bp, Artificial Sequence
  derived and/or modified sequence
atggatagttctgtgattcagcggaaaaaggtcgccgtcattggcggtggattagttggctcactccaggcgtgcttccttgccaaaaggaattttcagattgatgtgtacgaggccagggaagatacccgcgtggctactttcacacgcggcagaagtataaaccttgccctttcacatcggggtcgccaagccctgaaggcagtgggactggaagaccagattgtgtcccaaggaatcccaatgagggcccgtatgattcattctctgtcggggaaaaaatccgccattccgtacggaacaaaatcccaatacattttgtctgtaagcagggagaacttgaacaaagatcttctcactgcagcagagaaatacccgaatgtcaagatgcatttcaaccaccggctgctcaaatgcaaccctgaagagggcatgatcacggttctcgggagcgacaaagtgcccaaggacgtgacatgtgatctgatcgtgggatgtgacggcgcctacagcaccgtaagaagccaccttatgaagaaacctaggtttgattattctcaacagtacatcccccacgggtatatggagttaaccatcccaccaaagaacggcgactatgccatggagcccaattatctccacatatggcctagaaatacatttatgatgatagccctcccaaacatgaataaaagtttcacatgcactttgttcatgccgttcgaggagttcgagaagctcctgacctcaaatgacgttgtcgattttttccagaaatactttccagacgccattccgctgatcggagaaaagctgctcgtgcaggatttctttttgttgcccgcccaacctatgatctcagtcaagtgctctagttttcacttcaaatcccactgtgtattgctcggagatgcggcccatgccatcgtgccattcttcggacagggcatgaacgccggattcgaagattgcctggtgttcgatgaattgatggataagttttctaacgacctcagtctttgtcttcccgtgttctcgcgtctgcggatcccagacgatcacgctattagtgatctttctatgtacaactatattgaggtgactttctcacgcatcaggtaccacgaggccgtgcagaggtggcactggcagaagaaggtgatcaataaaggcctcttctttctcggtagcctgatagccatctcgtccacctacctgctgattcactatatgtcgcccaggtccttcttgagactccgccgtccttggaactggatcgctcattttaggaatactacctgcttccccgctaaggctgtggattcccttgaacagatctctaatttgatttcaagatag

SEQ ID NO: 284559 - DNA, 1422 bp, Artificial Sequence
  derived and/or modified sequence
atggattctagcgttatccagcgaaaaaaagtcgccgtgataggtggggggctggtaggtagcctccaggcctgtttcctggccaagagaaacttccagatcgacgtatatgaagccagagaagatactagggtggctacgttcacgcgcggacggtccatcaatctcgccctaagccataggggccgtcaggcactcaaggcagtgggcttagaggatcaaattgtgtctcaagggattcctatgagagccaggatgatccactcactctctggaaagaaatccgccattccctacgggactaagtctcagtatatcctttctgtcagtcgggagaaccttaacaaagatctgctgacagccgcagaaaagtatcctaacgtgaagatgcacttcaaccacagactacttaagtgtaacccagaggaaggcatgattaccgtactcggctccgacaaggtacctaaagatgtcacctgcgacctgattgttgggtgcgacggcgcctatagtaccgttcgaagccatttgatgaagaaaccccgttttgactactcccagcaatacatcccacatggttacatggaacttaccataccccctaagaatggggattacgccatggagcctaactacctgcatatctggcccaggaataccttcatgatgattgctttgcctaacatgaataaaagcttcacgtgtacgctttttatgccttttgaagaattcgaaaaattgctgacaagcaatgacgttgtggacttctttcagaagtacttccccgacgcgatccccctcattggcgagaagctgctggtgcaagacttctttctcctgcccgctcagcccatgatttctgtgaagtgttcttccttccactttaaatctcactgcgtgctgctcggagatgccgcccatgcaattgtcccatttttcggccagggtatgaacgctgggtttgaagactgtctggtttttgacgagctcatggataagtttagcaacgacttgtccctgtgtttgccagtgttctcccggttaagaatacccgacgaccacgctatttctgacctgtctatgtacaactatatcgagaagaacatggaacggttccttcatgcgatcatgcctagtacattcataccactctacacaatggtgacatttagccgaatcaggtatcatgaggccgtacagagatggcactggcagaagaaggtcatcaataaaggactttttttcctgggtagcttaatcgctatctcttctacctaccttctcatacactacatgtccccacgctccttcctcaggctccggaggccttggaactggatcgctcacttccgaaacacaacttgtttcccggctaaggccgtcgacagcctggagcaaatcagcaacctgatctccaggtag

SEQ ID NO: 284560 - DNA, 4888 bp, Artificial Sequence
  derived and/or modified sequence
gacagaagcaacaataattgtgaaaaatacttcagcagttatggactcatctgtcattcaaaggaaaaaagtagctgtcattggtggtggcttggttggctcattacaagcatgctttcttgcaaagaggaatttccagattgatgtatatgaagctagggaagatactcgagtggctaccttcacacgtggaagaagcattaacttagccctttctcatagaggacgacaagccttgaaagctgttggcctggaagatcagattgtatcccaaggtattcccatgagagcaagaatgatccactctctttcaggaaaaaagtctgcaattccctatgggacaaagtctcagtatattctttctgtaagcagagaaaatctaaacaaggatctattgactgctgctgagaaataccccaatgtgaaaatgcactttaaccacaggctgttgaaatgtaatccagaggaaggaatgatcacagtgcttggatctgacaaagttcccaaagatgtcacttgtgacctcattgtaggatgtgatggagcctattcaactgtcagatctcacctgatgaagaaacctcgctttgattacagtcagcagtacattcctcatgggtacatggagttgactattccacctaagaacggagattatgccatggaacctaattatctgcatatttggcctagaaatacctttatgatgattgcacttcctaacatgaacaaatcattcacatgtactttgttcatgccctttgaagagtttgaaaaacttctaaccagtaatgatgtggtagatttcttccagaaatactttccggatgccatccctctaattggagagaaactcctagtgcaagatttcttcctgttgcctgcccagcccatgatatctgtaaagtgctcttcatttcactttaaatctcactgtgtactgctgggagatgcagctcatgctatagtgccgttttttgggcaaggaatgaatgcgggctttgaagactgcttggtatttgatgagttaatggataaattcagtaacgaccttagtttgtgtcttcctgtgttctcaagattgagaatcccagatgatcacgcgatttcagacctatccatgtacaattacatagaggtcactttttccagaataagataccatgaggctgtgcagcgttggcattggcaaaaaaaggtgataaacaaaggactctttttcttgggatcactgatagccatcagcagtacctacctacttatacactacatgtcaccacgatctttcctccgcttgagaagaccatggaactggatagctcacttccggaatacaacatgtttccccgcaaaggccgtggactccctagaacaaatttccaatctcattagcaggtgatagaaaggttttgtggtagcaaatgcatgatttctctgtgaccaaaattaagcatgaaaaaaatgtttccattgccatatttgattcactagtggaagatagtgttctgcttataattaaactgaatgtagagtatctctgtatgttaattgcaattactggttggggggtgcattttaaaagatgaaacatgcagcttccctacattacacacactcaggttgagtcattctaactataaaagtgcaatgactaagatccttcacttctctgaaagtaaggccctagatgcctcagggaagacagtaatcatgccttttctttaaaagacacaataggactcgcaacagcattgactcaacacctaggactaaaaatcacaacttaactagcatgttaactgcacttttcattacgtgaatggaacttacctaaccacagggctcagacttactagataaaaccagaaatggaaataaggaattcaggggagttccagagacttacaaaatgaactcattttattttcccaccttcaaatataagtattatcatctatctgtttatcgtctatctatctatcatctatctatctatctatcatctatctatctatctatctatctatctatctatctatctatctctatttatttatgtatttagagatcaggtctcactctgttgaccaggctggagtgcagtggtgagatctgggttcactgcaacctctgcctcctgggctcaagcaatcctcccacttcagcctcccaaatagctggggctaccatggtatttttcagtagagaccgggtcttgccatgctgcccaggccagtctcaaactcctggcctcatgtgatctgcccacctcagcctcccaaagtacagggattagagttgtgagccaccgctgccagcccagagttaccctctaaagataagaaaaaggctattaatatcatactaagtgaaggacaggaaagggttttattcataaattaaatgtctacatgtgccagaatggaaaggaaacaaggggagacaacttttatagaaatacaaagccattactttattcaatttcagaccctcagaagcaatttactaatttattcttcgactacatactgcagcagaaccagcaatacacttgatttttaaaagcacatttagtgaaatgttttctttggttcatccttctttaacaggctgctgagtcactcagaaatccttcaaacatgattaattatgaagatgaaacactagagtcatataagaaataaaaattgggcaataaaataaaatgattcagtgtttcttttctatattgtcaatgaaaaccttgagttctaataatccatgttcagtttgtagggaaagaaaaaataatttttccttctacccactttaggttccttggctggggcccctataacaaaagacagattgacaagagaaaaacaaacataaatttattagcgggtatatgtaatatatatgtgggaaatacaggggaatgagcaaatctcaaagagctggcgtcttagaactccctggcttatatagcatcgacaaagaacagtaaatttttagagaaacaacaaaacaaagaaaaagagctttgagtctgtaggggcagcaatttgggggaagcaaatatatgggagtttgccttgtagattcctctggtgctggtctccaggctgacaaggattcaaagttgtctctgaaactcctctttgtcatactgcacatataaaacgtcttttgtttccaacaagaggattttctttttcattctagaattatctccttgataacttgatcagatataggacatgacactgaatagagtccaacagtacaaaaaaaattcagtatgttctagctacttcacacatgtgtacgcgacagttatttttacagtaaggtattttcgagaaaaatgcattacgtgttttggaaaatagagtaatttaaaaaatatatttgaaatgaaaatctccaacacattagaagatgatgatgttagatgcccatcgtgtgccacaagtggttttttcattatgtaaagcacccgttgaattaaaagaatttgtttttgttcaacctcttcctgaggcccaagagcatatgggcaattcggatttcctgctggaccacaaggttctgttgatattacatagaacgggtattccagacacttcttatgatgaaagtccaaaagtggcatccaatttaaggccccatctttcgttgccattcttcattcctacaaaggacgaacttggattacatcaactttggacccattggttttgtcgctgtcgtcaactgacagtgattcatcactggtgatgataaaaatgatggaagaagagttgaaagtcacttttttctttggcctgtccccatctttctgtgacatcacaatgggtctgatctgcatttcacttccagctgctggtaggtctttagcaggcctctggcacctcagcagtcggaggcacagaagctgcaaaagggatcttcgaaactgggcagagaaaaaataaagtggaatattaagtaaaagttgggcactaatctggattaacattcgaggaaatcagttgagctgaatttaagttgttttttgtttgttagcaggtgtggatgtggggttatgtggtcatgctcagatctacctaaatcaccccagagctttatgtcttttattcattctaattcttattaaccggaatatgtaggaccatttcaataccttgtaatcctccaagcttcaatctgcacacactttctatgagggcaggtacaactattaagagattttgaacattaagttagtccacaaatattcagtgggcatctactaggtgacagccactgtgctataattagagactttttactataagcatcaaaaacagataaggctcttcctggcagagtttacagcctggtgtacttgctaatgtctctttaattaggtgaagaattttttttttctatcgaaattactaatcagttggggaaaaaaatactatagcagacagcactaatgtcatcaacaaacattgttcttctccgtgtcctgggtacaacatcgaataatatttcttggcctcctttccgcttctcctctctgctgttcctctctacaagaacctgggaggccaacgcctaaagatcataatatcacacaatggaaggaacctagattcctaaatgactgcataggacagatcccatctcctccacccaatacattattagactgaactgtgacctgaaatgagcaataaactctgtattaattcactgaaatgttggggttgcttgttatagtagtcggtccatcatgaccagtaaaacataaatcaaaagttaatgtaattgttatcccattatttagagcgaaataaatgttgaatatatggactttctcagattaggaaataccaattaaaaatataataaatagcta

SEQ ID NO: 284561 - DNA, 1868 bp, Artificial Sequence
  derived and/or modified sequence
gcttaaaaatttctgtgtcttacacagaagatagaaaaaatagagtgtctccaattggatggattttttaaaaaatttggttattgtaatggatttattttttcttagagctgagctgattgtactttggccaactaatgggttaatactgtcaagggaaattagccctgactaaacattgccgctggctcatgaatgcactaggcttggggcagtataaaaactcagagaaatcagtgtgtaggagacacagaaatcagtgtcactcagtgacagaagcaacaataattgtgaaaaatacttcagcagttatggactcatctgtcattcaaaggaaaaaagtagctgtcattggtggtggcttggttggctcattacaagcatgctttcttgcaaagaggaatttccagattgatgtatatgaagctagggaagatactcgagtggctaccttcacacgtggaagaagcattaacttagccctttctcatagaggacgacaagccttgaaagctgttggcctggaagatcagattgtatcccaaggtattcccatgagagcaagaatgatccactctctttcaggaaaaaagtctgcaattccctatgggacaaagtctcagtatattctttctgtaagcagagaaaatctaaacaaggatctattgactgctgctgagaaataccccaatgtgaaaatgcactttaaccacaggctgttgaaatgtaatccagaggaaggaatgatcacagtgcttggatctgacaaagttcccaaagatgtcacttgtgacctcattgtaggatgtgatggagcctattcaactgtcagatctcacctgatgaagaaacctcgctttgattacagtcagcagtacattcctcatgggtacatggagttgactattccacctaagaacggagattatgccatggaacctaattatctgcatatttggcctagaaatacctttatgatgattgcacttcctaacatgaacaaatcattcacatgtactttgttcatgccctttgaagagtttgaaaaacttctaaccagtaatgatgtggtagatttcttccagaaatactttccggatgccatccctctaattggagagaaactcctagtgcaagatttcttcctgttgcctgcccagcccatgatatctgtaaagtgctcttcatttcactttaaatctcactgtgtactgctgggagatgcagctcatgctatagtgccgttttttgggcaaggaatgaatgcgggctttgaagactgcttggtatttgatgagttaatggataaattcagtaacgaccttagtttgtgtcttcctgtgttctcaagattgagaatcccagatgatcacgcgatttcagacctatccatgtacaattacatagagaagaacatggagagatttcttcatgcgattatgccatcgacctttatccctctctatacaatggtcactttttccagaataagataccatgaggctgtgcagcgttggcattggcaaaaaaaggtgataaacaaaggactctttttcttgggatcactgatagccatcagcagtacctacctacttatacactacatgtcaccacgatctttcctccgcttgagaagaccatggaactggatagctcacttccggaatacaacatgtttccccgcaaaggccgtggactccctagaacaaatttccaatctcattagcaggtgatagaaaggttttgtggtagcaaatgcatgatttctctgtgaccaaaattaagcatgaaaaaaatgtttccattgccatatttgattcactagtggaagatagtgttctgcttataattaaactgaatgtagagta

SEQ ID NO: 284562 - DNA, 5261 bp, Artificial Sequence
  derived and/or modified sequence
gcttaaaaatttctgtgtcttacacagaagatagaaaaaatagagtgtctccaattggatggattttttaaaaaatttggttattgtaatggatttattttttcttagagctgagctgattgtactttggccaactaatgggttaatactgtcaagggaaattagccctgactaaacattgccgctggctcatgaatgcactaggcttggggcagtataaaaactcagagaaatcagtgtgtaggagacacagaaatcagtgtcactcagtgacagaagcaacaataattgtgaaaaatacttcagcagttatggactcatctgtcattcaaaggaaaaaagtagctgtcattggtggtggcttggttggctcattacaagcatgctttcttgcaaagaggaatttccagattgatgtatatgaagctagggaagatactcgagtggctaccttcacacgtggaagaagcattaacttagccctttctcatagaggacgacaagccttgaaagctgttggcctggaagatcagattgtatcccaaggtattcccatgagagcaagaatgatccactctctttcaggaaaaaagtctgcaattccctatgggacaaagtctcagtatattctttctgtaagcagagaaaatctaaacaaggatctattgactgctgctgagaaataccccaatgtgaaaatgcactttaaccacaggctgttgaaatgtaatccagaggaaggaatgatcacagtgcttggatctgacaaagttcccaaagatgtcacttgtgacctcattgtaggatgtgatggagcctattcaactgtcagatctcacctgatgaagaaacctcgctttgattacagtcagcagtacattcctcatgggtacatggagttgactattccacctaagaacggagattatgccatggaacctaattatctgcatatttggcctagaaatacctttatgatgattgcacttcctaacatgaacaaatcattcacatgtactttgttcatgccctttgaagagtttgaaaaacttctaaccagtaatgatgtggtagatttcttccagaaatactttccggatgccatccctctaattggagagaaactcctagtgcaagatttcttcctgttgcctgcccagcccatgatatctgtaaagtgctcttcatttcactttaaatctcactgtgtactgctgggagatgcagctcatgctatagtgccgttttttgggcaaggaatgaatgcgggctttgaagactgcttggtatttgatgagttaatggataaattcagtaacgaccttagtttgtgtcttcctgtgttctcaagattgagaatcccagatgatcacgcgatttcagacctatccatgtacaattacatagagatgcgagcacatgtcaactcaagctggttcatttttcagaagaacatggagagatttcttcatgcgattatgccatcgacctttatccctctctatacaatggtcactttttccagaataagataccatgaggctgtgcagcgttggcattggcaaaaaaaggtgataaacaaaggactctttttcttgggatcactgatagccatcagcagtacctacctacttatacactacatgtcaccacgatctttcctccgcttgagaagaccatggaactggatagctcacttccggaatacaacatgtttccccgcaaaggccgtggactccctagaacaaatttccaatctcattagcaggtgatagaaaggttttgtggtagcaaatgcatgatttctctgtgaccaaaattaagcatgaaaaaaatgtttccattgccatatttgattcactagtggaagatagtgttctgcttataattaaactgaatgtagagtatctctgtatgttaattgcaattactggttggggggtgcattttaaaagatgaaacatgcagcttccctacattacacacactcaggttgagtcattctaactataaaagtgcaatgactaagatccttcacttctctgaaagtaaggccctagatgcctcagggaagacagtaatcatgccttttctttaaaagacacaataggactcgcaacagcattgactcaacacctaggactaaaaatcacaacttaactagcatgttaactgcacttttcattacgtgaatggaacttacctaaccacagggctcagacttactagataaaaccagaaatggaaataaggaattcaggggagttccagagacttacaaaatgaactcattttattttcccaccttcaaatataagtattatcatctatctgtttatcgtctatctatctatcatctatctatctatctatcatctatctatctatctatctatctatctatctatctatctatctctatttatttatgtatttagagatcaggtctcactctgttgaccaggctggagtgcagtggtgagatctgggttcactgcaacctctgcctcctgggctcaagcaatcctcccacttcagcctcccaaatagctggggctaccatggtatttttcagtagagaccgggtcttgccatgctgcccaggccagtctcaaactcctggcctcatgtgatctgcccacctcagcctcccaaagtacagggattagagttgtgagccaccgctgccagcccagagttaccctctaaagataagaaaaaggctattaatatcatactaagtgaaggacaggaaagggttttattcataaattaaatgtctacatgtgccagaatggaaaggaaacaaggggagacaacttttatagaaatacaaagccattactttattcaatttcagaccctcagaagcaatttactaatttattcttcgactacatactgcagcagaaccagcaatacacttgatttttaaaagcacatttagtgaaatgttttctttggttcatccttctttaacaggctgctgagtcactcagaaatccttcaaacatgattaattatgaagatgaaacactagagtcatataagaaataaaaattgggcaataaaataaaatgattcagtgtttcttttctatattgtcaatgaaaaccttgagttctaataatccatgttcagtttgtagggaaagaaaaaataatttttccttctacccactttaggttccttggctggggcccctataacaaaagacagattgacaagagaaaaacaaacataaatttattagcgggtatatgtaatatatatgtgggaaatacaggggaatgagcaaatctcaaagagctggcgtcttagaactccctggcttatatagcatcgacaaagaacagtaaatttttagagaaacaacaaaacaaagaaaaagagctttgagtctgtaggggcagcaatttgggggaagcaaatatatgggagtttgccttgtagattcctctggtgctggtctccaggctgacaaggattcaaagttgtctctgaaactcctctttgtcatactgcacatataaaacgtcttttgtttccaacaagaggattttctttttcattctagaattatctccttgataacttgatcagatataggacatgacactgaatagagtccaacagtacaaaaaaaattcagtatgttctagctacttcacacatgtgtacgcgacagttatttttacagtaaggtattttcgagaaaaatgcattacgtgttttggaaaatagagtaatttaaaaaatatatttgaaatgaaaatctccaacacattagaagatgatgatgttagatgcccatcgtgtgccacaagtggttttttcattatgtaaagcacccgttgaattaaaagaatttgtttttgttcaacctcttcctgaggcccaagagcatatgggcaattcggatttcctgctggaccacaaggttctgttgatattacatagaacgggtattccagacacttcttatgatgaaagtccaaaagtggcatccaatttaaggccccatctttcgttgccattcttcattcctacaaaggacgaacttggattacatcaactttggacccattggttttgtcgctgtcgtcaactgacagtgattcatcactggtgatgataaaaatgatggaagaagagttgaaagtcacttttttctttggcctgtccccatctttctgtgacatcacaatgggtctgatctgcatttcacttccagctgctggtaggtctttagcaggcctctggcacctcagcagtcggaggcacagaagctgcaaaagggatcttcgaaactgggcagagaaaaaataaagtggaatattaagtaaaagttgggcactaatctggattaacattcgaggaaatcagttgagctgaatttaagttgttttttgtttgttagcaggtgtggatgtggggttatgtggtcatgctcagatctacctaaatcaccccagagctttatgtcttttattcattctaattcttattaaccggaatatgtaggaccatttcaataccttgtaatcctccaagcttcaatctgcacacactttctatgagggcaggtacaactattaagagattttgaacattaagttagtccacaaatattcagtgggcatctactaggtgacagccactgtgctataattagagactttttactataagcatcaaaaacagataaggctcttcctggcagagtttacagcctggtgtacttgctaatgtctctttaattaggtgaagaattttttttttctatcgaaattactaatcagttggggaaaaaaatactatagcagacagcactaatgtcatcaacaaacattgttcttctccgtgtcctgggtacaacatcgaataatatttcttggcctcctttccgcttctcctctctgctgttcctctctacaagaacctgggaggccaacgcctaaagatcataatatcacacaatggaaggaacctagattcctaaatgactgcataggacagatcccatctcctccacccaatacattattagactgaactgtgacctgaaatgagcaataaactctgtattaattcactgaaatgttggggttgcttgttatagtagtcggtccatcatgaccagtaaaacataaatcaaaagttaatgtaattgttatcccattatttagagcgaaataaatgttgaatatatggactttctcagattaggaaataccaattaaaaatataataaatagcta

SEQ ID NO: 284563 - DNA, 1359 bp, Artificial Sequence
  derived and/or modified sequence
atggacagcagcgtcatccagaggaagaaggtggccgtcatcggcggcggcctggtgggcagcctgcaggcctgcttcctggccaagaggaacttccagattgatgtgtatgaggcccgggaggacaccagggtggccaccttcacccggggccgcagcatcaacctggccctgagccaccggggccggcaggccctgaaggctgtgggcctggaggaccagatcgtgtcccagggcatccccatgagggccaggatgatccacagcctgagcggcaagaagagcgccatcccctacggcaccaagagccagtacatcctgtctgtgtcccgggagaacctgaacaaggacctgctgacagctgctgagaagtacccaaatgtgaagatgcacttcaaccaccggctgctgaagtgcaaccctgaggagggcatgatcaccgtgctgggcagtgacaaggtgcccaaggatgtgacctgtgacctgattgtgggctgtgatggagcctacagcacagtgcgcagccacctgatgaagaagcccaggtttgactacagccagcagtacatcccccacggctacatggagctgaccatcccccccaagaatggagactatgccatggagcccaactacctgcacatctggcccaggaacaccttcatgatgattgccctgcccaacatgaacaagagcttcacctgcaccctcttcatgccctttgaggagtttgagaagctgctgaccagcaatgatgtggtggacttcttccagaagtacttcccagatgccatccccctcatcggggagaagctgctggtgcaggacttcttcctgctgcctgcccagcccatgatctctgtgaagtgcagcagcttccacttcaagagccactgtgtgctgctgggagatgctgcccacgccatcgtgcccttcttcggccagggcatgaatgccggctttgaggactgcctggtgtttgatgagctgatggacaagttcagcaatgacctgagcctgtgcctgcctgtgttcagccggctgcgcatcccagatgaccacgccatcagtgacctgtccatgtacaactacatcgaggtgaccttcagccgcatccgctaccatgaagctgtgcagcgctggcactggcagaagaaggtgatcaacaagggcctcttcttcctgggcagcctgattgccatcagcagcacctacctgctgatccactacatgagccccaggagcttcctgcggctgcggcggccctggaactggatcgcccacttcaggaacaccacctgcttccctgccaaggctgtggacagcctggagcagatcagcaacctgatcagcaggtag

SEQ ID NO: 284564 - DNA, 1422 bp, Artificial Sequence
  derived and/or modified sequence
atggacagcagcgtcatccagaggaagaaggtggccgtcatcggcggcggcctggtgggcagcctgcaggcctgcttcctggccaagaggaacttccagattgatgtgtatgaggcccgggaggacaccagggtggccaccttcacccggggccgcagcatcaacctggccctgagccaccggggccggcaggccctgaaggctgtgggcctggaggaccagatcgtgtcccagggcatccccatgagggccaggatgatccacagcctgagcggcaagaagagcgccatcccctacggcaccaagagccagtacatcctgtctgtgtcccgggagaacctgaacaaggacctgctgacagctgctgagaagtacccaaatgtgaagatgcacttcaaccaccggctgctgaagtgcaaccctgaggagggcatgatcaccgtgctgggcagtgacaaggtgcccaaggatgtgacctgtgacctgattgtgggctgtgatggagcctacagcacagtgcgcagccacctgatgaagaagcccaggtttgactacagccagcagtacatcccccacggctacatggagctgaccatcccccccaagaatggagactatgccatggagcccaactacctgcacatctggcccaggaacaccttcatgatgattgccctgcccaacatgaacaagagcttcacctgcaccctcttcatgccctttgaggagtttgagaagctgctgaccagcaatgatgtggtggacttcttccagaagtacttcccagatgccatccccctcatcggggagaagctgctggtgcaggacttcttcctgctgcctgcccagcccatgatctctgtgaagtgcagcagcttccacttcaagagccactgtgtgctgctgggagatgctgcccacgccatcgtgcccttcttcggccagggcatgaatgccggctttgaggactgcctggtgtttgatgagctgatggacaagttcagcaatgacctgagcctgtgcctgcctgtgttcagccggctgcgcatcccagatgaccacgccatcagtgacctgtccatgtacaactacatcgagaagaacatggagcgcttcctgcacgccatcatgcccagcaccttcatccccctgtacaccatggtgaccttcagccgcatccgctaccacgaggccgtgcagcgctggcactggcagaagaaggtgatcaacaagggcctcttcttcctgggcagcctcatcgccatcagcagcacctacctgctgatccactacatgagccccaggagcttcctgcggctgcggcggccctggaactggatcgcccacttcaggaacaccacctgcttccctgccaaggctgtggacagcctggagcagatcagcaacctgatcagcaggtag

SEQ ID NO: 284565 - DNA, 1359 bp, Artificial Sequence
  derived and/or modified sequence
atggacagcagcgtgatccagcggaagaaggtggccgtgatcggcggtggactggtcggttcactgcaggcttgtttccttgctaaaaggaacttccagattgacgtgtatgaggcaagggaggacactcgggtcgccacattcacccggggtcgaagcattaacctggcactcagtcatcgcgggaggcaggcacttaaagccgtaggcttggaggatcagatcgtttcacagggcattccaatgagagcacgtatgatccacagcctgagtggcaaaaagagtgccatcccctatggcaccaaaagccagtatatactctctgtttccagggaaaatctgaacaaagacttgcttacagctgcagagaaatatcccaatgttaagatgcattttaaccacagactgctgaagtgtaatccagaagagggtatgattaccgtactgggcagtgacaaggtgcctaaagacgtaacttgcgacctaattgttggctgcgatggagcttactccacagttaggagccacctcatgaagaagcctcgattcgattacagccagcagtatattcctcatggctacatggaactgacaatcccccccaagaacggagactacgcaatggagcctaactacctgcacatctggccaaggaatacgttcatgatgattgctttgccaaacatgaacaagagtttcacatgcacgttgtttatgccattcgaggagtttgaaaaacttttaacctctaatgacgtggttgatttttttcagaaatacttcccagacgctattccactaataggggaaaagctgctcgtccaggatttctttcttctgcccgctcagcctatgatttcagtgaaatgcagctcgtttcatttcaaatcccactgtgtgctccttggagatgctgcccatgccatcgtgcctttttttgggcaggggatgaatgcgggttttgaagattgcttggtgtttgacgaattgatggataagttcagcaacgacctaagcttgtgtcttccggtgttctctaggctccgcatcccagacgaccacgcaatatcagatctctcaatgtacaactacatcgaggttacattctcccgaattcgctaccacgaagcagtgcaacggtggcattggcagaagaaggtaattaataagggtctcttctttctgggatctcttattgcgatcagctccacttacctactgatacattatatgtcaccccgctcttttctgaggttacggcgtccctggaattggatcgcacattttaggaataccacttgttttccggcaaaagctgtggacagcttggagcagatttccaacctgataagcagatag

SEQ ID NO: 284566 - DNA, 1422 bp, Artificial Sequence
  derived and/or modified sequence
atggacagcagcgtgatccagcggaagaaggtggccgtgatcggcggcggtttagtgggctccttacaggcatgctttctagccaagaggaacttccagattgacgtgtacgaggcccgagaagacacaagggtcgccacctttacaaggggccgatccattaatctcgcactgagtcatcgcgggcgtcaagctctgaaggccgtgggccttgaagatcagattgtgtcccagggcatccccatgcgggcccggatgatccactccctgagcggaaagaagtcggcgatcccgtatggaacaaagagtcagtacatactgtctgtgtctcgcgagaacctgaacaaagacttactgaccgccgcagagaagtatccgaatgtgaaaatgcactttaatcatcgcttgttgaaatgtaaccctgaggaaggcatgattacggttctgggctcggacaaggtccctaaggacgtcacttgcgaccttattgtggggtgcgatggcgcctattccacagtcagatcacacctgatgaagaagcctaggtttgactattctcagcagtacattccgcatggctatatggagctgactatacccccaaagaacggcgattatgctatggaaccgaactatctgcacatctggcctcgtaacaccttcatgatgattgcattaccaaatatgaacaagagctttacctgcacacttttcatgccattcgaggagttcgagaaattactcacctccaatgacgtcgtggacttctttcagaagtattttcctgatgctatccctctaatcggggagaaactcctagtgcaggacttttttctgctcccggcccagccaatgatcagtgtaaagtgcagcagctttcacttcaaatctcattgcgttctgctgggcgacgccgcccatgccattgtacccttcttcgggcagggcatgaatgccgggttcgaagattgcctggtatttgacgagctcatggacaagttcagtaatgacctttctctgtgcttgccagttttcagccggttgagaatccctgatgaccatgcaattagcgatctctcgatgtataactacatcgagaaaaatatggaacggttcctccacgctattatgcccagtacttttatccccttatacaccatggtcactttttctagaatcaggtaccacgaggctgttcagagatggcattggcagaagaaggtgattaataagggccttttcttcctaggcagcttaattgcgattagctccacttatctccttattcattacatgtctccaaggtccttcttgagattgcggcgaccttggaattggatagcgcactttaggaataccacctgttttcctgccaaggccgtggacagcctcgagcagatctccaatctcataagcagatag

SEQ ID NO: 284567 - DNA, 1359 bp, Artificial Sequence
  derived and/or modified sequence
atggattcctctgtgatccaacgaaagaaagttgccgtaatcggaggaggccttgttggctccctgcaggcatgttttctcgctaaaaggaatttccagattgatgtctacgaggctcgggaggatactagggtggccaccttcacacggggacgcagtattaacctggctttgtcccacaggggcaggcaggcacttaaggccgtgggtctggaggaccagatcgtttctcaggggattcccatgcgggctcgaatgattcatagcctcagtggcaagaaaagcgctattccctatggcacgaagagccaatacatcctgagcgtcagccgcgaaaaccttaataaggacctacttacggccgcagagaagtaccccaatgtcaaaatgcatttcaatcatcgtcttcttaagtgtaatccagaggaagggatgattactgtgctggggtccgacaaagtccccaaggacgtgacctgtgatctcattgtgggctgcgatggcgcatactccaccgtgagatcacacctgatgaagaagccgcgatttgattattcacagcagtatattcctcacggatacatggaattgactatccctcctaaaaatggggattacgccatggagccgaactatttgcacatatggccgcgtaacacattcatgatgattgcgcttcccaatatgaataaaagcttcacttgcaccctgtttatgccctttgaggagttcgaaaagctactcacgtcgaacgacgtcgtggacttttttcaaaagtacttccctgatgccataccactcattggggaaaagctgctggtccaggatttcttcctgctgccagcgcagccgatgatcagcgtgaagtgctccagtttccattttaagagccattgcgtgttgctgggcgatgcagcccacgctatcgtgccgttctttggacaaggcatgaacgccggtttcgaagactgcctcgtgtttgacgagctgatggataaatttagtaatgaccttagcttatgcctcccagtcttttccaggctcagaatccctgatgatcatgccatcagcgatctgtctatgtacaattacatcgaggtgaccttttccagaatccgctaccacgaggcagtgcagagatggcactggcagaagaaagttatcaataagggcctgttcttcttaggaagccttattgcgatttcttccacctacttactgatacattacatgtcgccacgttctttcctcagactcagacggccttggaattggattgcacatttcaggaacactacctgctttccagcaaaagccgtagacagtttagaacagatttccaatctgatatcacgatag

SEQ ID NO: 284568 - DNA, 1422 bp, Artificial Sequence
  derived and/or modified sequence
atggactcttccgtgatccagaggaagaaagtggccgtcatcggcggaggacttgttggcagcctccaggcctgctttctggccaaacgaaatttccaaattgacgtgtatgaggcgagggaggataccagagtggcaacgtttacacgcggacgatccattaacctggcactgtcccaccgaggaaggcaggctctaaaggccgtgggactcgaggatcagatagtctcccagggaatcccaatgcgggctcgtatgattcatagtttgtccgggaagaaaagcgcgataccctacggcactaagagtcagtatatactgtccgtctcaagagagaacctcaacaaggacctcttgactgcagccgagaaatatcccaatgtgaagatgcactttaaccatcggctgctgaaatgtaatcctgaagaggggatgatcactgtgctcgggtcagacaaagtcccgaaggatgtcacctgcgacctcatagtaggatgtgatggtgcctatagcaccgtcagatcacacttaatgaagaagccacgatttgactacagccagcagtacattccacacgggtacatggaactgacgatacccccaaaaaacggtgactacgccatggaaccgaactacctccacatctggccaaggaatacctttatgatgatcgcactacctaacatgaataaatcctttacctgtacgctcttcatgcctttcgaggagtttgaaaagctgctcaccagcaacgacgtagtggactttttccagaagtacttcccggacgcgattccactcatcggagagaagttgctggtgcaggatttcttcctcctcccggctcaacctatgatcagtgtcaaatgctcctccttccactttaagtctcactgtgttttactgggagacgctgcccatgccattgtacccttcttcggacaggggatgaacgctggatttgaagactgcctggtgttcgacgagctgatggacaagttttcaaacgacctgagcctttgtttgccagtctttagccggctaagaatccccgatgaccacgcgattagcgacctaagtatgtacaattacatcgaaaaaaacatggagaggttcctgcatgccatcatgccatctacatttattccactgtacacgatggtcaccttttccaggatcagataccatgaagctgtgcagcgctggcactggcaaaagaaggtgataaacaagggattattcttcctgggctcactgatcgctattagctccacatatctgctcattcattacatgagcccccgtagcttcctcagactgagaagaccgtggaactggattgctcactttcgtaacactacttgtttcccagccaaagctgtggattccctcgagcagatatcgaatcttatctcacgttag

SEQ ID NO: 284569 - DNA, 1359 bp, Artificial Sequence
  derived and/or modified sequence
atggacagcagcgtgatccagagaaagaaggtggccgtgatcggcggcggcctggtgggcagcctgcaggcctgcttcctggccaagagaaacttccagatcgacgtgtacgaggccagagaggacaccagagtggccaccttcaccagaggcagaagcatcaacctggccctgagccacagaggcagacaggccctgaaggccgtgggcctggaggaccagatcgtgagccagggcatccccatgagagccagaatgatccacagcctgagcggcaagaagagcgccatcccctacggcaccaagagccagtacatcctgagcgtgagcagagagaacctgaacaaggacctgctgaccgccgccgagaagtaccccaacgtgaagatgcacttcaaccacagactgctgaagtgcaaccccgaggagggcatgatcaccgtgctgggcagcgacaaggtgcccaaggacgtgacctgcgacctgatcgtgggctgcgacggcgcctacagcaccgtgagaagccacctgatgaagaagcccagattcgactacagccagcagtacatcccccacggctacatggagctgaccatcccccccaagaacggcgactacgccatggagcccaactacctgcacatctggcccagaaacaccttcatgatgatcgccctgcccaacatgaacaagagcttcacctgcaccctgttcatgcccttcgaggagttcgagaagctgctgaccagcaacgacgtggtggacttcttccagaagtacttccccgacgccatccccctgatcggcgagaagctgctggtgcaggacttcttcctgctgcccgcccagcccatgatcagcgtgaagtgcagcagcttccacttcaagagccactgcgtgctgctgggcgacgccgcccacgccatcgtgcccttcttcggccagggcatgaacgccggcttcgaggactgcctggtgttcgacgagctgatggacaagttcagcaacgacctgagcctgtgcctgcccgtgttcagcagactgagaatccccgacgaccacgccatcagcgacctgagcatgtacaactacatcgaggtgaccttcagcagaatcagataccacgaggccgtgcagagatggcactggcagaagaaggtgatcaacaagggcctgttcttcctgggcagcctgatcgccatcagcagcacctacctgctgatccactacatgagccccagaagcttcctgagactgagaagaccctggaactggatcgcccacttcagaaacaccacctgcttccccgccaaggccgtggacagcctggagcagatcagcaacctgatcagcagatag

SEQ ID NO: 284570 - DNA, 1422 bp, Artificial Sequence
  derived and/or modified sequence
atggacagcagcgtgatccagagaaagaaggtggccgtgatcggcggcggcctggtgggcagcctgcaggcctgcttcctggccaagagaaacttccagatcgacgtgtacgaggccagagaggacaccagagtggccaccttcaccagaggcagaagcatcaacctggccctgagccacagaggcagacaggccctgaaggccgtgggcctggaggaccagatcgtgagccagggcatccccatgagagccagaatgatccacagcctgagcggcaagaagagcgccatcccctacggcaccaagagccagtacatcctgagcgtgagcagagagaacctgaacaaggacctgctgaccgccgccgagaagtaccccaacgtgaagatgcacttcaaccacagactgctgaagtgcaaccccgaggagggcatgatcaccgtgctgggcagcgacaaggtgcccaaggacgtgacctgcgacctgatcgtgggctgcgacggcgcctacagcaccgtgagaagccacctgatgaagaagcccagattcgactacagccagcagtacatcccccacggctacatggagctgaccatcccccccaagaacggcgactacgccatggagcccaactacctgcacatctggcccagaaacaccttcatgatgatcgccctgcccaacatgaacaagagcttcacctgcaccctgttcatgcccttcgaggagttcgagaagctgctgaccagcaacgacgtggtggacttcttccagaagtacttccccgacgccatccccctgatcggcgagaagctgctggtgcaggacttcttcctgctgcccgcccagcccatgatcagcgtgaagtgcagcagcttccacttcaagagccactgcgtgctgctgggcgacgccgcccacgccatcgtgcccttcttcggccagggcatgaacgccggcttcgaggactgcctggtgttcgacgagctgatggacaagttcagcaacgacctgagcctgtgcctgcccgtgttcagcagactgagaatccccgacgaccacgccatcagcgacctgagcatgtacaactacatcgagaagaacatggagagattcctgcacgccatcatgcccagcaccttcatccccctgtacaccatggtgaccttcagcagaatcagataccacgaggccgtgcagagatggcactggcagaagaaggtgatcaacaagggcctgttcttcctgggcagcctgatcgccatcagcagcacctacctgctgatccactacatgagccccagaagcttcctgagactgagaagaccctggaactggatcgcccacttcagaaacaccacctgcttccccgccaaggccgtggacagcctggagcagatcagcaacctgatcagcagatag

SEQ ID NO: 284571 - DNA, 549 bp, Artificial Sequence
  derived and/or modified sequence
taaggaatgaacgcaggattcgaagattgtttagtttttgacgaactcatggataagttctctaatgacctgtctctgtgtttgccggtgttttctcgcctacgtattccggatgaccatgctattagcgacctgagcatgtataattatattgagatgagagctcatgtgaacagctcttggtttatcttccaaaagaatatggagcggttccttcatgccattatgccctccaccttcattcctctctatacgatggtcaccttttcaagaattcgctaccatgaggcagtgcagcggtggcactggcagaagaaagtgattaacaaaggacttttttttctgggaagcctcattgctatctcgtccacctacctacttatccattacatgagcccacgttcctttttaagattaaggaggccctggaattggattgcccattttaggaacacgacctgcttccctgctaaagccgtcgacagcttggagcagatttcaaatttgatcagccggttattaagccactccgaaattcttcagacttag

SEQ ID NO: 284572 - DNA, 609 bp, Artificial Sequence
  derived and/or modified sequence
aggaatgaatgcgggctttgaagactgcttggtatttgatgagttaatggataaattcagtaacgaccttagtttgtgtcttcctgtgttctcaagattgagaatcccagatgatcacgcgatttcagacctatccatgtacaattacatagagatgcgagcacatgtcaactcaagctggttcatttttcagaagaacatggagagatttcttcatgcgattatgccatcgacctttatccctctctatacaatggtcactttttccagaataagataccatgaggctgtgcagcgttggcattggcaaaaaaaggtgataaacaaaggactctttttcttgggatcactgatagccatcagcagtacctacctacttatacactacatgtcaccacgatctttcctccgcttgagaagaccatggaactggatagctcacttccggaatacaacatgtttccccgcaaaggccgtggactccctagaacaaatttccaatctcattagcaggctgctgagtcactcagaaatccttcaaacatgattaattatgaagatgaaacactagagtcatataagaaataaaaattgggcaataaaataaaa

SEQ ID NO: 284573 - DNA, 549 bp, Artificial Sequence
  derived and/or modified sequence
tgaggcatgaatgccggctttgaggactgcctggtgtttgatgagctgatggacaagttcagcaatgacctgagcctgtgcctgcctgtgttcagccggctgcgcatcccagatgaccacgccatcagtgacctgtccatgtacaactacatcgagatgagggcccacgtgaacagctcctggttcatcttccagaagaacatggagcgcttcctgcacgccatcatgcccagcaccttcatccccctgtacaccatggtgaccttcagccgcatccgctaccatgaagctgtgcagcgctggcactggcagaagaaggtgatcaacaagggcctcttcttcctgggcagcctgattgccatcagcagcacctacctgctgatccactacatgagccccaggagcttcctgcggctgcggcggccctggaactggatcgcccacttcaggaacaccacctgcttccctgccaaggctgtggacagcctggagcagatcagcaacctgatcagccggctgctgagccacagcgagatcctgcagacctag

SEQ ID NO: 284574 - DNA, 549 bp, Artificial Sequence
  derived and/or modified sequence
tgaggcatgaacgccggcttcgaggactgcctggtgttcgacgagctgatggataaattcagcaacgatctgagtctgtgcctgccagtatttagccgcctgcgcatacccgacgatcacgccatctccgatctgagcatgtataactacattgagatgagagcccacgttaatagtagctggtttattttccaaaaaaacatggagcgcttcttgcacgcaatcatgccatccaccttcatacctctgtacactatggtcacattctcgcggatccgttaccacgaggctgtgcaacggtggcactggcagaagaaggtgattaacaaggggttgttctttctgggctctctcatcgccatttcaagtacctatctcttaatccactacatgagccctaggagcttcctccggctgcgccggccctggaattggatcgctcactttaggaacaccacttgctttcctgctaaggctgtagactctctagaacagatctctaatctcatcagcagattgctaagccactccgaaatcctgcagacatag

SEQ ID NO: 284575 - DNA, 549 bp, Artificial Sequence
  derived and/or modified sequence
tagggaatgaacgcgggtttcgaggactgcctagtctttgacgagcttatggacaagttcagcaatgacctgagcctgtgtcttccggtgttcagtcgtctgcgcatacccgacgaccacgctatctcagacctttcaatgtataattatattgaaatgagggcccacgtcaatagctcatggttcatcttccagaaaaatatggagcgttttttacacgccatcatgccaagtacctttattccactgtacaccatggttacttttagtaggattagatatcatgaggccgtgcaaaggtggcattggcagaagaaggtcatcaacaagggtctcttctttctgggaagcctcatcgcgattagttctacgtatctgctgattcactatatgtctccccgttccttcctgcgcctgcgcagaccctggaactggattgcccacttccgcaacacaacctgtttccctgctaaggctgttgactccctggagcagatcagcaaccttatttcacgcttgcttagccattctgaaatcctgcagacctag

SEQ ID NO: 284576 - DNA, 549 bp, Artificial Sequence
  derived and/or modified sequence
tgaggcatgaacgccggcttcgaggactgcctggtgttcgacgagctgatggacaagttcagcaacgacctgagcctgtgcctgcccgtgttcagcagactgagaatccccgacgaccacgccatcagcgacctgagcatgtacaactacatcgagatgagagcccacgtgaacagcagctggttcatcttccagaagaacatggagagattcctgcacgccatcatgcccagcaccttcatccccctgtacaccatggtgaccttcagcagaatcagataccacgaggccgtgcagagatggcactggcagaagaaggtgatcaacaagggcctgttcttcctgggcagcctgatcgccatcagcagcacctacctgctgatccactacatgagccccagaagcttcctgagactgagaagaccctggaactggatcgcccacttcagaaacaccacctgcttccccgccaaggccgtggacagcctggagcagatcagcaacctgatcagcagactgctgagccacagcgagatcctgcagacctag

SEQ ID NO: 284577 - protein, 151 aa, Artificial Sequence
  derived and/or modified sequence
MDFWLWPLYFLPVSGALRILPEVKVEGELGGSVTIKCPLPEMHVRIYLCREMAGSGTCGTVVSTTNFIKAEYKGRVTLKQYPRKNLFLVEVTQLTESDSGVYACGAGMNTDRGKTQKVTLNVHSEYEPSWEEQPMPETPKWFHLPYLFQMP

SEQ ID NO: 284578 - protein, 147 aa, Artificial Sequence
  derived and/or modified sequence
MDFWLWPLYFLPVSGALRILPEVKVEGELGGSVTIKCPLPEMHVRIYLCREMAGSGTCGTVVSTTNFIKAEYKGRVTLKQYPRKNLFLVEVTQLTESDSGVYACGAGMNTDRGKTQKVTLNVHSEYEPSWEEQPMPETPKWFHLPYL

SEQ ID NO: 284579 - DNA, 643 bp, Artificial Sequence
  derived and/or modified sequence
ccaatgatacttgaatatattaattagtactgttcctattattgtttgtttctacccatttccagaatggattagcaccagcttagagtaaaaggtacagactcagcaaattccaaaccaggattgccccatagacctcctgaagttacgcagtgtgggttctctaccctagatagttaaaacaagggtcaaagagtctaatacaagatgggtgagcagtgacagcagcatgtccaggcgaaaggatgtggctatccctgggcacacacaactggtttgagtgtcccgatagactaggctaagaaagaaataagtatgagctcctttaaagtagaaaaacttaaataatcacgtatgtacttttacattctgttatctgtcattacaggtaatgctgaaagccatcccttctttcttgaactctttcaatagattggtgttttcagttatgcgggaagggcggcagaaggacaaaggaagcatagatgacctgcctacggtcctaaagtgtgcacgcctggttgaaagaatgtacagccacatcgccgcacgagctgaggagtttgctgtgttttccccatttatggtggcccagtacgtgttggaggtacagaaggtgaccttatatccagctgtgaaaagt

SEQ ID NO: 284580 - protein, 370 aa, Artificial Sequence
  derived and/or modified sequence
MAITLEEAPWLGWLLVKALMRFAFMVVNNLVAIPSYICYVIILQPLRVLDSKRFWYIEGIMYKWLLGMVASWGWYAGYTVMEWGEDIKAVSKDEAVMLVNHQATGDVCTLMMCLQDKGLVVAQMMWLMDHIFKYTNFGIVSLVHGDFFIRQGRSYRDQQLLLLKKHLENNYRSRDRKWIVLFPEGGFLRKRRETSQAFAKKNNLPFLTNVTLPRSGATKIILNALVAQQKNGSPAGGDAKELDSKSKGLQWIIDTTIAYPKAEPIDIQTWILGYRKPTVTHVHYRIFPIKDVPLETDDLTTWLYQRFVEKEDLLSHFYETGAFPPSKGHKEAVSREMTLSNLWIFLIQSFAFLSGYMWYNIIQYFYHCLF

SEQ ID NO: 284581 - DNA, 2035 bp, Artificial Sequence
  derived and/or modified sequence
ggcgggggacacccgcccccgctctccgcagccgcccgccgtccgcgcccgccgaggtgagcccggcgcgcgggccgcgcccgccgccacgacccttccacatccgcggaaaccgctgcaggctccaccggctccccgcgctgcggtcgcctcttctctgcccctttcatcatcccctgcttccttgccctctggtcggaaatctcattctcttcatccccagttccttggcttttacctctttctggcttttgctcccttccccctactcctgtccttcctctttttcgcattataaccccctactttcttcctctcaccttgtaagctttttttctaggccccccattttttttcttaaaaaaaaaagggaaacaaaaaccctattgctacaaatgagaattttgagggtaactcttcgctagagccagagaccttttaaaggaatgcatcggtgtgcaggaatcgtggtggtgaggagactgaggtcctcagtatctgggaaatcttattgaggggaccctgtttcggtcatgtcacttgtgtcttcagtttggagatcctgaggttgtctgaagcgagtggatctatttttctaagtccaatagacgaccgcagtgagacacggtgcggggacggccaccgattactgaatgggaattgtgttatcatttgctaaatatattgtgacatacttcgtgcctcggtgaacagctcccttgaccttgtgcggctcctcctccctcgctctctgtccccctctggaatttcccctgagagatcaccgagaaagacaggacggagtccagtgtgagaatggctataactttggaagaagctccgtggctgggctggctcttggtgaaagcactgatgaggtttgccttcatggtcgtcaacaacctggttgctattccatcctacatctgctatgtaattatacttcagccccttcgagtgctggacagtaagcggttctggtatatcgaaggaatcatgtataaatggcttttaggaatggtagcttcctggggatggtatgctggatatacagtgatggaatggggagaagatattaaagcagtttcaaaagatgaagcagtgatgttggtgaatcatcaggcaacaggagatgtgtgcacactgatgatgtgcctccaggacaaaggactggttgttgctcagatgatgtggttgatggatcatatttttaagtacacaaactttggaattgtttctctagttcatggagacttctttataagacagggaagatcttatcgtgaccaacagctgctgcttctcaagaagcacttagaaaataattacaggagcagagatcgaaaatggattgttttgtttccagaagggggcttcctcaggaagaggcgagaaacaagtcaggcatttgccaagaaaaataacttgccatttcttacaaatgttactctgccaaggtctggggcaacaaaaattattttgaatgcacttgtagcacaacagaaaaatggaagtccagcaggaggagatgctaaagaattagacagcaaatcaaaaggcctccagtggataatagatacaacgatagcttatcccaaagctgaacctatagatattcaaacctggatccttggatacaggaaaccaacagtcacacatgtacattacaggatctttccaattaaagatgtacccctggagactgatgaccttaccacttggctctatcagcggtttgttgaaaaagaagacctcttatcacatttttatgaaacaggagcttttccaccttccaagggccataaggaagctgtttccagggagatgaccctcagcaacttgtggatatttctcatacagtcttttgcatttttgtcaggctatatgtggtacaacatcattcagtatttttaccattgcctgttttaggaattgacgtggacttgtcaaggtcaccgtaggagttcagactttctttcataagtgtgcattattttacatgtgcaaatcagaatatatttaaaaaaaagcaaaa

SEQ ID NO: 284582 - DNA, 7782 bp, Artificial Sequence
  derived and/or modified sequence
ctccccgccagtccgggcgaacgcggccgggcccttggggaccgagtctcggcgccgccggggaacgggcgcgggccgcgccacagccggagcggggcagggccccgccaccgccttcttccgccggccccgccgccggccatgcattcttccggctcctctgactcccaaagccccggctggggcccggccagcccgagaaagacaggacggagtccagtgtgagaatggctataactttggaagaagctccgtggctgggctggctcttggtgaaagcactgatgaggtttgccttcatggtcgtcaacaacctggttgctattccatcctacatctgctatgtaattatacttcagccccttcgagtgctggacagtaagcggttctggtatatcgaaggaatcatgtataaatggcttttaggaatggtagcttcctggggatggtatgctggatatacagtgatggaatggggagaagatattaaagcagtttcaaaagatgaagcagtgatgttggtgaatcatcaggcaacaggagatgtgtgcacactgatgatgtgcctccaggacaaaggactggttgttgctcagatgatgtggttgatggatcatatttttaagtacacaaactttggaattgtttctctagttcatggagacttctttataagacagggaagatcttatcgtgaccaacagctgctgcttctcaagaagcacttagaaaataattacaggagcagagatcgaaaatggattgttttgtttccagaagggggcttcctcaggaagaggcgagaaacaagtcaggcatttgccaagaaaaataacttgccatttcttacaaatgttactctgccaaggtctggggcaacaaaaattattttgaatgcacttgtagcacaacagaaaaatggaagtccagcaggaggagatgctaaagaattagacagcaaatcaaaaggcctccagtggataatagatacaacgatagcttatcccaaagctgaacctatagatattcaaacctggatccttggatacaggaaaccaacagtcacacatgtacattacaggatctttccaattaaagatgtacccctggagactgatgaccttaccacttggctctatcagcggtttgttgaaaaagaagacctcttatcacatttttatgaaacaggagcttttccaccttccaagggccataaggaagctgtttccagggagatgaccctcagcaacttgtggatatttctcatacagtcttttgcatttttgtcaggctatatgtggtacaacatcattcagtatttttaccattgcctgttttaggaattgacgtggacttgtcaaggtcaccgtaggagttcagactttctttcataagtgtgcattattttacatgtgcaaatcagaatatatttaaaaaaaagcaaaagaaattcaatggatggattaatatttatccccctttgggatattttaaaatctactaaaatgaggattagtaatataatgacctgctaatatattttaagaacatgttttaaaaagatacactctatcacatatttaagcaaacatcacatttggagaagaggaaatcataaaatcatcctagaagactatctgagagaaattctgttgccaccagttatacttgacaatttagttgaagctcagaaagttatattcatccctcttagctgtagtctatattagggcagttctctagaacgcccacatttccaccaactcagtaaacttgaggggagctggttggcacctcgtgaagaactctttccctgtcgtttgcagtaacaaactccagtctgttgcagtaacaaactccagtctgttgcagtaacaaactctagaatattgacattctctgtgggggaaaagcagtgtccactggaccccttctggtactggatgtgttctttacaaaggctagctcagtccaacactgtgtttacatacactcgtgcttttccttatctgacttctcattttgtatcagaggcatatcataaattgataattttgcaaaatgcacttttttgagatgcagatatagcaaaggattagtaatatagcctgaaaacaaatgggagcatagcagtgtgtgaggttctcgagaactgtcttgtctctgtgtgtttatttgcctgccagtgctctccagcgccatcctgccctggacaccaccctgacgtgatgcctctattgcagctcagaggctttattttttccattttgacattggcactaaatgcatttggggatggttaaaacaaattactatagaacatttaaatgatcagtttaaggggaaataggctagtttatagaaaaataagagctagtggcttataatggtgacaggttctcatgtggcacccctaggacctgtgcagacagtagtctgttgaatcattacatcaaggagctgcccctgtcagggtgagtgtaattaggaacgataccagcacataaggctccccccaatctcttccagttgctttttcttttttcttttttttttagacaggtcttactctgtcacccaggctgtagtgcagtggcataatctcagctcactgcagtctctgcctcccgggttcgagcgattctcctgcctcagcctcccgagtagctgggactacaggcacccaccatcatgcttggctaatttttgtatttttagtagagatggggtttcaccatgttggccaggctggcctcgaactcctgacctcaggtgatctgcccacctcggcttcctaaagtgctgggattgcaggcgtgagccaccacgcccggcctccagttgcttttgaagagggtaaagtcaagtttctatttctagaaaacattttttagaaatttgttgcgatgtttgtacaatttacctcataagagaaccacacccttctccaaaagtgctggtactgcatcagtgagatgagtagggtttttgtttgggattgtaagactattaagatcctagtaagtcagtggtagtttactgtgatgtgagcattgtagattcccccgttgtcactaatcacacaacaattttgagaagtaggctataaaacaaaaaaaggttgctgttttctatttttaaataaaccaaaaaaaaacagaaaagatgtgaattttccccagttatgtgggaaaggtaaagcaacaccaaataaaagcccacagcagcttcatctttacgataactcagtgcatatgtgaaagagaatgatgcattaactgaaatacctcattgaatattatactactactggtaaaatgcagaagacagtgttaatgtgtttggtttggggactggttgttataaaatgcaatttttttttaaatctaagcatttcattatgtgttctacagtgtcggtgaataaatgaaaccaatctcaatttagaggtatggatgatgacagaaagcccaatagaagcttaatgatgcttctgtttgaggcccagcaagcaccactaaattactggatgaaatgaaattgttcacttgagggattagtcaaccatctgggggagaagttgctcactgtcaaatacagcatgcacggtcctagctgatagaccttttcctcattgctacagcaagccacagggtagagtgaccagttctcctatccaaaaataaatgcgaacatgcatacataaatgtggctgagggccacttttgccatcactgtgctccaaaggaacatgatattgttaaatatactgtacacattaaactattctataagatgctttacttttcaagtacggtgtcattttcacagtctccagggtgacaaatgccaatagatatgtgagttaatttttttaaatatctccgtgagttgtaaatagatgtgtatttgatctgccctatccttctttgattctttaacatgttctctctcttctgtttgcaaaatatgtttgaaagcattggtagtgctttccttatcagtaactggagttctcctgcttgcactagagaaggtaaagagagaatcagtattcttatatggcaatctggggaagcagcaatatgccactgtacaaaactgaagaaaagttcctaatttgtactttgtgaagggagatgaaaggacgtttaaagtatatatattttgtcaagaggaaagaagataaaactatgccagttttatatcaatagcttgtagaagctcagctcttcttggtcttggctagactgcctagattcccacagcagacaaggttgagaatccattgctggaatcttggtattgatgagttacagtgatggaacatgtgcttggccacaggcaggtccagtcactgcaaaagtgaccaagccagcaggtcacccttaacttcagaaacaattattggtggtgaactgtacttaaattgcagagaaacctgtaagtaatggaaggtaaagaaaaattacagaatggaaaataatattttgggcaagcaaacaaattcactgagaattccaaaagtatattaaaaaagaagatagctatgagttcagatctatcttattggtctttaatattacaaccaatccttaactttccactataaaggaaggattactagattgattactttctggatagataatctggtaataaatgataggtaaatcaaaaattacttttatttaggagtttgaattcttactctcatcagacattttttttctagggacgcttactaattaaatgatttaagttgtttcttaggggttttttgcctatatatttatgactgtgttaatgagtagtgaaatgatgcggaaagacagctatcaggaagaggaaatacagaagcctgaataatctatgggttagaaaagcatccctgaataatcaaaaattggcagtattggcattgttctcaagcctttttatgaaaatgaaatctgaaatcaccaaatgtaaacctgggaacattattctagtgttgctgtcttggattcatgttaagaagcgtcttcattctttgctcatgttgcccacttcttgtggatttgtctgagtgttttttgacaatcacttccttaaagactcttctgaactagttggacctggttaatcatagagagtagcctttaatcatggatagtcttcttggattatttttatatttgaaaagaaaatgttttatttgcactactgagtaggaagagttaattgttttctttgttctttttttgaagtcattacacaggacttcactccagagttaccattatgagtgtgttcagctctggtccacagaggatggataaaaatggtttgttatgtttttttgctctgcagtgctatgagccttatatctgttaatatgaaggacaaagtcaaaagcagcagtggatagcaggaagggtagagactaatatgtttgggaccaaaaccatctaagttagagatttccagatcacagaggggctgggcattctctggagcagtcattggttggtgctttattgtaatcattttgcgccaatccccaacaattaggaactggaccctgggaataagctgagggtgctgaactgttggggaagggtgactgtagccacatggaagataaaatatgggtttttctgcaaaatttccatctgagggtttttacatttaatatttttttaagacagtttaaagagcaaacgttttttaagtgtattctagttgcaaagtatgcacacatatcttgaatggctttatttttattgtgtaaaactgttgaacacatgactgtgatgcacaaattctttacgtgtaaggagtctatgcattttacagtaacttattttatgatcgggtgatgagacagttatactttcaactgccattatttttattaagtgctttcattttctttacagttattataaaattgtatttattttatacagatgggttttcattttcctgatgctgtaatgtttacttcagcttgttgacctttctttgtgttatctgcatgttgtaacgtgtgataagaatgaatgtaaaggctgtggcaactgtaattaatttttgtaaagggctggtcacacgtggatctggtttatgaatgcatttgggatgattttggtaaccagatcaccttttcagaaatttagatgtgaacaccaaaagaagcattttctcaacaaaaattaatagctggttctattttttttaaacctagaaaaaataaagttgatttttttcaattaaagtgcttttaattcttagcagtggggatggggcatgtgtgttttaccagagctatttgggcattaatatctgcaggcaagtacttaaagcacactgtggcagttggatgctgaaggcaaactgaaaaaccaaatgaaaaaacatcagacttccttctttggtttaaaaatatttccccctttctccccattctcccaatccagtggtgtgctggtaaatgtttagcagttcactcttctgggagaaaattatgtattcaactatacatgtttgttataaattttgctgatagcaagaacatataacacaattaacaaataataagatacaaatactttattgtaaatcccatatagccagttgattctcacagtatacttagttgctcaggaaagaactaaaatgcttttttaaaaggatacttaattgctttttgctcaactcctacagtcaacctatgattgattgtctttcaactgtgatttgaaaaatggcagactgtccaaatctaactcatttcccaataaatttattatcattcaatctgatacgtgatctactgttaaaactgtttcttaccatggtacatattagactcattaagccgaaaccacttttagctttaacattaattgtaaatttatatgattcaattttcataaccaatgcttaacaactgcaggcaaaattctaaaatgtgaccactgggtcttgggaatcagtaggggctgtatccagcacaccactgccccatcctttttttcttaactattagtgttgaataaacttctcatagttaatctacttgctgaactcaggaaattcctatcactgaccctggccagggctttaaagggtaggaaaagcattaatgtcagtcctacacagcgaacttttgatttagaagaatgtgacagaaagaaaacatttactgaaatacatgggaagcttgcatatttctaaagttgtctttatacttttcatttctcaaagctaagtaaactgtggtataggcatctctaagatgttagcatttaaaacatcaattgttttattgatgtttaaacaattgtttaaatcccactgaaaaatttaaatattaaaatatcttgcacagtctaccaaatgagttaaatcgttacagtcgtgtctacctcttatttttctatctgtatttaggctgctgttttggtgagattctaatttctttttcccctggaactactttctgtggaagacaaggaacagactggggacagaggcctgaaaacaaattggaagcactcagagatctattgctgaccagccctattcctcatgagttggcggggggaaagccattgtttttaatttccacttaatatgaaaatgcttgtttttaaaatgttttttcctgctgaacaaatgtatttttaaaaggaaaaaaattctcttttggctctaagaagtcagctgtatgagcaggcgtgaccatatcataacatgctgatatgatagaaatcaataaatttttacctctcagga

SEQ ID NO: 284583 - DNA, 990 bp, Artificial Sequence
  derived and/or modified sequence
atggccgacggcggcagccccttcctgggcagaagagacttcgtgtaccccagcagcaccagagaccccagcgccagcaacggcggcggcagccccgccagaagagaggagaagaagagaaaggccgccagactgaagttcgacttccaggcccagagccccaaggagctgaccctgcagaagggcgacatcgtgtacatccacaaggaggtggacaagaactggctggagggcgagcaccacggcagactgggcatcttccccgccaactacgtggaggtgctgcccgccgacgagatccccaagcccatcaagccccccacctaccaggtgctggagtacggcgaggccgtggcccagtacaccttcaagggcgacctggaggtggagctgagcttcagaaagggcgagcacatctgcctgatcagaaaggtgaacgagaactggtacgagggcagaatcaccggcaccggcagacagggcatcttccccgccagctacgtgcaggtgagcagagagcccagactgagactgtgcgacgacggcccccagctgcccaccagccccagactgaccgccgccgccagaagcgccagacaccccagcagccccagcgccctgagaagccccgccgaccccatcgacctgggcggccagaccagccccagaagaaccggcttcagcttccccacccaggagcccagaccccagacccagaacctgggcacccccggccccgccctgagccacagcagaggccccagccaccccctggacctgggcaccagcagccccaacaccagccagatccactggaccccctacagagccatgtaccagtacagaccccagaacgaggacgagctggagctgagagagggcgacagagtggacgtgatgcagcagtgcgacgacggctggttcgtgggcgtgagcagaagaacccagaagttcggcaccttccccggcaactacgtggcccccgtgtag

SEQ ID NO: 284584 - DNA, 990 bp, Artificial Sequence
  derived and/or modified sequence
atggccgacggaggaagtccattcctgggccgcagggatttcgtctacccttccagcaccagagatccgagcgccagtaatggaggaggctccccggccaggagagaagagaaaaagcggaaagcagcaagactgaaatttgactttcaggcccagtctccaaaagagctgaccttgcagaagggagatattgtgtacatccacaaggaggtggataagaactggctcgagggagagcatcatggtcgcctgggaatctttcctgctaactatgtagaggtcttgcctgcagacgagattccaaagccaatcaagccgcccacataccaggtgttggagtatggcgaggcggttgcacagtacactttcaagggagatctggaggtggaactctcttttaggaagggagagcacatttgtctcatccgaaaggtcaatgagaattggtacgagggccggatcacaggaaccggacgccagggaatttttcccgcatcttacgttcaggttagcagggagccgcgtttacggctgtgtgatgatggccctcagctgcctacgagcccacgcctgacagccgccgccagaagtgccaggcacccatctagcccctctgcgcttcgaagccctgcggacccaatagatctgggaggtcagaccagtcctcgtcgcacagggttctcttttcccacccaggagcctagaccccaaacccagaatttagggacacctggtcccgctttatcacattctcgcgggccgtcacatcctctggacctgggcactagtagccccaacacgtctcaaatccattggaccccgtaccgcgcaatgtatcagtaccgccctcagaatgaagatgagctcgagctgagggaaggtgatagggtcgacgtcatgcaacaatgtgacgatggctggttcgtgggcgtatctagaagaacacagaaatttgggactttcccaggcaactacgtggcgccagtttag

SEQ ID NO: 284585 - DNA, 990 bp, Artificial Sequence
  derived and/or modified sequence
atggctgatggcggcagccccttcctgggcagaagagactttgtgtaccccagcagcacccgggaccccagcgccagcaatggaggcggcagccctgcccggcgggaggagaagaagaggaaggccgcccggctgaagtttgacttccaggcccagagccccaaggagctgaccctgcagaagggggacatcgtgtacatccacaaggaggtggacaagaactggctggagggggagcaccacggccgcctgggcatcttccctgccaactacgtggaggtgctgcctgcagatgagatccccaagcccatcaagccacccacctaccaggtgctggagtatggagaggccgtggcccagtacaccttcaagggggacctggaggtggagctgtccttcagaaaaggagagcacatctgcctgatcaggaaggtgaatgaaaactggtatgagggccgcatcactggaacaggccggcagggcatcttccctgccagctatgtgcaggtgtcccgggagccccggctgcggctgtgtgatgatggcccccagctgcccaccagcccccggctgacagctgctgcccggagcgcccggcaccccagcagccccagcgccctgcggagccctgctgaccccatcgacctgggcggccagaccagccccaggagaacaggcttctccttccccacccaggagccccggccccagacccagaacctgggcaccccaggccctgccctgagccacagccggggccccagccaccccctggacctgggcaccagcagccccaacaccagccagatccactggaccccctaccgggccatgtaccagtaccggccccagaatgaagatgagctggagctgcgggagggggacagagtggatgtgatgcagcagtgtgatgatggctggtttgtgggcgtgtccaggaggacccagaagtttggcaccttccctggcaactacgtggcccctgtgtag

SEQ ID NO: 284586 - DNA, 990 bp, Artificial Sequence
  derived and/or modified sequence
atggccgacggcggcagccccttcctgggccggcgggacttcgtgtatccgtcatccacacgggatcccagcgctagcaatggtggaggaagtccagccaggcgggaggagaagaagcgtaaggcagctaggctcaagttcgacttccaagcccagagccccaaggagctgacactacagaagggggacatagtctacattcataaagaggtcgataaaaattggctcgagggagagcaccacggaaggttaggcatcttcccagctaattacgtggaagtgttgccagctgacgagatacctaagccgatcaagccccctacctaccaggtcctggagtatggtgaagccgtggcccagtacaccttcaaaggcgatctagaggtcgagctgtcttttcggaagggcgagcacatctgccttatccgtaaggttaacgaaaactggtacgagggccgcatcaccgggaccggacgccagggcatttttccggcctcctacgtgcaggtgtcgagagaaccccggttgaggctttgtgatgatgggcctcagctaccaaccagccccagattgactgccgctgctcggtccgcaaggcacccttcctcccccagcgcccttcgatcccccgccgatcctatcgacctaggagggcaaacttctccccgacggaccggcttttccttccccacccaggagccaaggccacagactcagaaccttggtacccccggcccggctctctctcactcacgggggccttctcaccccctggacctggggacatcatcacctaacacctcccaaatccattggactccatacagggcgatgtatcagtaccggccccagaatgaggacgagctggagctcagggagggagaccgtgtagatgttatgcagcaatgtgacgatggttggtttgtgggcgtatcacggcggacccagaaattcgggacattccctggcaactacgttgcacctgtgtag

SEQ ID NO: 284587 - DNA, 990 bp, Artificial Sequence
  derived and/or modified sequence
atggccgatggcggatccccattcctgggacgtcgggactttgtgtaccccagcagtacacgagacccaagtgcatctaacgggggaggctcgccagctcgcagagaggagaaaaagaggaaggccgctaggttaaagttcgacttccaggcacagagcccaaaggagcttactctgcaaaagggtgatattgtctacatacataaggaagtcgacaagaattggctcgaaggggagcaccacggacggctgggcatctttcccgctaactacgtcgaagtgcttcctgctgacgaaattccaaaacctatcaagccaccaacttatcaggttctggagtatggagaggcagtggctcagtacacattcaaaggggacttagaggttgagctgagtttcagaaagggagaacatatatgtctgatccgtaaagtcaatgagaactggtacgagggacgtataaccggcacgggtcggcagggcatttttccggcatcatacgtacaggtcagcagagagccaagattgcgtctctgcgatgacggtcctcagcttcctacatctccacggcttaccgccgctgcgcgatcagctcggcatccctcctcaccttcggcccttcgcagccccgcagatccgatcgaccttgggggacagacatctccacgccgtacgggttttagctttccaacacaagaaccgaggccacagactcagaatctcggaactcccggtccggcactttcccactccagaggcccttcccaccctctggatctggggacttcgtcccccaatacctcccagattcattggacaccatacagagctatgtaccaatatcggcctcagaacgaagacgaactcgagctacgggaaggtgatagggtcgatgtaatgcagcagtgtgacgacggatggttcgtgggcgtgagcagacgcacgcagaaattcgggacctttcctggaaattacgtggcacccgtttag

SEQ ID NO: 284588 - protein, 483 aa, Artificial Sequence
  derived and/or modified sequence
MEIWTDKDKIKITPNASFTLENFSKWRGSVLSRRKRHDIAQLITATELAGTTVGLAFMSTMCSPYSVGVVQDHSDNLLRVAGTMAHEMGHNFGMFHDDYSCKCPSTICVMDKALSFYIPTDFSSCSRLSYDKFFEDKLSNCLFNAPLPTDIISTPICGNQLVEMGEDCDCGTSEECTNICCDAKTCKIKATFQCALGECCEKCQFKKAGMVCRPAKDECDLPEMCNGKSGNCPDDRFQVNGFPCHHGKGHCLMGTCPTLQEQCTELWGPGTEVADKSCYNRNEGGSKYGYCRRVDDTLIPCKANDTMCGKLFCQGGSDNLPWKGRIVTFLTCKTFDPEDTSQEIGMVANGTKCGDNKVCINAECVDIEKAYKSTNCSSKCKGHAVCDHELQCQCEEGWIPPDCDDSSVVFRRLLHCGWGAVPNGGHFCGGCYGNPAPELQRKAEERSEATIYHWHQATQTEEETPDGKGCSTPRDESDEAPCV

SEQ ID NO: 284589 - DNA, 1452 bp, Artificial Sequence
  derived and/or modified sequence
atggagatctggaccgacaaagataagataaagatcacgcctaatgctagcttcacactggagaatttctctaagtggaggggcagtgtgctttctagacgcaagcgtcatgatattgctcagctgatcaccgccaccgagctcgctggtacgaccgtgggtctggcctttatgtcaactatgtgtagtccgtactctgtgggagtagtgcaggatcattctgacaatctcttacgggtcgcgggaaccatggcacacgaaatgggacacaacttcggcatgtttcacgatgattattcttgcaagtgtccctctacaatctgtgtgatggataaagctttgtctttctatatccccaccgacttttcttcatgctctcggctgtcatatgacaagttttttgaagataagttatccaactgtctgttcaacgctcctcttcccacagatatcatttccacccctatctgcggaaatcagctggttgaaatgggggaggattgtgattgcgggactagcgaggagtgtaccaatatatgttgtgatgctaaaacctgcaaaattaaagccaccttccagtgcgcactgggcgagtgctgcgaaaagtgccaattcaaaaaagccggaatggtgtgtaggcccgcgaaggacgagtgtgatctcccagagatgtgtaacggtaaatcgggcaattgccccgacgatcgctttcaggtgaatggttttccttgtcaccatggcaaggggcactgcctcatgggtacatgtcctacactccaagaacagtgcacagagctttggggtcctggcactgaagttgctgacaaatcttgttacaaccgcaatgaggggggctcaaagtacggctattgccgccgcgtcgatgataccttgattccatgcaaagccaacgacaccatgtgtggcaagctattttgccagggcggaagcgataacctgccctggaaaggaagaatagtgaccttcctgacttgtaagacattcgaccccgaggacactagccaagagattggcatggtcgcaaacggtaccaagtgcggggacaataaggtctgcatcaacgccgaatgcgttgatatcgaaaaggcctataagtccactaactgcagcagtaaatgtaaaggtcacgcagtctgtgaccacgaactccagtgtcagtgtgaggaaggttggatccctcccgattgcgatgactctagcgtcgtatttagacgcttacttcattgcggctggggagccgtccctaatggaggccatttttgcggcgggtgctacgggaatccagcccctgagttacagaggaaagctgaagagcgtagcgaagctaccatctaccattggcatcaggcaactcagacagaggaagagaccccggacgggaagggctgttctacacctcgggacgagtcggatgaggccccctgcgtgtag

SEQ ID NO: 284590 - DNA, 1452 bp, Artificial Sequence
  derived and/or modified sequence
atggagatctggacagacaaggacaagatcaagatcaccccaaatgccagcttcaccctggagaacttcagcaagtggaggggctctgtgctgagcaggaggaagagacatgacatcgcccagctgatcacagccacagagctggccggcaccaccgtgggcctggccttcatgagcaccatgtgcagcccctacagcgtgggcgtggtgcaggaccacagcgacaacctgctgcgggtggccggcaccatggcccacgagatgggccacaactttggcatgtttcatgatgactacagctgcaagtgccccagcaccatctgtgtgatggacaaggccctgtccttctacatccccacagacttcagcagctgcagccggctgtcctatgacaagttctttgaggacaagctgagcaactgcctcttcaatgcccccctgcccacagacatcatcagcacccccatctgtggcaaccagctggtggagatgggagaggactgtgactgtggcaccagtgaagaatgtaccaacatctgctgtgatgccaagacctgcaagatcaaggccaccttccagtgtgccctgggggagtgctgtgagaagtgccagttcaagaaggccggcatggtgtgcaggcctgccaaggatgaatgtgacctgcctgagatgtgcaatggcaagagcggcaactgcccagatgaccgcttccaggtgaatggcttcccctgccaccacggcaagggccactgcctgatgggcacctgccccaccctgcaggagcagtgcacagagctgtggggccctggaacagaggtggccgacaagagctgctacaacagaaatgaaggaggcagcaaatatggctactgccggcgggtggatgacaccctcatcccctgcaaggccaatgacaccatgtgtgggaagctgttctgccagggcggcagtgacaacctgccctggaagggccgcatcgtgaccttcctgacctgcaagacctttgatcctgaggacaccagccaggagatcggcatggtggccaacggcaccaagtgtggggacaacaaggtgtgcatcaatgcagaatgtgtggacatcgagaaggcctacaagagcaccaactgcagcagcaaatgtaaaggacatgctgtgtgtgaccacgagctgcagtgccagtgtgaggagggctggatccccccagactgtgatgacagctctgtggtgttccggcggctgctgcactgcggctggggcgctgtgcccaatggaggccacttctgtggcggctgctacggcaacccagcccctgagctgcagaggaaggccgaggagaggtctgaggccaccatctaccactggcaccaggccacccagacagaggaggagaccccagatggcaagggctgcagcaccccaagagatgaaagtgatgaggccccctgtgtgtag

SEQ ID NO: 284591 - DNA, 1452 bp, Artificial Sequence
  derived and/or modified sequence
atggagatctggaccgacaaggacaagatcaagatcacccccaacgcatcttttacccttgaaaacttttccaagtggcgcgggagcgtcctctcacggaggaaaaggcatgacatcgctcaattgatcaccgcaaccgagctcgccggcaccaccgtggggcttgctttcatgagtacaatgtgtagcccatattcggtgggcgtcgttcaggatcattccgacaatctcctgcgtgttgcaggaaccatggcccatgaaatgggtcacaacttcggaatgtttcatgacgactactcatgtaagtgtccgagcaccatctgtgtgatggacaaggcactgagtttttacatacccacagatttcagttcatgttctagactttcatatgacaagttctttgaggacaaactcagtaattgtctcttcaatgcgcctctgcctaccgacatcatatcgacacccatttgtggcaatcagctggtagagatgggggaggactgtgactgcggaacctcagaggagtgtaccaatatttgttgcgacgccaaaacctgcaagataaaggcgaccttccagtgcgcacttggtgaatgttgcgaaaagtgccaattcaaaaaggccggtatggtgtgccgccccgctaaggatgagtgtgatctcccggagatgtgcaacgggaagtccggcaattgcccggatgaccgattccaggtcaatggattcccgtgtcaccacggcaaaggtcactgtctcatgggtacatgtcctacactccaggagcagtgcactgaattgtgggggccgggtacagaggtggccgacaaatcttgttataatagaaacgaggggggaagcaaatacggatactgtaggcgagtggatgatacattgattccttgtaaagcaaatgatactatgtgtggcaaactgttttgccagggcggctcggataatctgccctggaaggggcgcatcgtaactttcctcacatgcaagaccttcgaccctgaggatacctcacaggagattggcatggtagctaatggcaccaagtgcggcgataacaaggtgtgtataaatgcagagtgtgtcgatatcgagaaagcatacaaatctacaaactgtagctctaagtgtaagggccacgctgtgtgcgatcacgaactgcagtgccagtgtgaggaaggttggattcctccggactgtgacgactcgagcgtggttttccggcgactgcttcactgtggttggggagccgtgccaaacggtgggcatttctgtgggggctgttatgggaatcctgcccccgaactgcagagaaaggccgaggaaaggagcgaagctactatctaccactggcatcaagctacccagaccgaagaggagacccccgacggcaaaggttgctcaactccaagagacgagagtgatgaggcgccatgtgtatag

SEQ ID NO: 284592 - DNA, 1452 bp, Artificial Sequence
  derived and/or modified sequence
atggaaatttggactgataaagacaaaatcaaaattactccaaacgcttctttcactcttgaaaacttttccaagtggcggggatccgtcctgagcagaaggaagcgccacgatattgcacaacttattacagccacggagctggccggaactactgtggggctcgccttcatgtccaccatgtgttctccctatagtgtgggcgtcgtgcaggaccacagcgacaatctgctaagagtcgctggcactatggctcacgaaatgggacacaacttcggaatgttccacgacgattactcctgcaagtgcccctctacgatctgcgttatggataaggctctttcattctacattccgacagatttctcttcttgctcgcgattgtcctacgataagttctttgaagataagctgtccaattgtctcttcaacgccccactcccaaccgatataatctcaacacccatctgcgggaaccaacttgtggagatgggtgaggattgtgattgcgggaccagtgaggagtgtacaaacatttgctgcgacgcaaagacctgtaagataaaggcaactttccagtgtgcactgggcgagtgctgtgagaagtgtcagtttaagaaggctggcatggtgtgccgaccagctaaggatgagtgcgatttacccgaaatgtgcaacgggaaatccggaaactgtccagatgatagatttcaggtgaacgggtttccatgtcaccatggcaagggccattgtctgatgggcacatgcccaacactgcaagagcaatgtacagagctgtgggggcctggcaccgaggtggctgacaagtcttgctacaataggaatgagggaggtagcaaatacggctactgcaggagggtggatgacaccctcatcccttgtaaagctaacgataccatgtgtggaaagttgttctgccagggaggatcagacaaccttccgtggaaaggcagaattgttaccttccttacatgtaaaactttcgatcccgaagatacgagtcaggagatcgggatggtggcaaatggtaccaaatgcggcgataacaaggtttgtatcaatgctgaatgtgtggacatagagaaggcctacaaaagcactaactgttctagcaagtgcaaaggacacgctgtgtgcgatcacgagctccagtgtcagtgtgaggaggggtggattccaccggactgcgacgattcttcggttgtgttcaggcgattactccactgtgggtggggcgctgtccccaatggcggtcatttctgcggtggttgctacggcaatccagctccagaactgcagcgcaaagctgaagagcggtctgaggccactatttaccactggcaccaagctacacagaccgaggaagaaaccccagacggaaaggggtgctctacacctcgagatgagtccgacgaagcaccatgtgtgtag

SEQ ID NO: 284593 - DNA, 1452 bp, Artificial Sequence
  derived and/or modified sequence
atggagatctggaccgacaaggacaagatcaagatcacccccaacgccagcttcaccctggagaacttcagcaagtggagaggcagcgtgctgagcagaagaaagagacacgacatcgcccagctgatcaccgccaccgagctggccggcaccaccgtgggcctggccttcatgagcaccatgtgcagcccctacagcgtgggcgtggtgcaggaccacagcgacaacctgctgagagtggccggcaccatggcccacgagatgggccacaacttcggcatgttccacgacgactacagctgcaagtgccccagcaccatctgcgtgatggacaaggccctgagcttctacatccccaccgacttcagcagctgcagcagactgagctacgacaagttcttcgaggacaagctgagcaactgcctgttcaacgcccccctgcccaccgacatcatcagcacccccatctgcggcaaccagctggtggagatgggcgaggactgcgactgcggcaccagcgaggagtgcaccaacatctgctgcgacgccaagacctgcaagatcaaggccaccttccagtgcgccctgggcgagtgctgcgagaagtgccagttcaagaaggccggcatggtgtgcagacccgccaaggacgagtgcgacctgcccgagatgtgcaacggcaagagcggcaactgccccgacgacagattccaggtgaacggcttcccctgccaccacggcaagggccactgcctgatgggcacctgccccaccctgcaggagcagtgcaccgagctgtggggccccggcaccgaggtggccgacaagagctgctacaacagaaacgagggcggcagcaagtacggctactgcagaagagtggacgacaccctgatcccctgcaaggccaacgacaccatgtgcggcaagctgttctgccagggcggcagcgacaacctgccctggaagggcagaatcgtgaccttcctgacctgcaagaccttcgaccccgaggacaccagccaggagatcggcatggtggccaacggcaccaagtgcggcgacaacaaggtgtgcatcaacgccgagtgcgtggacatcgagaaggcctacaagagcaccaactgcagcagcaagtgcaagggccacgccgtgtgcgaccacgagctgcagtgccagtgcgaggagggctggatcccccccgactgcgacgacagcagcgtggtgttcagaagactgctgcactgcggctggggcgccgtgcccaacggcggccacttctgcggcggctgctacggcaaccccgcccccgagctgcagagaaaggccgaggagagaagcgaggccaccatctaccactggcaccaggccacccagaccgaggaggagacccccgacggcaagggctgcagcacccccagagacgagagcgacgaggccccctgcgtgtag

SEQ ID NO: 284594 - DNA, 2543 bp, Artificial Sequence
  derived and/or modified sequence
actggagaggaggcagggacagacccagcagcacccacctgagcgagaagagcagacaccgtgctcctggaatcacccagcatgttgcaaggtctcctgccagtcagtctcctcctctctgttgcagtaagtgctataaaagaactccctggggtgaagaagtatgaagtggtttatcctataagacttcatccactgcataaaagagaggccaaagagccagagcaacaggaacaatttgaaactgaattaaagtataaaatgacaattaatggaaaaattgcagtgctttatttgaaaaaaaacaagaacctccttgcaccaggctacacggaaacatattataattccactggaaaggagatcaccacaagcccacaaattatggatgattgttattatcaaggacatattcttaatgaaaaggtttctgacgctagcatcagcacatgtaggggtctaaggggctacttcagtcagggggatcaaagatactttattgaacctttaagccccatacatcgggatggacaggagcatgcactcttcaagtataaccctgatgaaaagaattatgacagcacctgtgggatggatggtgtgttgtgggcccacgatttgcagcagaacattgccctacctgccaccaaactagtaaaattgaaagacaggaaggttcaggaacatgagaaatacatagaatattatttggtcctggataatggtgagttttaaacagtttgctgggagatgtcactgggtttttcaatgaacgcacatgaagcatggaagcaaagtcaagacatttgagaccaatgtggctgactggctcccaaaggatgaccacaacttttgctacatagctttataaaaagctcaatactcatgtggccttagttggtatggaaatctggactgacaaggataagataaagataaccccaaatgcaagcttcaccttggagaatttttctaaatggagggggagtgttctctcaagaagaaagcgtcatgatattgctcagttaatcacagcaacagaacttgctggaacgactgtgggtcttgcatttatgtctacaatgtgttctccttattctgttggcgttgttcaggaccacagcgataatcttcttagagttgcagggacaatggcacatgaaatgggccacaactttggaatgtttcatgacgactattcttgcaagtgtccttctacaatatgtgtgatggacaaagcactgagcttctatatacccacagacttcagttcctgcagccgtctcagctatgacaagttttttgaagataaattatcaaattgcctctttaatgctccattgcctacagatatcatatccactccaatttgtgggaaccagttggtggaaatgggagaggactgtgattgtgggacatctgaggaatgtaccaatatttgctgtgatgctaagacatgtaaaatcaaagcaacttttcaatgtgcattaggagaatgttgtgaaaaatgccaatttaaaaaggctgggatggtgtgcagaccagcaaaagatgagtgcgacctgcctgaaatgtgtaatggtaaatctggtaattgtcctgatgatagattccaagtcaatggcttcccttgccatcacgggaagggccactgcttgatggggacatgccccacactgcaggagcagtgcacagagctgtggggaccaggaactgaggttgcagataagtcatgttacaacaggaatgaaggtgggtcaaagtacgggtactgtcgcagagtggatgacacactcattccctgcaaagcaaatgataccatgtgtgggaagttgttctgtcaaggtgggtcggataatttgccctggaaaggacggatagtgactttcctgacatgtaaaacatttgatcctgaagacacaagtcaagaaataggcatggtggccaatggaactaagtgtggcgataacaaggtttgcattaatgcagaatgtgtggatattgagaaagcctacaaatcaaccaattgctcatctaagtgcaaaggacatgctgtgtgtgaccatgagctccagtgtcaatgtgaggaaggatggatccctcccgactgcgatgactcctcagtggtcttccgtagacttctccattgtggttggggtgctgttcccaatggcggtcatttttgtggtggttgctatggtaatccggcaccagagctccagagaaaagcagaagaaagatcagaggccactatctaccactggcaccaggccacacaaacagaagaggaaaccccagatggtaaaggctgttcaaccccaagagatgagtcagatgaagccccatgtgtatgatctgccagtagaaggcaatgagcccccagcctcttttcataaagacacaaacgcacttccccctactgttttcaaggataatccagtgtctacacctaaggactcaaatccaaaagcatgaagcaacagctaagcaagaactaatggctaaattatcaacttggaaaactggaaaatctggatggcaga

SEQ ID NO: 284595 - DNA, 691 bp, Artificial Sequence
  derived and/or modified sequence
cgcgggggtaaggggggtggccgcccgcctgccctcggtcccgtgcggtccccgaaactccgagcacccgcccggtcccggcgcggagcccctcggcgtcgcgtggagctgcgagtcgcccgcttccggaagcgcacacgggccagttgcggcggcccatctgccggggcggcgggggctcggcgggagggttgaggctgaatcacgcgcagcctgcgggcggcggaaacgtccctagagcctcgccgccctgggacccgggctgcttcctgggagaggattacattttctccctgctccacttgactttcttccggaaggagcaggtctcgcaggatcggggccaagactggaagagttcagccccatggctgggggttatggagtgatgggtgacgatggttctattgattatactgttcacgaagcctggaatgaagccaccaatgtttacttgatagttatccttgttagcttcggtctcttcatgtatgccaaaaggaacaaaaggagaattatgaggatattcagtgtgccacctacagaggaaactttgtcagagcccaacttttatgacacgataagcaagattcgtttaagacaacaactggaaatgtattccatttcaagaaagtacgactatcagcagccacaaaaccaagctgacagtgtgcaactctcattggaatga

SEQ ID NO: 284596 - DNA, 1466 bp, Artificial Sequence
  derived and/or modified sequence
gctcggtaaccgtttcccgcgcgcccggccccgactccggggtaaagagccccggagcggagcagcgctggccgcgtgccgcctccggagccggcagcgtgagtggccccgcgtccccgcttctcccggtccccggcggggccgcgtcacccggccccgccccgcgccgcccgccccgccccggacgcgggggtaaggggggtggccgcccgcctgccctcggtcccgtgcggtccccgaaactccgagcacccgcccggtcccggcgcggagcccctcggcgtcgcgtggagctgcgagtcgcccgcttccggaagcgcacacgggccagttgcggcggcccatctgccggggcggcgggggctcggcgggagggttgaggctgaatcacgcgcagcctgcgggcggcggaaacgtccctagagcctcgccgccctgggacccgggctgcttcctgggagaggattacattttctccctgctccacttgactttcttccggaaggagcaggtctcgcaggatcggggccaagactggaagagttcaggtttgggagtcgtgtgtataacagccccgcgcctccacgcccaggcctgtgtggctttggacaagttatataaccaccgccgccaccccagtttcttctcctgtaaaatggagctttagtgccgcccagcagggttgttgggataattcagtgactctgtggactgcccagcacctgtgaattgctttcctggatgttgggtgaaggcctgtgagcttccccatggctgggggttatggagtgatgggtgacgatggttctattgattatactgttcacgaagcctggaatgaagccaccaatgtttacttgatagttatccttgttagcttcggtctcttcatgtatgccaaaaggaacaaaaggagaattatgaggatattcagtgtgccacctacagaggaaactttgtcagagcccaacttttatgacacgataagcaagattcgtttaagacaacaactggaaatgtattccatttcaagaaagtacgactatcagcagccacaaaaccaagctgacagtgtgcaactctcattggaatgaaacctcagaaaaagagcaacagaagtaattgtttcaagctcctgattctttctactaaatcatgaacagctttaaaaacatttctgtctgcataaaattattttacttgtaacttttccccaattgttctgtgcattgttttgcctttttaaattacatctccaagtggctcaaaaggccttgacacagggaacctgcacatatccaggatatgtgtaaccagcgatggtgacttgaccttgccaagacctgtgattccttcaggatacaatcagtgagaaataaaaacacatcttgggaagtgggaatcctggagtttatgccatttgcaatattaaaaaataaaaatgcaagttattatttcaataataa

SEQ ID NO: 284597 - DNA, 773 bp, Artificial Sequence
  derived and/or modified sequence
accccaagcgcgcacagcggagcaggaggcgcccggcactcgcagccccatggctgggggttatggagtgatgggtgacgatggttctattgattatactgttcacgaagcctggaatgaagccaccaatgtttacttgatagttatccttgttagcttcggtctcttcatgtatgccaaaaggaacaaaaggagaattatgaggatattcagtgtgccacctacagaggaaactttgtcagagcccaacttttatgacacgataagcaagattcgtttaagacaacaactggaaatgtattccatttcaagaaagtacgactatcagcagccacaaaaccaagctgacagtgtgcaactctcattggaatgaaacctcagaaaaagagcaacagaagtaattgtttcaagctcctgattctttctactaaatcatgaacagctttaaaaacatttctgtctgcataaaattattttacttgtaacttttccccaattgttctgtgcattgttttgcctttttaaattacatctccaagtggctcaaaaggccttgacacagggaacctgcacatatccaggatatgtgtaaccagcgatggtgacttgaccttgccaagacctgtgattccttcaggatacaatcagtgagaaataaaaacacatcttgggaagtgggaatcctggagtttatgccatttgcaatattaaaaaataaaaatgcaagttattatttcaataataacttcctgtttcattgtattctgtgagtg

SEQ ID NO: 284598 - DNA, 487 bp, Artificial Sequence
  derived and/or modified sequence
cattaattaaaagaaaccctgctttcttttctctcttacagccccatggctgggggttatggagtgatgggtgacgatggttctattgattatactgttcacgaagcctggaatgaagccaccaatgtttacttgatagttatccttgttagcttcggtctcttcatgtatgccaaaaggaacaaaaggagaattatgaggatattcagtgtgccacctacagaggaaactttgtcagagcccaacttttatgacacgataagcaagattcgtttaagacaacaactggaaatgtattccatttcaagaaagtacgactatcagcagccacaaaaccaagctgacagtgtgcaactctcattggaatgaaacctcagaaaaagagcaacagaagtaattgtttcaagctcctgattctttctactaaatcatgaacagctttaaaaacatttctgtctgcataaaattattttacttgtaacttttc

SEQ ID NO: 284599 - DNA, 669 bp, Artificial Sequence
  derived and/or modified sequence
atgtctggcgccggccgagccctcgccgcccttcttttggccgcctcagtgctctccgccgccctacttgcgccaggcgggtcttccggaagggatgctcaagctgccccccctagagatttggacaagaagaggcacgcagagctcaaaatggaccaggctctattactcattcacaacgagcttctatggactaatctgactgtctactggaaatctgaatgctgttaccattgcctgttccaagttctggttaacgttcctcaaagccctaaggccggcaagcctagcgccgcagccgcgtccgtgagcacccagcacggcagtatcctgcaactaaacgacacgctggaggaaaaagaggtgtgtcggcttgaataccgttttggcgaatttggtaattactctctgctggttaagaacattcacaacggcgtttccgagatagcttgtgaccttgccgttaacgaggacccagtggacagcaacctgcccgtctccattgcgttcttaatcggactcgccgtgatcatagtgatatccttcctgcgtctcctcctaagggtcttgctgtgccatccaggctggtctgctgttgcaccctcgaggttgactccctcttccgcttccagagtgcacaccattcttctgccgcagcccccagagtag

SEQ ID NO: 284600 - DNA, 717 bp, Artificial Sequence
  derived and/or modified sequence
agggcggggcgcagcgggcaggcaagggcggccgagcgggcggcgggcatgagcggggcgggcagggcgctggccgcgctgctgctggccgcgtccgtgctgagcgccgcgctgctggcccccggcggctcttcggggcgcgatgcccaggccgcgccgccacgagacttagacaaaaaaagacatgcagagctgaagatggatcaggctttgctactcatccataatgaacttctctggaccaacttgaccgtctactggaaatctgaatgctgttatcactgcttgtttcaggttctggtaaacgttcctcagagtccaaaagcagggaagcctagtgctgcagctgcctctgtcagcacccagcacggatctatcctgcagctgaacgacaccttggaagagaaagaagtttgtaggttggaatacagatttggagaatttggaaactattctctcttggtaaagaacatccataatggagttagtgaaattgcctgtgacctggctgtgaacgaggatccagttgatagtaaccttcctgtgagcattgcattccttattggtcttgctgtcatcattgtgatatcctttctgaggctcttgttgagagtcttgctatgtcacccaggctggagtgcggtggcaccatctcggctcactccaagctctgcctcccgggttcacaccattctcctacctcagcctcctgagtag

SEQ ID NO: 284601 - DNA, 669 bp, Artificial Sequence
  derived and/or modified sequence
atgtctggggccggccgggccctggccgccctgctgctggccgcctctgtgctgtctgctgccctgctggcccctgggggcagcagcggcagagatgcccaggccgccccaccccgggacctggacaagaagagacatgctgagctgaagatggaccaggccctgctgctgatccacaatgagctgctgtggaccaacctgactgtgtactggaagtctgagtgctgctaccactgcctcttccaggtgctggtgaatgtgccccagagccccaaggccggcaagcccagcgctgctgctgcctctgtgtccacccagcacggcagcatcctgcagctgaatgacaccctggaggagaaggaggtgtgccgcctggagtacagatttggagaatttggaaactacagcctgctggtgaagaacatccacaacggggtgtctgaaattgcctgtgacctggccgtgaatgaagatcctgtggacagcaacctgcctgtgtccatcgccttcctgattggcctggccgtcatcatcgtcatctccttcctgcggctgctgctgcgggtgctgctgtgccaccctggctggagcgctgtggcccccagccggctgacccccagcagcgccagccgggtgcacaccatcctgctgccccagcccccagagtag

SEQ ID NO: 284602 - DNA, 669 bp, Artificial Sequence
  derived and/or modified sequence
atgagcggcgccggccgggccctggccgccctgctgctggccgcctctgtcctgtctgctgctctgctggccccaggaggatcgtccggcagagatgcccaagccgctcctccacgtgatttagacaagaagcggcacgccgagctgaagatggatcaagctctcctgcttatacacaatgaacttctgtggactaacttgacagtctactggaagtcggaatgttgctatcattgcttgttccaggtgctggtgaatgtcccccagagccccaaggctggtaagcccagcgcagccgccgctagtgtgtccacacagcacgggtccatcctgcagcttaacgacaccctcgaagagaaggaggtgtgtcgtcttgagtataggtttggcgaattcggtaattatagccttttagttaagaacatacacaatggcgtgtctgagatagcgtgcgatctggcggtgaatgaagatccagtcgactctaacttgcccgtttctatcgcgtttttgatagggctggctgttatcatcgtgatcagtttcttgcgactgctgcttagggtgctcctatgtcacccggggtggagtgcggtcgcaccatcaaggctcaccccatcaagtgctagtcgggtacacacaatcctacttccccagccccctgagtag

SEQ ID NO: 284603 - DNA, 669 bp, Artificial Sequence
  derived and/or modified sequence
atgtccggcgctggccgagccctggcagcacttttgctggctgctagtgtcctgtccgcggctttattggcccctggtggctcctctgggcgagatgcccaggctgctccacccagagatcttgacaagaaaaggcatgccgagcttaaaatggatcaggccctgctgctcattcataacgagctgctgtggactaacttaactgtgtactggaagtcggagtgttgctaccattgtctgttccaggtactggtgaatgtgccccagagtcccaaggcaggaaagccttccgcggcagcagcgtcagtcagcacccagcacggttcaattctacagctcaacgacaccctggaggaaaaggaggtgtgcaggctggaatacaggtttggcgagttcggcaattatagtcttctggtcaagaacattcacaatggggtgagcgaaatcgcatgtgatttggcggtgaatgaagatccagttgattccaatctgcccgttagcatcgcttttctcattgggctggcggtcattatagtgatttccttcctgcgattactgttaagggtgctcctttgccacccaggatggtcagcggtcgccccatcccgtttgactccttcctctgcgtcgcgtgtgcacaccattctgctgccacagcccccagagtag

SEQ ID NO: 284604 - DNA, 669 bp, Artificial Sequence
  derived and/or modified sequence
atgagcggcgccggcagagccctggccgccctgctgctggccgccagcgtgctgagcgccgccctgctggcccccggcggcagcagcggcagagacgcccaggccgccccccccagagacctggacaagaagagacacgccgagctgaagatggaccaggccctgctgctgatccacaacgagctgctgtggaccaacctgaccgtgtactggaagagcgagtgctgctaccactgcctgttccaggtgctggtgaacgtgccccagagccccaaggccggcaagcccagcgccgccgccgccagcgtgagcacccagcacggcagcatcctgcagctgaacgacaccctggaggagaaggaggtgtgcagactggagtacagattcggcgagttcggcaactacagcctgctggtgaagaacatccacaacggcgtgagcgagatcgcctgcgacctggccgtgaacgaggaccccgtggacagcaacctgcccgtgagcatcgccttcctgatcggcctggccgtgatcatcgtgatcagcttcctgagactgctgctgagagtgctgctgtgccaccccggctggagcgccgtggcccccagcagactgacccccagcagcgccagcagagtgcacaccatcctgctgccccagccccccgagtag

SEQ ID NO: 284605 - protein, 349 aa, Artificial Sequence
  derived and/or modified sequence
MEPCAAWSPRGGRENVMDIGLTNEKPNPELSYSGSFQPAPGNKTVTYLGKFAFDSPSNWCQDNIISLMSAGILGVPPASGALSTQTSTASMVQPPQGDVEAMYPALPPYSNCGDLYSEPVSFHDPQGNPGLAYSPQDYQSAKPALDSNLFPMIPDYNLYHHPNDMGSIPEHKPFQGMDPIRVNPPPITPLETIKAFKDKQIHPGFGSLPQPPLTLKPIRPRKYPNRPSKTPLHERPHACPAEGCDRRFSRSDELTRHLRIHTGHKPFQCRICMRSFSRSDHLTTHIRTHTGEKPFACEFCGRKFARSDERKRHAKIHLKQKEKKAEKGGAPSASSAPPVSLAPVVTTCA

SEQ ID NO: 284606 - DNA, 1050 bp, Artificial Sequence
  derived and/or modified sequence
atggagccctgcgccgcctggagccccagaggcggcagagagaacgtgatggacatcggcctgaccaacgagaagcccaaccccgagctgagctacagcggcagcttccagcccgcccccggcaacaagaccgtgacctacctgggcaagttcgccttcgacagccccagcaactggtgccaggacaacatcatcagcctgatgagcgccggcatcctgggcgtgccccccgccagcggcgccctgagcacccagaccagcaccgccagcatggtgcagcccccccagggcgacgtggaggccatgtaccccgccctgcccccctacagcaactgcggcgacctgtacagcgagcccgtgagcttccacgacccccagggcaaccccggcctggcctacagcccccaggactaccagagcgccaagcccgccctggacagcaacctgttccccatgatccccgactacaacctgtaccaccaccccaacgacatgggcagcatccccgagcacaagcccttccagggcatggaccccatcagagtgaaccccccccccatcacccccctggagaccatcaaggccttcaaggacaagcagatccaccccggcttcggcagcctgccccagccccccctgaccctgaagcccatcagacccagaaagtaccccaacagacccagcaagacccccctgcacgagagaccccacgcctgccccgccgagggctgcgacagaagattcagcagaagcgacgagctgaccagacacctgagaatccacaccggccacaagcccttccagtgcagaatctgcatgagaagcttcagcagaagcgaccacctgaccacccacatcagaacccacaccggcgagaagcccttcgcctgcgagttctgcggcagaaagttcgccagaagcgacgagagaaagagacacgccaagatccacctgaagcagaaggagaagaaggccgagaagggcggcgcccccagcgccagcagcgccccccccgtgagcctggcccccgtggtgaccacctgcgcctag

SEQ ID NO: 284607 - DNA, 1050 bp, Artificial Sequence
  derived and/or modified sequence
atggaaccttgcgccgcctggtcaccccgcggcgggagggaaaatgtgatggatatcggcctcacgaatgagaagccaaatccagaactctcctattccggatcatttcagccagccccaggaaataagactgtgacctacttggggaaatttgccttcgacagcccgtcgaattggtgtcaggataatatcattagcctgatgtcagcagggattctgggggtgccccctgcttctggggcacttagcacccaaactagtaccgcgagtatggttcagcctcctcagggagacgttgaggctatgtaccctgccctccccccctacagcaactgcggggatttatactctgaaccggtcagcttccacgacccacaaggcaaccccggccttgcctacagtccacaggactaccagtccgctaagcccgccctcgatagcaatcttttcccaatgattcccgattacaatttatatcatcatccaaacgatatgggaagcatccccgaacataaacctttccagggtatggacccaatacgggttaatcctccccctatcacgcctcttgagaccataaaggctttcaaagataagcagatccaccccggatttgggtcattgcctcaaccgccactaactttgaaacccatcaggccaaggaagtatcctaaccggccttccaaaactcctctgcatgagaggcctcatgcatgcccggctgagggatgcgaccggcgctttagtaggtcagatgaacttactcggcatctgaggattcatacaggccataagccctttcagtgtcgaatatgcatgcgctcctttagtagaagtgaccatctgactacacacatcaggacacataccggtgagaaaccttttgcctgtgaattctgtggtcgaaagtttgctcgttccgacgagcgaaagcgccacgctaaaatccacctcaagcagaaagaaaagaaggctgagaagggtggggccccctctgccagcagcgcgccccctgttagtctagctcctgtggtcacaacatgcgcctag

SEQ ID NO: 284608 - DNA, 1050 bp, Artificial Sequence
  derived and/or modified sequence
atggagccctgtgccgcctggagcccccggggcggccgggagaatgtgatggacatcggcctgaccaatgagaagcccaaccctgagctgagctacagcggcagcttccagcctgcccctggcaacaagacagtgacctacctgggcaagtttgcctttgacagccccagcaactggtgccaggacaacatcatcagcctgatgtctgctggcatcctgggcgtgcccccagccagcggggccctgagcacccagaccagcacagcctccatggtgcagcccccccagggagatgtggaggccatgtacccagccctgcccccctacagcaactgtggggacctgtacagcgagcctgtgtccttccatgacccccagggcaaccctggcctggcctacagcccccaggactaccagagcgccaagccagccctggacagcaacctcttccccatgatcccagactacaacctgtaccaccaccccaatgacatgggcagcatccctgagcacaagcccttccagggcatggaccccatccgggtgaaccccccacccatcacccccctggagaccatcaaggccttcaaggacaagcagatccaccctggcttcggcagcctgccccagccccccctgaccctgaagcccatccggcccaggaagtaccccaaccggcccagcaagacccccctgcacgagcggccccacgcctgcccagctgagggctgtgaccggcgcttcagcagaagtgatgagctgaccaggcacctgcgcatccacacaggccacaagcccttccagtgccgcatctgcatgaggagcttcagcagaagtgaccacctgaccacccacatccgcacccacactggagagaagccctttgcctgtgagttctgtggcaggaagtttgcccggagtgatgagaggaagagacatgccaagatccacctgaagcagaaggagaagaaggccgagaagggcggggcccccagcgccagcagcgcccctcctgtgtccctggcccctgtggtgaccacctgtgcctag

SEQ ID NO: 284609 - DNA, 1050 bp, Artificial Sequence
  derived and/or modified sequence
atggagccctgcgccgcctggagcccccggggcggccgggagaacgtgatggacatcgggctgacaaacgagaaaccaaatcccgagctttcatatagtggatcttttcagccagcccctggcaataagactgtgacatacctcggcaaatttgctttcgatagccctagcaattggtgccaggataacattatcagcttaatgtctgctggcatccttggagtgcctccggcttccggcgcattgtccacccaaacgagcacagctagcatggttcaaccgccccagggggatgtggaagccatgtatcctgccctcccaccctactctaattgtggggacctctattctgagccagtctcttttcacgacccgcagggtaaccccggcttggcttacagcccccaggactaccagtctgcaaaaccggccctcgacagtaacttgtttccaatgatcccagactacaacctgtatcaccatcccaatgatatggggtccattcccgagcacaagccctttcagggcatggacccaattagagtcaacccaccaccaattacgcctctcgagacgatcaaggctttcaaggacaagcagatccacccggggtttgggagcttgccacagccaccgttgaccctgaaacccattagacctaggaaatacccaaacaggccaagcaaaactcctttgcatgagcgccctcacgcatgccccgctgaaggatgcgaccgtcggttttcacgttcggacgaactgaccaggcatctccggattcacaccggccacaagcccttccagtgcagaatttgcatgcgttccttctctagatccgatcacctcacaacccatataagaacgcatactggcgagaagccatttgcgtgtgagttctgtggccgaaagttcgctaggagtgacgaaagaaagagacatgctaagatacatttaaagcaaaaggaaaaaaaagccgagaaaggcggcgccccttctgcatctagcgcaccccctgtctcgctggcacccgtggttactacttgcgcctag

SEQ ID NO: 284610 - DNA, 1050 bp, Artificial Sequence
  derived and/or modified sequence
atggagccctgtgctgcctggtccccccgtggaggcagggaaaacgttatggacatcggtctgactaatgaaaagccaaaccctgagctttcgtattctggatcgtttcaacctgcacccggtaacaaaactgtcacctacttgggaaagtttgcattcgactctccctcaaactggtgccaggacaatataatcagtctcatgtccgcagggatcctcggcgtgcctcctgccagtggagccctttccacccagacctctactgcgagtatggtgcagccccctcagggcgacgtcgaggctatgtatccagccctgcccccttattcgaattgtggggacttgtactctgaacctgttagcttccacgacccccagggaaacccaggtttggcctactccccccaggattaccagagcgctaagcctgcccttgactcgaatctgttcccaatgatcccagactataatctttaccaccaccccaacgatatgggcagcataccagagcataaacccttccagggcatggatcctataagggtgaacccgcctccaatcacacccttggagacaatcaaggccttcaaggacaaacaaatccatccaggcttcggctctctgccgcagccccctctgactctgaaacccatcaggccccgtaaataccctaatcgcccatcgaaaactcctctgcacgagcggccacacgcttgtcccgctgagggctgcgaccgcagattcagtcggtcggatgagctcactaggcacctgagaattcatacaggtcacaaacctttccagtgcaggatttgcatgcgaagcttcagtaggtccgaccatcttaccacacatattcggacacacacaggcgaaaaaccttttgcctgcgaattctgtgggaggaagttcgccaggtccgatgaacggaaacgccacgccaagatccacctgaagcagaaggagaagaaagccgagaagggtggtgccccaagtgctagctctgcaccccctgtcagcctggcccctgtggtgaccacatgtgcctag

SEQ ID NO: 284611 - protein, 405 aa, Artificial Sequence
  derived and/or modified sequence
MERLQKQPLTSPGSVSPSRDSSVPGSPSSIVAKMDNQVLGYKDLAAIPKDKAILDIERPDLMIYEPHFTYSLLEHVELPRSRERSLSPKSTSPPPSPEVWADSRSPGIISQASAPRTTGTPRTSLPHFHHPETSRPDSNIYKKPPIYKQRESVGGSPQTKHLIEDLIIESSKFPAAQPPDPNQPAKIETDYWPCPPSLAVVETEWRKRKASRRGAEEEEEEEDDDSGEEMKALRERQREELSKVTSNLGKMILKEEMEKSLPIRRKTRSLPDRTPFHTSLHQGTSKSSSLPAYGRTTLSRLQSTEFSPSGSETGSPGLQNGEGQRGRMDRGNSLPCVLEQKIYPYEMLVVTNKGRTKLPPGVDRMRLERHLSAEDFSRVFAMSPEEFGKLALWKRNELKKKASLF

SEQ ID NO: 284612 - protein, 541 aa, Artificial Sequence
  derived and/or modified sequence
MIYEPHFTYSLLEHVELPRSRERSLSPKSTSPPPSPEVWADSRSPGIISQASAPRTTGTPRTSLPHFHHPETSRPDSNIYKKPPIYKQRESVGGSPQTKHLIEDLIIESSKFPAAQPPDPNQPAKIETDYWPCPPSLAVVETEWRKRKASRRGAEEEEEEEDDDSGEEMKALRERQREELSKVTSNLGKMILKEEMEKSLPIRRKTRSLPDRTPFHTSLHQGTSKSSSLPAYGRTTLSRLQSTEFSPSGSETGSPGLQNGEGQRGRMDRGNSLPCVLEQKIYPYEMLVVTNKGRTKLPPGVDRMRLERHLSAEDFSRVFAMSPEEFGKLALWKRNELKKKASLFGALVVRPVGCLEQLEGRCRGGKRPGRKSSRLLCRPPSPPILTPDSFPALQPPAPLTLVGTGPSSASGREVTPPLQLALTSARKPRASKPFAPALRLPQKPGLRVEMPPTHDPGPPPASRPRNGNSSTKPGTGQKLGLPPPLDGVKRPGLAHFGVSWLPALTYTHAPPHTLCSLKNVIYWGPPSCFPHLPLPYLTPPA

SEQ ID NO: 284613 - DNA, 1218 bp, Artificial Sequence
  derived and/or modified sequence
atggagcggctgcaaaaacagcctcttaccagtccaggctccgtatctccaagccgggactcaagtgtacctggctcgcctagctccatcgttgccaagatggataaccaggtcttgggttataaagacctcgcagccatcccaaaggataaagccattttagacatagaaagaccggaccttatgatctacgagccacacttcacttattccctgctcgagcatgtagagttgcctcggtcccgagaaaggtctctgagccctaaaagtaccagcccccctccgtctccagaggtttgggcggatagccgttcacctgggataatctcacaggccagcgcccctcgcaccacagggaccccgcggacatccttgccgcactttcaccaccccgaaacatctcgccccgattccaacatatacaagaagccccctatatacaagcagcgggaatcggtgggcggctccccccagactaagcaccttatcgaggatctgatcatagagtctagcaagttcccagccgcccagccacccgaccctaatcagccggccaaaatagagaccgactattggccttgcccaccatccctcgcagtggttgaaacggagtggcgcaagcgcaaggcatccaggcggggagccgaagaagaagaagaggaggaggacgatgatagcggcgaagaaatgaaagccctgagggaaaggcaaagagaagagttaagcaaggtgacaagcaatctgggtaagatgattctgaaagaagaaatggagaaatcgttgcccattaggagaaaaacaaggtcactgccagataggactccatttcatacaagcttgcatcagggcactagcaagagcagtagcttgcccgcatacgggagaacaaccctcagcagattgcagtcaactgagttttccccttccgggagtgaaactgggtcgccaggattgcagaatggggaggggcagagaggccgaatggaccgcggaaatagcctcccttgcgtattggaacagaaaatctatccctacgaaatgctggtggttactaacaagggccgtactaagctgcccccaggcgtggaccgtatgcgcctggagagacacctttctgccgaagacttttcccgcgtgttcgccatgagtcctgaggaatttgggaaactggccctgtggaaaaggaacgaactgaagaagaaagcctcactattttag

SEQ ID NO: 284614 - DNA, 1218 bp, Artificial Sequence
  derived and/or modified sequence
atggagcggttgcaaaagcagccgctcacctctcctggttccgtatcccccagcagggatagctccgtgcccggtagtccgtcatccatcgttgccaaaatggataaccaggtcctggggtacaaagacctggctgcaattccaaaagacaaggccatactcgatatagaacggccagatttaatgatctacgagccccactttacctatagcctccttgaacacgtggagctcccacgctccagggaacgcagcctgagccctaagtcaacctctccccccccatcccctgaggtttgggctgatagccgcagtcctggcattatctctcaggcctcagctccccgcacaactggaactcccagaacaagtttgccacatttccaccatcctgagacatcccggcctgactccaatatctataagaagccacctatttacaaacagcgcgaatccgtgggcggatctccacaaactaaacacctgattgaagacctaattatcgaaagttccaagtttcctgcagcccagccgcccgaccctaaccagcctgccaaaattgaaactgattattggccatgccctccatctctcgccgttgtagagactgagtggagaaagcggaaggcaagtagacggggggctgaagaggaagaggaggaagaggatgacgattctggagaggagatgaaggcactgcgagagaggcagagggaagagctcagcaaggtgactagcaatctcggcaagatgattctcaaggaggagatggagaagtctctgccaatccggagaaagacaagatctctccccgaccgaacaccattccacacaagtcttcaccaaggtacttccaagagctcctccctgcccgcctacggccgcacgacgctgagtaggctgcagagcacagagttctctcccagcggtagcgagaccggatcgccaggcctgcagaacggagaaggacaacgggggagaatggaccggggcaattcactgccctgcgtgctcgaacagaaaatttatccttacgagatgctggtggttacaaacaagggcagaacaaagctgccacctggcgtggatcgcatgcgcctcgagagacacctgagtgccgaagatttttccagagtgtttgctatgagccccgaagagttcgggaaactggctctgtggaagcggaatgagctcaagaagaaggcttcactcttctag

SEQ ID NO: 284615 - DNA, 1218 bp, Artificial Sequence
  derived and/or modified sequence
atggagaggttgcagaagcaacccctgacatcacctggtagcgttagtcctagccgggattcaagcgtcccagggagtccctcctccatcgtagcaaagatggacaatcaggttcttggctacaaagacctggctgccatccccaaggacaaggccatcctggacatcgaacggcctgacctaatgatttacgagccccactttacttacagcttactggaacacgtggaactgccccgcagccgcgaaaggagcctgagtccaaagtctacatctccacctccctcgcctgaggtctgggccgattccaggtcaccaggaatcattagtcaggctagcgcaccaagaaccactggaaccccccgcacctccttgccccacttccaccatcccgagacaagccggccggactctaacatatacaaaaaaccccctatttataagcaaagggaaagcgttggggggtctccacagactaaacacctgatcgaggatctaattattgaatccagcaagttccccgccgcccaacctcctgatcctaaccagcctgccaaaattgaaaccgattattggccctgtcccccgtctctcgccgttgtggagacagagtggcggaaacggaaagccagcagaaggggcgccgaggaagaagaggaagaagaagatgatgactccggagaagagatgaaagccctgcgggagagacagcgggaagagctgtccaaggttacgtcaaatcttgggaaaatgatcctgaaagaagagatggagaaaagcctcccgatacggcgcaagacccgctctctgcccgacagaacaccttttcatacctctttacaccaggggacatctaagtcaagctctctgcctgcctacgggagaacaaccctgtcacgactccagtctaccgagttctccccttcagggagcgagacaggttcgccaggactccagaatggagaggggcaacgcggacggatggatcgaggcaacagtctcccctgcgtgctggagcagaaaatctacccgtacgagatgctggtcgtcacaaataagggacggacaaaactgccaccaggtgttgacagaatgaggctcgaacgtcacttgtcagctgaagacttctctcgcgtgttcgctatgtccccagaagagtttgggaaactggctttatggaaaagaaatgagctgaagaaaaaagccagcctgttctag

SEQ ID NO: 284616 - DNA, 1218 bp, Artificial Sequence
  derived and/or modified sequence
atggagcggctgcagaagcagccacttacctcgccaggctccgtgtccccttccagggactctagcgtgcccggctccccctcaagtatcgtggccaaaatggataaccaggtcctgggatacaaggacctggcagccatccccaaggacaaagccatcctggacatagaacggcctgacctgatgatctatgaaccacacttcacatactcgctgctggagcatgtcgagctaccccggtcccgcgaacgctcactcagccccaaatccaccagccctccgcccagtccagaggtctgggcagactctagatcgcctggaatcatcagtcaggcttcagccccccggacgaccgggactccgcgcacctcgctcccccactttcatcaccccgagaccagtcggcctgactccaatatatacaaaaagcccccgatttacaaacagcgggagagcgtcgggggcagcccccagactaaacacctcatcgaagacctgattattgagtcttctaagtttcctgccgcgcagcccccagaccccaatcaaccggccaaaatcgagactgattactggccttgccctccttccctcgcagttgtggaaacggaatggaggaagcgaaaagcatccaggagaggggctgaggaagaagaagaggaggaggatgacgattctggagaggagatgaaggctctccgggagcgacaacgcgaggagctgtctaaggtgacatctaatctcggcaagatgatcctcaaagaggagatggagaagtcccttcccattagaaggaagaccaggagcctcccggaccgcacccctttccacacctcccttcatcaaggtacgtcaaaatccagttcactcccagcctacgggagaactacattgtccaggcttcagagtaccgaattctcacccagtgggtccgaaacgggcagtcccggactgcagaatggagagggccagcgtggccgcatggacagaggaaactctcttccctgtgttctggaacagaaaatctacccatacgagatgctggtggtaactaataagggcaggacaaaacttccacctggagttgacaggatgcgcttggaacgccacctgagcgcagaggattttagcagggtgttcgccatgagccctgaggaatttggcaagttggctctgtggaaaaggaatgaattgaaaaaaaaagcatcattgttttag

SEQ ID NO: 284617 - DNA, 1218 bp, Artificial Sequence
  derived and/or modified sequence
atggagcggctgcagaagcagcccctgaccagccctggctctgtgagccccagccgggacagctctgtgcccggcagccccagcagcatcgtggccaagatggacaaccaggtgctgggctacaaggacctggccgccatccccaaggacaaggccatcctggacatcgagaggccagacctgatgatctatgagccccacttcacctacagcctgctggagcacgtggagctgcccaggagccgggagaggagcctgagccccaagagcaccagccccccacccagccctgaggtgtgggccgacagccgcagccctggcatcatcagccaggccagcgcccccaggaccaccggcacccccaggaccagcctgccccacttccaccaccctgagaccagcaggccagacagcaacatctacaagaagccacccatctacaagcagcgggagagcgtgggcggcagcccccagaccaagcacctgattgaggacctgatcatcgagagcagcaagtttcctgctgcccagcccccagaccccaaccagcctgccaagattgaaacagactactggccctgcccccccagcctggccgtggtggagacagagtggaggaagaggaaggccagcagaagaggagctgaggaggaggaggaggaggaggatgatgacagcggggaggagatgaaggccctgcgggagcggcagcgggaggagctgagcaaggtgaccagcaacctgggcaagatgatcctgaaggaggagatggagaagagcctgcccatccggaggaagaccaggagcctgcctgacaggacccccttccacaccagcctgcaccagggcaccagcaagagcagcagcctgcctgcctacggccgcaccaccctgagccggctgcagagcacagagttcagccccagcggcagcgagaccggcagccctggcctgcagaatggagagggccagaggggccgcatggaccggggcaacagcctgccctgtgtgctggagcagaagatctacccctatgagatgctggtggtgaccaacaagggccgcaccaagctgcccccaggagtggacaggatgaggctggagcggcacctgtctgctgaggacttcagccgggtgtttgccatgagccctgaggagtttgggaagctggccctgtggaagagaaatgagctgaagaagaaggccagcctcttctag

SEQ ID NO: 284618 - DNA, 1218 bp, Artificial Sequence
  derived and/or modified sequence
atggagcggctgcagaagcagcccctgaccagccccggcagcgtgagcccatccagagattctagtgtgcctggatccccctcttcaatcgtggctaaaatggacaatcaggtcctcggttataaggatctggcggccattcccaaggataaagctatcctagatatcgagagacccgacctgatgatatatgaaccccatttcacttatagcctcctggagcatgtggagctacctcggtcacgggaaagaagcttgagcccaaaaagcacgtcccccccacccagccccgaagtttgggccgatagtcgaagtcccggcatcatcagccaagcttccgccccacgaaccacgggcactccacggacttccctgcctcacttccaccatcccgaaacatccaggcctgactccaacatctacaagaaaccaccaatctacaagcagagagagtccgtcggaggatctccccagactaagcacctaatcgaagatctgattatcgagtcttccaagtttcccgcagcacagccgcctgaccccaaccagcctgccaaaatcgagaccgactattggccttgcccccccagcctggccgttgtcgagaccgaatggcgcaagaggaaagcatctcgcaggggggcggaggaggaggaagaagaggaagatgacgatagtggtgaagagatgaaggcactgcgggaacgccagagggaagaactgtctaaggtcaccagcaatttgggcaaaatgattctaaaggaagagatggaaaaatccctgcccattcgaaggaaaacccggagcctccccgatcgcacccctttccatacatctttacatcagggtaccagcaagagcagtagtctgcctgcctacggtagaaccactctgagccggctgcagagcaccgagtttagccctagcggctcggaaaccggatcgcccggcctccagaacggggaagggcaaagaggaaggatggacagaggcaactccctcccttgtgtgttggaacaaaaaatttatccatacgaaatgctagttgttacgaacaaagggagaaccaagctgccccccggggttgataggatgagactcgagaggcacctttccgctgaagacttcagccgggttttcgctatgtcaccagaagaattcgggaaattggctttatggaagaggaatgagctgaaaaagaaggcctccctcttttag

SEQ ID NO: 284619 - DNA, 1218 bp, Artificial Sequence
  derived and/or modified sequence
atggagcggctgcagaagcagcccctgaccagccccggcagcgtgtcccccagcagagattctagcgtccccgggtctcccagctccattgttgcaaagatggataatcaggttctgggctataaagacctagcagccatccccaaggataaagccatcctggatattgagcgcccagatcttatgatatatgagccacactttacttacagtctcctggagcacgtcgagctcccccgaagcagggaacgcagcttatcgcctaaaagcaccagcccacccccttcacctgaggtttgggccgactccagaagcccaggcataatttcccaggcatcagcccctagaacaaccgggacgccgcggaccagcctaccacattttcaccatcccgaaacctcccgacctgatagtaacatctacaaaaaacccccaatatataagcagagggagagcgtgggcgggagcccccagaccaagcacctgattgaggaccttatcattgagtcttctaagtttcctgcagctcaacctcccgaccctaatcagcccgccaagatcgaaaccgactattggccctgtcctccctctttggctgtggtggaaactgaatggcgcaagcggaaggcctcccgccgtggcgcggaggaagaagaggaagaggaggatgatgattctggggaggagatgaaggcgctgagagagcggcagcgtgaagaactctctaaggtgacatccaacctggggaagatgatcttaaaggaagaaatggagaaaagccttcctattcgtcgcaaaacacgaagccttccagacagaacaccattccacacctcccttcaccagggaacctcaaagtctagcagcctgcctgcctatggccgaaccacgttaagcagactccaaagcacagagttctctccaagcgggtccgagactggaagccctggtctgcaaaatggcgaaggccagaggggaagaatggacagaggtaattccctgccttgcgtcttggaacagaagatttacccatacgagatgctggtcgtcactaataaagggcggactaagttacccccaggggttgaccggatgcgtctggaacgccacctgtcagctgaggacttctcccgagtgtttgcaatgtcccccgaggagttcggcaagctggccctgtggaaacgtaacgagctcaaaaagaaagcctcactgttctag

SEQ ID NO: 284620 - DNA, 1218 bp, Artificial Sequence
  derived and/or modified sequence
atggagcggctgcagaagcagcccctgaccagccccggcagcgtgagccctagccgggacagctctgttcctggcagccctagtagtattgtggctaagatggacaatcaggtgctgggctacaaagacctggccgccataccaaaagataaggcgatactcgacattgaaagacccgatctcatgatttacgagccacacttcacatattctctgctggagcacgtggagctcccacggtccagagagcggagtctgagccctaagagtacatctccacccccatctcctgaggtatgggctgattctcggtcgccaggcatcatctctcaggcaagtgcaccccggacaacgggtacgccacggaccagcctaccccatttccaccatccagagaccagccgacccgattccaacatctataagaagcctcccatatacaaacaacgcgagtctgttggtggtagcccccaaactaaacacctgattgaagacctgatcattgaaagcagtaaattcccggctgcacagccaccagatcccaaccagccggccaagatagagacggactattggccatgccctccaagcctcgcagtggtggagacagaatggcgaaagcgcaaagccagtagaagaggggccgaggaggaggaagaagaagaagacgatgacagcggtgaggagatgaaggctctgagggaacggcagagggaggagttatcaaaagtcactagcaacctcggcaagatgatcctgaaggaggaaatggaaaaaagcttgcccatacgtcggaaaacgcgttccctcccagatcggacgccatttcacacttcactgcaccaggggactagtaagtctagcagtcttcctgcttacgggaggaccactttatctagactgcagagcacagagttctcccctagcgggtccgagaccggttcacctggattgcagaacggagaagggcaacggggtagaatggatcggggcaattcccttccttgtgtgcttgaacaaaagatctacccgtacgagatgctcgtcgtaaccaacaaaggccggacaaagcttcctcccggagtagaccggatgagactggagaggcatctctccgcggaagatttcagtcgcgtgtttgccatgtcacctgaggaatttggcaagctggctttatggaagcgaaacgaactgaagaagaaggccagcctgttctag

SEQ ID NO: 284621 - DNA, 1218 bp, Artificial Sequence
  derived and/or modified sequence
atggagcggctgcagaagcagcccctgaccagccccggcagcgtgagcccttctcgtgattcgtcagtccctgggagcccttcctcaattgtcgccaaaatggacaatcaggttcttgggtacaaggatctcgctgccatcccaaaggataaggcaatactggatatcgagagaccagatctcatgatttacgagccccatttcacatactcgcttttggaacacgtcgaactgccaagaagcagagaaagaagcctcagtcctaaatcaaccagtccccccccaagccctgaggtttgggcggacagccgaagcccaggaatcatttcccaggctagcgccccaaggaccacgggaactccaagaacatcattaccacactttcatcatcctgaaacaagcagacctgacagcaacatttataagaagccgcccatatataagcagagggagagcgtcggagggtccccgcagacgaagcatttgatcgaagatctaatcatcgagagctccaagttccctgccgcccagccgccagatccaaatcaaccagctaagatcgagacagactactggccgtgtccacccagcttggctgtggtggagacggaatggcggaagcgtaaggcctccaggcgtggagctgaagaggaggaggaggaggaggacgacgattccggggaggagatgaaagctcttagggaacgccaaagagaagagctgagtaaggtaacgtctaatttgggaaagatgatactcaaagaggagatggagaagtctttgcccatacgtcggaagacacgaagtctccccgatagaacgccattccacactagtctgcatcaggggacatcaaagtcatcgtcactgcctgcttatggtcggacaactttgtccaggctccaatcaacagaattcagtccctctggctccgaaaccggcagccctggcctgcagaatggggagggccagcgggggcgaatggatcggggaaactccctgccctgtgtactcgagcagaagatttatccctatgagatgcttgtagtgacaaacaagggacggacaaagctccctcctggcgtggaccggatgcgactggaaagacatctgtctgccgaggatttcagcagggtgttcgccatgagccccgaggagttcggaaaactggccctgtggaaaaggaatgaattgaagaagaaggcttctttattctag

SEQ ID NO: 284622 - DNA, 1218 bp, Artificial Sequence
  derived and/or modified sequence
atggaaagactacagaaacaacccctgacatccccgggatccgtctctccatcgcgtgacagttcagtgccagggagtccctcaagcattgtggcaaagatggacaatcaggtcctggggtacaaagatttggccgctattcctaaggacaaagcaattctagacattgaaagacctgacctgatgatatatgagccacattttacttacagccttctggagcacgtcgaactgccacggagtagggaacgctcgctaagtcccaagagcacgagtcctcctccatcaccggaagtttgggccgacagccggagcccagggattattagtcaggcctccgccccaaggaccaccggtacacccagaactagcctacctcactttcaccacccagaaaccagccgccctgatagcaatatctataagaagccgccaatatataagcagcgcgaatccgtggggggttccccccaaacgaagcacctgattgaggacttgattattgagagctctaaatttcccgctgcacagccgcctgaccccaatcagccagccaagatagagaccgactattggccatgtcctccctccttggctgtggtggagactgaatggagaaagcggaaggcctcgagacggggtgccgaagaggaggaagaagaggaggatgacgactccggggaagaaatgaaagcactgcgtgaaaggcagcgggaagagttgagcaaggtgacttcaaaccttggaaagatgatcctcaaggaggaaatggaaaaaagcctgccaatccgcaggaagacccggtctttgcctgataggacacccttccacacctctctgcaccaaggaacgtcaaaatcatctagcctgccagcttacggaaggaccactctgtcaagacttcagtctacggaattttcaccgagcggatccgaaacagggtcacccggactgcaaaatggtgaagggcagagagggaggatggaccggggaaatagtctcccatgcgtcttggagcaaaagatttatccatacgaaatgctagtggtaacaaacaaaggcaggacaaagctgcctcctggcgtggacagaatgagactggagagacacttgagcgccgaggatttctcgcgggtgtttgccatgagccccgaggagtttggtaagctcgcactatggaagaggaatgaactcaaaaaaaaggcctctctcttttag

SEQ ID NO: 284623 - DNA, 1218 bp, Artificial Sequence
  derived and/or modified sequence
atggagcggctgcagaagcaacccctgacctcaccaggatcggtgagtccttctcgagattctagcgtacccggatccccttcaagcatcgtagccaaaatggataatcaggtgctggggtacaaggacctggctgccataccaaaggataaagctattctcgatattgagaggcccgatctgatgatttatgaacctcactttacctactcactattggagcatgttgagctgcccaggtcacgggagcgatccctgtctccaaaatcaacatctccccctcccagccccgaagtgtgggctgacagtcgcagccccggtattataagtcaggccagcgcccctcgtactactggaacaccaaggacttctctgccccacttccatcaccccgagacatcccggcctgactctaatatatataaaaaaccgcctatctacaaacagagggagagtgtcggaggttccccccaaaccaagcatctgatcgaagatctcattattgaatcttcaaagttccccgctgcacagcctcccgatccgaatcagcccgctaaaattgagacagactattggccctgtccgccttcgctggcagtggtggaaaccgagtggagaaagcgaaaagcttctaggcgaggggctgaggaggaagaggaagaagaggacgacgattctggggaagagatgaaggctttacgggagaggcaacgcgaggaactaagcaaagtgacctctaacctgggcaagatgatcctgaaggaagagatggaaaagtccttgcccattagacgaaaaacccggagccttccagataggaccccgttccacaccagcctgcaccaggggacatccaaatcgtcctctctccctgcttacggcagaactactctatctcgcctacagtccacggagttctcccccagtggatccgagacaggctcgcctggtctgcagaatggtgagggacagcgcggacgcatggataggggaaattctttgccttgtgtgttggagcaaaagatttacccgtatgagatgctggtagttaccaacaagggcaggaccaaactgccgcctggtgtagataggatgcgcctggaaaggcacctgtctgccgaggacttttccagggtgtttgccatgagtccagaggaatttggtaagttagccttgtggaagagaaacgaactgaaaaagaaagcatctctattttag

SEQ ID NO: 284624 - DNA, 1218 bp, Artificial Sequence
  derived and/or modified sequence
atggagcgcttgcagaagcaaccactgacctccccaggatcagttagccccagtcgggacagcagtgtcccaggaagccccagctccatcgtggccaaaatggataaccaggtactgggttacaaagatctcgctgcgattcctaaggataaggcaatcctggatattgaacgccctgacctgatgatttacgagcctcatttcacttactctctgcttgagcacgtggaactgcccagaagtagagagcgttcactgtccccaaaatccacctctccacccccatccccagaggtgtgggccgactcccgcagtcctggaatcattagtcaagcaagcgcgcctagaaccaccggaacacctcggacatccctgccccacttccaccaccccgaaacctctcgcccagactcgaacatatacaaaaagcctcccatctacaaacagagggagtcagtgggtggcagccctcagacgaagcatctgatcgaggaccttatcatcgaatctagcaaattccccgcagcccagcctcctgatccaaatcagccagctaaaattgaaacagactattggccatgtcccccaagtttagccgtggttgagaccgaatggagaaagaggaaagcctctcgtcgcggagctgaggaggaagaagaggaggaggacgacgatagtggcgaggaaatgaaggccttgcgtgaacgtcaaagggaagagctctcaaaggtcacgtccaacctcggcaagatgattctgaaggaggaaatggagaagtcactgccgattcgccgtaagacccgcagtctgcccgacagaaccccctttcatacttcactgcatcaggggacttcgaagtcatcctcactgccggcttatggaagaacaaccctgagcaggctgcagtcaacagagttcagtcccagcgggtccgaaacaggatcacctgggctgcaaaatggcgagggtcagcgaggtagaatggaccgcggtaactccctcccctgcgttcttgagcaaaagatctatccgtacgagatgttggtggtgacaaataaggggagaaccaaactgccaccaggagtggacaggatgagacttgagcgccacctgagcgccgaagattttagcagagtcttcgccatgagcccggaggagtttggtaagctggctttgtggaagcggaacgaactcaagaaaaaagcgagccttttctag

SEQ ID NO: 284625 - DNA, 1218 bp, Artificial Sequence
  derived and/or modified sequence
atggaacgcttacagaaacagcccttgacttcgccagggtccgtcagcccttctcgtgacagtagcgtccccggatctccaagttccatcgttgcaaaaatggataaccaggtccttggatataaagatctagctgccataccaaaagacaaggcaatcttggacatcgagcggcctgacctgatgatttacgagcctcactttacctactctttgctggaacacgtcgaactgcccaggagccgagagcgttcactgagtccgaagtctaccagcccccctcccagtccagaggtgtgggccgactcccgaagccctggcataatttctcaagcgtcagcccctcgtaccaccggtaccccaaggacatcactgccgcatttccatcaccccgagacttctcgccctgactccaacatctataaaaagcctccaatttataagcagagagagagcgtaggtggcagcccccagacgaagcatctgatcgaggatctgataatcgagtcttcaaagttccccgcagctcaaccacccgatcccaatcagccagcgaaaattgagactgactactggccctgtccaccctccctcgctgtcgttgaaacagaatggcgcaagagaaaggctagccgccgaggagctgaggaagaagaggaggaggaagacgacgatagcggcgaagaaatgaaggcacttagagagcgccagcgagaggagttgagcaaggttacaagcaacctgggaaaaatgatcctgaaggaagaaatggagaagtccctgcccatccggaggaagacacgaagtctgcccgaccgcactcctttccacacctctcttcaccaggggacatctaaatcatcctcactgcccgcttacggtcgtaccacactttctcggctgcagtctactgaattctcaccatcagggtcggagactgggagccctggcctacagaatggggagggtcaacgtgggaggatggaccgaggcaatagcctaccttgtgtgcttgagcaaaagatctacccatatgaaatgctggttgtcacaaataagggcagaacgaagttgcctcctggggtcgacagaatgcggttggagcgccacctcagcgccgaggacttcagtcgcgtgtttgccatgagcccagaagagtttggaaagcttgccctttggaaaagaaacgaactcaagaagaaagcctccctcttctag

SEQ ID NO: 284626 - DNA, 1218 bp, Artificial Sequence
  derived and/or modified sequence
atggagagactgcagaagcagcccctgaccagccccggcagcgtgagccccagcagagacagcagcgtgcccggcagccccagcagcatcgtggccaagatggacaaccaggtgctgggctacaaggacctggccgccatccccaaggacaaggccatcctggacatcgagagacccgacctgatgatctacgagccccacttcacctacagcctgctggagcacgtggagctgcccagaagcagagagagaagcctgagccccaagagcaccagccccccccccagccccgaggtgtgggccgacagcagaagccccggcatcatcagccaggccagcgcccccagaaccaccggcacccccagaaccagcctgccccacttccaccaccccgagaccagcagacccgacagcaacatctacaagaagccccccatctacaagcagagagagagcgtgggcggcagcccccagaccaagcacctgatcgaggacctgatcatcgagagcagcaagttccccgccgcccagccccccgaccccaaccagcccgccaagatcgagaccgactactggccctgcccccccagcctggccgtggtggagaccgagtggagaaagagaaaggccagcagaagaggcgccgaggaggaggaggaggaggaggacgacgacagcggcgaggagatgaaggccctgagagagagacagagagaggagctgagcaaggtgaccagcaacctgggcaagatgatcctgaaggaggagatggagaagagcctgcccatcagaagaaagaccagaagcctgcccgacagaacccccttccacaccagcctgcaccagggcaccagcaagagcagcagcctgcccgcctacggcagaaccaccctgagcagactgcagagcaccgagttcagccccagcggcagcgagaccggcagccccggcctgcagaacggcgagggccagagaggcagaatggacagaggcaacagcctgccctgcgtgctggagcagaagatctacccctacgagatgctggtggtgaccaacaagggcagaaccaagctgccccccggcgtggacagaatgagactggagagacacctgagcgccgaggacttcagcagagtgttcgccatgagccccgaggagttcggcaagctggccctgtggaagagaaacgagctgaagaagaaggccagcctgttctag

SEQ ID NO: 284627 - DNA, 2554 bp, Artificial Sequence
  derived and/or modified sequence
gttgcctggttgtgagagtcaggggagcagggacaggtccaagacaaggaaggcagttgggctgtgggaatggggagcccagggaaggcctccagagctggcctggagagtcaccgccgagggatgaggacgcgccagcccgggggaacgcgccagctgctttcgcggccccaagcgcgcagcgcccagcagccgcgccgagcctgacacgctgtcctctcccctcgcgcacagggctctgcgagtgacccggcgggcgagctccgtgctgcatggaacggctgcagaagcaaccacttacctcccccgggagcgtgagcccctcccgagattccagtgtgcctggctctccctccagcatcgtggccaagatggacaatcaggtgctgggctacaaggacctggctgccatccccaaggacaaggccatcctggacatcgagcggcccgacctcatgatctacgagcctcacttcacttattccctcctggaacacgtggagctgcctcgcagccgcgagcgctcgctgtcacccaaatccacatcccccccaccatccccagaggtgtgggcggacagccggtcgcctggaatcatctctcaggcctcggcccccagaaccactggaaccccccggaccagcctgccccatttccaccaccctgagacctcccgcccagattccaacatctacaagaagcctcccatctataagcagagagagtccgtgggaggcagccctcagaccaagcacctcatcgaggatctcatcatcgagtcatccaagtttcctgcagcccagcccccagaccccaaccagccagccaaaatcgaaaccgactactggccatgccccccgtctctggctgttgtggagacagaatggaggaagcggaaggcgtctcggaggggagcagaggaagaggaggaggaggaagatgacgactctggagaggagatgaaggctctcagggagcgtcagagagaggaactcagtaaggttacttccaacttgggaaagatgatcttgaaagaagagatggaaaagtcattgccgatccgaaggaaaacccgctctctgcctgaccggacacccttccatacctccttgcaccagggaacgtctaaatcttcctctctccccgcctatggcaggaccaccctgagccggctacagtccacagagttcagcccatcagggagtgagactggaagcccaggcctgcagaacggagagggccagagggggaggatggaccgggggaactccctgccctgtgtgctggagcagaagatctatccctatgaaatgctagtggtgaccaacaaggggcgaaccaagctgccaccgggggtggatcggatgcggcttgagaggcatctgtctgccgaggacttctcaagggtatttgccatgtcccctgaagagtttggcaagctggctctgtggaagcggaatgagctcaagaagaaggcctctctcttctgatggcccccacctgctccgggacggcccccttacccctgctgcttcagggtttttccccggcgggttgggaggggcaggaggtggggtggaaatagggtgggctcctttcctcaggtagagtggggggccaaaacctctgcagtccccggcagtgagctatggactttcttccccctcacaaggctgggggcctcctgctctcgtccctggccctccctgcacagggcaaagccagtctgggctctggcacacagagttcatgtttgcgccctctccctgcccctcaccccagagggtgaggaggaatgaggggcattggtggttaggccggttggctgtcttgaacagctggagggaagatgcaggggtgggaagcggccaggcagaaagagctccaggctcttgtgtcgcccacccagccctcccatactcactcctgacagctttcctgcactgcagcctcctgctcctctgactctagtgggaacaggccccagctcagcctccggcagggaggtcacccctccacttcagcttgccctgacctccgctcgcaaaccccgagcttccaagccttttgctccagccctgcggcttccccagaagcctgggcttagggtggagatgccgcctacacacgatcctggccctccacctgcctccaggccacgaaatgggaattccagcactaagccaggcaccgggcagaagctgggccttccgcctcccttggatggggtcaagaggccaggcctggcacattttggagtgtcctggctaccagctctcacctacacccacgcacccccccacacactatgctctctcaagaatgtaatttattggggcccccccagctgctttcctcacctgcccctgccctaccttacacccccagcttgacttctttccagtccacgtgtgtatataatgatatctatatttttgcccaggtctgggtattgctcctgcccagaccctgacatccctttccactgtgtgtgtgaccatgctgggggagggggactctgcttggaattaaaaggttgcattgggtccctaca

SEQ ID NO: 284628 - DNA, 2772 bp, Artificial Sequence
  derived and/or modified sequence
gagaaaagatgaagaaagccaagaaaagggaccagaagagaaagcagaaagacaggaggaagaaagggagagagggccaggcagtcgcactgtgaacagaacaggagaaggcgaagcggggcaaagttccctgcccaccgacgccagcctgcttggatgacttgcctcgtttcataattcacttactgtctgcaccagccggcctccagcctggctggaccctgctgcctgtgtggcccggagccagaggcccccacactcccagctgctcttctacagatgccatcaacgagcaggactctgggtggctccactgtctaagcctggagagtcaccgccgagggatgaggacgcgccagcccgggggaacgcgccagctgctttcgcggccccaagcgcgcagcgcccagcagccgcgccgagcctgacacgctgtcctctcccctcgcgcacagggctctgcgagtgacccggcgggcgagctccgtgctgcatggaacggctgcagaagcaaccacttacctcccccgggagcgtgagcccctcccgagattccagtgtgcctggctctccctccagcatcgtggccaagatggacaatcaggtgctgggctacaaggacctggctgccatccccaaggacaaggccatcctggacatcgagcggcccgacctcatgatctacgagcctcacttcacttattccctcctggaacacgtggagctgcctcgcagccgcgagcgctcgctgtcacccaaatccacatcccccccaccatccccagaggtgtgggcggacagccggtcgcctggaatcatctctcaggcctcggcccccagaaccactggaaccccccggaccagcctgccccatttccaccaccctgagacctcccgcccagattccaacatctacaagaagcctcccatctataagcagagagagtccgtgggaggcagccctcagaccaagcacctcatcgaggatctcatcatcgagtcatccaagtttcctgcagcccagcccccagaccccaaccagccagccaaaatcgaaaccgactactggccatgccccccgtctctggctgttgtggagacagaatggaggaagcggaaggcgtctcggaggggagcagaggaagaggaggaggaggaagatgacgactctggagaggagatgaaggctctcagggagcgtcagagagaggaactcagtaaggttacttccaacttgggaaagatgatcttgaaagaagagatggaaaagtcattgccgatccgaaggaaaacccgctctctgcctgaccggacacccttccatacctccttgcaccagggaacgtctaaatcttcctctctccccgcctatggcaggaccaccctgagccggctacagtccacagagttcagcccatcagggagtgagactggaagcccaggtctccagaacggagagggccagagggggaggatggaccgggggaactccctgccctgtgtgctggagcagaagatctatccctatgaaatgctagtggtgaccaacaaggggcgaaccaagctgccaccgggggtggatcggatgcggcttgagaggcatctgtctgccgaggacttctcaagggtatttgccatgtcccctgaagagtttggcaagctggctctgtggaagcggaatgagctcaagaagaaggcctctctcttctgatggcccccacctgctccgggacggcccccttacccctgctgcttcagggtttttccccggcgggttgggaggggcaggaggtggggtggaaatagggtgggctcctttcctcaggtagagtggggggccaaaacctctgcagtccccggcagtgagctatggactttcttccccctcacaaggctgggggcctcctgctctcgtccctggccctccctgcacagggcaaagccagtctgggctctggcacacagagttcatgtttgcgccctctccctgcccctcaccccagagggtgaggaggaatgaggggcattggtggttaggccggttggctgtcttgaacagctggagggaagatgcaggggtgggaagcggccaggcagaaagagctccaggctcttgtgtcgcccacccagccctcccatactcactcctgacagctttcctgcactgcagcctcctgctcctctgactctagtgggaacaggccccagctcagcctccggcagggaggtcacccctccacttcagcttgccctgacctccgctcgcaaaccccgagcttccaagccttttgctccagccctgcggcttccccagaagcctgggcttagggtggagatgccgcctacacacgatcctggccctccacctgcctccaggccacgaaatgggaattccagcactaagccaggcaccgggcagaagctgggccttccgcctcccttggatggggtcaagaggccaggcctggcacattttggagtgtcctggctaccagctctcacctacacccacgcacccccccacacactatgctctctcaagaatgtaatttattggggcccccccagctgctttcctcacctgcccctgccctaccttacacccccagcttgacttctttccagtccacgtgtgtatataatgatatctatatttttgcccaggtctgggtattgctcctgcccagaccctgacatccctttccactgtgtgtgtgaccatgctgggggagggggactctgcttggaattaaaaggttgcattgggtccct

SEQ ID NO: 284629 - DNA, 2081 bp, Artificial Sequence
  derived and/or modified sequence
gttgcctggttgtgagagtcaggggagcagggacaggtccaagacaaggaaggcagttgggctgtgggaatggggagcccagggaaggcctccagagctggcctggagagtcaccgccgagggatgaggacgcgccagcccgggggaacgcgccagctgctttcgcggccccaagcgcgcagcgcccagcagccgcgccgagcctgacacgctgtcctctcccctcgcgcacagggctctgcgagtgacccggcgggcgagctccgtgctgcatggaacggctgcagaagcaaccacttacctcccccgggagcgtgagcccctcccgagattccagtgtgcctggctctccctccagcatcgtggccaagatggacaatcaggtgctgggctacaaggacctggctgccatccccaaggacaaggccatcctggacatcgagcggcccgacctcatgatctacgagcctcacttcacttattccctcctggaacacgtggagctgcctcgcagccgcgagcgctcgctgtcacccaaatccacatcccccccaccatccccagaggtgtgggcggacagccggtcgcctggaatcatctctcaggcctcggcccccagaaccactggaaccccccggaccagcctgccccatttccaccaccctgagacctcccgcccagattccaacatctacaagaagcctcccatctataagcagagagagtccgtgggaggcagccctcagaccaagcacctcatcgaggatctcatcatcgagtcatccaagtttcctgcagcccagcccccagaccccaaccagccagccaaaatcgaaaccgactactggccatgccccccgtctctggctgttgtggagacagaatggaggaagcggaaggcgtctcggaggggagcagaggaagaggaggaggaggaagatgacgactctggagaggagatgaaggctctcagggagcgtcagagagaggaactcagtaaggttacttccaacttgggaaagatgatcttgaaagaagagatggaaaagtcattgccgatccgaaggaaaacccgctctctgcctgaccggacacccttccatacctccttgcaccagggaacgtctaaatcttcctctctccccgcctatggcaggaccaccctgagccggctacagtccacagagttcagcccatcagggagtgagactggaagcccaggcctgcagaacggagagggccagagggggaggatggaccgggggaactccctgccctgtgtgctggagcagaagatctatccctatgaaatgctagtggtgaccaacaaggggcgaaccaagctgccaccgggggtggatcggatgcggcttgagaggcatctgtctgccgaggacttctcaagggtatttgccatgtcccctgaagagtttggcaagctggctctgtggaagcggaatgagctcaagaagaaggcctctctcttcggggcattggtggttaggccggttggctgtcttgaacagctggagggaagatgcaggggtgggaagcggccaggcagaaagagctccaggctcttgtgtcgcccacccagccctcccatactcactcctgacagctttcctgcactgcagcctcctgctcctctgactctagtgggaacaggccccagctcagcctccggcagggaggtcacccctccacttcagcttgccctgacctccgctcgcaaaccccgagcttccaagccttttgctccagccctgcggcttccccagaagcctgggcttagggtggagatgccgcctacacacgatcctggccctccacctgcctccaggccacgaaatgggaattccagcactaagccaggcaccgggcagaagctgggccttccgcctcccttggatggggtcaagaggccaggcctggcacattttggagtgtcctggctaccagctctcacctacacccacgcacccccccacacactatgctctctcaagaatgtaatttattggggcccccccagctgctttcctcacctgcccctgccctaccttacacccccagcttga

SEQ ID NO: 284630 - DNA, 2508 bp, Artificial Sequence
  derived and/or modified sequence
tctctgaggaagaggcagcgggaggcacagcttcctcctccccccctccctgctgccgcggctgagccgggcctgagctgccggcaggttgtcttggcaacaggaggtggagaggagatgcgccgagggatggaggtgtatgtcaccgaggaggctgctgcgctcctgccccacgccctgggcccttgaagggctctgcgagtgacccggcgggcgagctccgtgctgcatggaacggctgcagaagcaaccacttacctcccccgggagcgtgagcccctcccgagattccagtgtgcctggctctccctccagcatcgtggccaagatggacaatcaggtgctgggctacaaggacctggctgccatccccaaggacaaggccatcctggacatcgagcggcccgacctcatgatctacgagcctcacttcacttattccctcctggaacacgtggagctgcctcgcagccgcgagcgctcgctgtcacccaaatccacatcccccccaccatccccagaggtgtgggcggacagccggtcgcctggaatcatctctcaggcctcggcccccagaaccactggaaccccccggaccagcctgccccatttccaccaccctgagacctcccgcccagattccaacatctacaagaagcctcccatctataagcagagagagtccgtgggaggcagccctcagaccaagcacctcatcgaggatctcatcatcgagtcatccaagtttcctgcagcccagcccccagaccccaaccagccagccaaaatcgaaaccgactactggccatgccccccgtctctggctgttgtggagacagaatggaggaagcggaaggcgtctcggaggggagcagaggaagaggaggaggaggaagatgacgactctggagaggagatgaaggctctcagggagcgtcagagagaggaactcagtaaggttacttccaacttgggaaagatgatcttgaaagaagagatggaaaagtcattgccgatccgaaggaaaacccgctctctgcctgaccggacacccttccatacctccttgcaccagggaacgtctaaatcttcctctctccccgcctatggcaggaccaccctgagccggctacagtccacagagttcagcccatcagggagtgagactggaagcccaggtctccagaacggagagggccagagggggaggatggaccgggggaactccctgccctgtgtgctggagcagaagatctatccctatgaaatgctagtggtgaccaacaaggggcgaaccaagctgccaccgggggtggatcggatgcggcttgagaggcatctgtctgccgaggacttctcaagggtatttgccatgtcccctgaagagtttggcaagctggctctgtggaagcggaatgagctcaagaagaaggcctctctcttctgatggcccccacctgctccgggacggcccccttacccctgctgcttcagggtttttccccggcgggttgggaggggcaggaggtggggtggaaatagggtgggctcctttcctcaggtagagtggggggccaaaacctctgcagtccccggcagtgagctatggactttcttccccctcacaaggctgggggcctcctgctctcgtccctggccctccctgcacagggcaaagccagtctgggctctggcacacagagttcatgtttgcgccctctccctgcccctcaccccagagggtgaggaggaatgaggggcattggtggttaggccggttggctgtcttgaacagctggagggaagatgcaggggtgggaagcggccaggcagaaagagctccaggctcttgtgtcgcccacccagccctcccatactcactcctgacagctttcctgcactgcagcctcctgctcctctgactctagtgggaacaggccccagctcagcctccggcagggaggtcacccctccacttcagcttgccctgacctccgctcgcaaaccccgagcttccaagccttttgctccagccctgcggcttccccagaagcctgggcttagggtggagatgccgcctacacacgatcctggccctccacctgcctccaggccacgaaatgggaattccagcactaagccaggcaccgggcagaagctgggccttccgcctcccttggatggggtcaagaggccaggcctggcacattttggagtgtcctggctaccagctctcacctacacccacgcacccccccacacactatgctctctcaagaatgtaatttattggggcccccccagctgctttcctcacctgcccctgccctaccttacacccccagcttgacttctttccagtccacgtgtgtatataatgatatctatatttttgcccaggtctgggtattgctcctgcccagaccctgacatccctttccactgtgtgtgtgaccatgctgggggagggggactctgcttggaattaaaaggttgcattgggtccct

SEQ ID NO: 284631 - DNA, 2735 bp, Artificial Sequence
  derived and/or modified sequence
ccagaagagaaagcagaaagacaggaggaagaaagggagagagggccaggcagtcgcactgtgaacagaacaggagaaggcgaagcggggcaaagttccctgcccaccgacgccagcctgcttggatgacttgcctcgtttcataattcacttactgtctgcaccagccggcctccagcctggctggaccctgctgcctgtgtggcccggagccagaggcccccacactcccagctgctcttctacagatgccatcaacgagcaggactctgggtggctccactgtctaagcctggagagtcaccgccgagggatgaggacgcgccagcccgggggaacgcgccagctgctttcgcggccccaagcgcgcagcgcccagcagccgcgccgagcctgacacgctgtcctctcccctcgcgcacagggctctgcgagtgacccggcgggcgagctccgtgctgcatggaacggctgcagaagcaaccacttacctcccccgggagcgtgagcccctcccgagattccagtgtgcctggctctccctccagcatcgtggccaagatggacaatcaggtgctgggctacaaggacctggctgccatccccaaggacaaggccatcctggacatcgagcggcccgacctcatgatctacgagcctcacttcacttattccctcctggaacacgtggagctgcctcgcagccgcgagcgctcgctgtcacccaaatccacatcccccccaccatccccagaggtgtgggcggacagccggtcgcctggaatcatctctcaggcctcggcccccagaaccactggaaccccccggaccagcctgccccatttccaccaccctgagacctcccgcccagattccaacatctacaagaagcctcccatctataagcagagagagtccgtgggaggcagccctcagaccaagcacctcatcgaggatctcatcatcgagtcatccaagtttcctgcagcccagcccccagaccccaaccagccagccaaaatcgaaaccgactactggccatgccccccgtctctggctgttgtggagacagaatggaggaagcggaaggcgtctcggaggggagcagaggaagaggaggaggaggaagatgacgactctggagaggagatgaaggctctcagggagcgtcagagagaggaactcagtaaggttacttccaacttgggaaagatgatcttgaaagaagagatggaaaagtcattgccgatccgaaggaaaacccgctctctgcctgaccggacacccttccatacctccttgcaccagggaacgtctaaatcttcctctctccccgcctatggcaggaccaccctgagccggctacagtccacagagttcagcccatcagggagtgagactggaagcccaggcctgcagaacggagagggccagagggggaggatggaccgggggaactccctgccctgtgtgctggagcagaagatctatccctatgaaatgctagtggtgaccaacaaggggcgaaccaagctgccaccgggggtggatcggatgcggcttgagaggcatctgtctgccgaggacttctcaagggtatttgccatgtcccctgaagagtttggcaagctggctctgtggaagcggaatgagctcaagaagaaggcctctctcttctgatggcccccacctgctccgggacggcccccttacccctgctgcttcagggtttttccccggcgggttgggaggggcaggaggtggggtggaaatagggtgggctcctttcctcaggtagagtggggggccaaaacctctgcagtccccggcagtgagctatggactttcttccccctcacaaggctgggggcctcctgctctcgtccctggccctccctgcacagggcaaagccagtctgggctctggcacacagagttcatgtttgcgccctctccctgcccctcaccccagagggtgaggaggaatgaggggcattggtggttaggccggttggctgtcttgaacagctggagggaagatgcaggggtgggaagcggccaggcagaaagagctccaggctcttgtgtcgcccacccagccctcccatactcactcctgacagctttcctgcactgcagcctcctgctcctctgactctagtgggaacaggccccagctcagcctccggcagggaggtcacccctccacttcagcttgccctgacctccgctcgcaaaccccgagcttccaagccttttgctccagccctgcggcttccccagaagcctgggcttagggtggagatgccgcctacacacgatcctggccctccacctgcctccaggccacgaaatgggaattccagcactaagccaggcaccgggcagaagctgggccttccgcctcccttggatggggtcaagaggccaggcctggcacattttggagtgtcctggctaccagctctcacctacacccacgcacccccccacacactatgctctctcaagaatgtaatttattggggcccccccagctgctttcctcacctgcccctgccctaccttacacccccagcttgacttctttccagtccacgtgtgtatataatgatatctatatttttgcccaggtctgggtattgctcctgcccagaccctgacatccctttccactgtgtgtgtgaccatgctgggggagggggactctgcttggaattaaaaggttgcattgg

SEQ ID NO: 284632 - protein, 802 aa, Artificial Sequence
  derived and/or modified sequence
LLPERMSGVSEPLSRVKLGTLRRPEGPAEPMVVVPVDVEKEDVRILKVCFYSNSFNPGKNFKLVKCTVQTEIREIITSILLSGRIGPNIRLAECYGLRLKHMKSDEIHWLHPQMTVGEVQDKYECLHVEAEWRYDLQIRYLPEDFMESLKEDRTTLLYFYQQLRNDYMQRYASKVSEGMALQLGCLELRRFFKDMPHNALDKKSNFELLEKEVGLDLFFPKQMQENLKPKQFRKMIQQTFQQYASLREEECVMKFFNTLAGFANIDQETYRCELIQGWNITVDLVIGPKGIRQLTSQDAKPTCLAEFKQIRSIRCLPLEEGQAVLQLGIEGAPQALSIKTSSLAEAENMADLIDGYCRLQGEHQGSLIIHPRKDGEKRNSLPQIPMLNLEARRSHLSESCSIESDIYAEIPDETLRRPGGPQYGIAREDVVLNRILGEGFFGEVYEGVYTNHKGEKINVAVKTCKKDCTLDNKEKFMSEAVIMKNLDHPHIVKLIGIIEEEPTWIIMELYPYGELGHYLERNKNSLKVLTLVLYSLQICKAMAYLESINCVHRDIAVRNILVASPECVKLGDFGLSRYIEDEDYYKASVTRLPIKWMSPESINFRRFTTASDVWMFAVCMWEILSFGKQPFFWLENKDVIGVLEKGDRLPKPDLCPPVLYTLMTRCWDYDPSDRPRFTELVCSLSDVYQMEKDIAMEQERNARYRTPKILEPTAFQEPPPKPSRPKYRPPPQTNLLAPKLQFQVPEGLCASSPTLTSPMEYPSPVNSLHTPPLHRHNVFKRHSMREEDFIQPSSRGPAAVGG

SEQ ID NO: 284633 - DNA, 2409 bp, Artificial Sequence
  derived and/or modified sequence
ctgctgcccgagagaatgagcggcgtgagcgagcccctgagcagagtgaagctgggcaccctgagaagacccgagggccccgccgagcccatggtggtggtgcccgtggacgtggagaaggaggacgtgagaatcctgaaggtgtgcttctacagcaacagcttcaaccccggcaagaacttcaagctggtgaagtgcaccgtgcagaccgagatcagagagatcatcaccagcatcctgctgagcggcagaatcggccccaacatcagactggccgagtgctacggcctgagactgaagcacatgaagagcgacgagatccactggctgcacccccagatgaccgtgggcgaggtgcaggacaagtacgagtgcctgcacgtggaggccgagtggagatacgacctgcagatcagatacctgcccgaggacttcatggagagcctgaaggaggacagaaccaccctgctgtacttctaccagcagctgagaaacgactacatgcagagatacgccagcaaggtgagcgagggcatggccctgcagctgggctgcctggagctgagaagattcttcaaggacatgccccacaacgccctggacaagaagagcaacttcgagctgctggagaaggaggtgggcctggacctgttcttccccaagcagatgcaggagaacctgaagcccaagcagttcagaaagatgatccagcagaccttccagcagtacgccagcctgagagaggaggagtgcgtgatgaagttcttcaacaccctggccggcttcgccaacatcgaccaggagacctacagatgcgagctgatccagggctggaacatcaccgtggacctggtgatcggccccaagggcatcagacagctgaccagccaggacgccaagcccacctgcctggccgagttcaagcagatcagaagcatcagatgcctgcccctggaggagggccaggccgtgctgcagctgggcatcgagggcgccccccaggccctgagcatcaagaccagcagcctggccgaggccgagaacatggccgacctgatcgacggctactgcagactgcagggcgagcaccagggcagcctgatcatccaccccagaaaggacggcgagaagagaaacagcctgccccagatccccatgctgaacctggaggccagaagaagccacctgagcgagagctgcagcatcgagagcgacatctacgccgagatccccgacgagaccctgagaagacccggcggcccccagtacggcatcgccagagaggacgtggtgctgaacagaatcctgggcgagggcttcttcggcgaggtgtacgagggcgtgtacaccaaccacaagggcgagaagatcaacgtggccgtgaagacctgcaagaaggactgcaccctggacaacaaggagaagttcatgagcgaggccgtgatcatgaagaacctggaccacccccacatcgtgaagctgatcggcatcatcgaggaggagcccacctggatcatcatggagctgtacccctacggcgagctgggccactacctggagagaaacaagaacagcctgaaggtgctgaccctggtgctgtacagcctgcagatctgcaaggccatggcctacctggagagcatcaactgcgtgcacagagacatcgccgtgagaaacatcctggtggccagccccgagtgcgtgaagctgggcgacttcggcctgagcagatacatcgaggacgaggactactacaaggccagcgtgaccagactgcccatcaagtggatgagccccgagagcatcaacttcagaagattcaccaccgccagcgacgtgtggatgttcgccgtgtgcatgtgggagatcctgagcttcggcaagcagcccttcttctggctggagaacaaggacgtgatcggcgtgctggagaagggcgacagactgcccaagcccgacctgtgcccccccgtgctgtacaccctgatgaccagatgctgggactacgaccccagcgacagacccagattcaccgagctggtgtgcagcctgagcgacgtgtaccagatggagaaggacatcgccatggagcaggagagaaacgccagatacagaacccccaagatcctggagcccaccgccttccaggagcccccccccaagcccagcagacccaagtacagaccccccccccagaccaacctgctggcccccaagctgcagttccaggtgcccgagggcctgtgcgccagcagccccaccctgaccagccccatggagtaccccagccccgtgaacagcctgcacaccccccccctgcacagacacaacgtgttcaagagacacagcatgagagaggaggacttcatccagcccagcagcagaggccccgccgccgtgggcggctag

SEQ ID NO: 284634 - DNA, 2409 bp, Artificial Sequence
  derived and/or modified sequence
ctcctccctgaacggatgagcggagtgagtgagcccctctcaagagtgaagctcggaacactgcgaaggcccgagggtcccgcggaaccaatggtagtcgtgccagtcgatgtggagaaagaagatgtcagaatcctgaaggtctgcttttatagtaactccttcaatcccgggaagaattttaagctggtaaaatgtactgttcaaaccgaaattcgggagatcataacttccattctgctctctggaaggatcggaccgaacatcaggctcgcagagtgttacggattgcgcctcaaacatatgaaatccgatgagattcactggctgcaccctcaaatgacagtcggggaggtgcaggataaatacgagtgcttgcatgttgaagccgagtggaggtacgacctgcagattcgctatcttccagaagatttcatggaatccttgaaggaggaccgtaccaccctgctttatttttaccagcagcttaggaacgactacatgcaacgctatgcttccaaggtgagcgaaggaatggcactacagctgggctgtctcgaactcagaagattctttaaagatatgccccacaatgctttagacaaaaaaagtaattttgaactgcttgaaaaagaggtaggactcgacttattttttccaaaacagatgcaggagaatctaaaacccaagcagtttaggaaaatgatccagcagactttccaacagtacgcttccctgcgcgaggaagagtgtgtgatgaagttttttaacacactagcgggctttgcgaatatcgaccaggaaacatacaggtgtgagctaattcagggatggaatatcacagttgatctagtaattggcccaaaaggcattcgacaacttacatcacaggacgctaagcccacgtgtttggctgagttcaagcaaattcgcagcattcggtgtctccctcttgaggagggtcaggcagttttgcagcttggaattgagggcgccccgcaggccctgtccattaagacaagttcccttgcagaggcagaaaacatggctgatctgattgatgggtactgtcgccttcagggcgagcaccaaggaagcctaataatccacccgcgtaaggacggtgagaagagaaacagtttaccccaaatcccaatgttgaacttggaagctaggcgctcccacctcagcgaaagctgttcaattgagtccgacatttacgccgagatccccgatgaaacgctgcgccggcctggcggtccgcaatatgggatagcccgtgaggacgtggttctcaataggatattgggggagggcttctttggtgaggtttacgaaggtgtttacacgaaccacaagggtgagaagatcaatgtcgctgttaaaacgtgtaagaaggactgtacattggacaacaaagaaaagtttatgagtgaggcagtaatcatgaaaaacctagatcacccacatattgtgaaactgatcggcataatcgaggaggagcctacctggataatcatggaactttacccatacggtgagctgggtcattatcttgagaggaataaaaacagtctgaaggttctgactctcgtgttgtatagcttgcagatttgcaaggcaatggcttacctggaatcgatcaactgcgttcatcgagatattgccgtgagaaatatcctggtcgcttcgcctgaatgtgtgaagcttggagacttcggactgtcccgctatattgaagacgaagactattacaaagcgtccgtcactcggctgcccatcaaatggatgtccccggaaagcattaacttcagacggttcactaccgctagtgacgtgtggatgttcgccgtatgcatgtgggagattctcagttttggaaagcaaccctttttttggttggagaacaaggacgtaattggcgtccttgagaaaggagatcggctccccaaacctgatctttgcccacctgtgctgtacactctgatgacaaggtgttgggattacgatccctcagacagaccccgatttacagagctggtgtgcagcctgagcgacgtgtaccaaatggaaaaggacatcgccatggagcaggaacgtaacgcccgctaccggacaccaaaaatcctggaacctactgcattccaggaaccccctccaaagccctctaggcccaaataccggccgcctccacaaacaaatcttctcgcaccaaaactgcagttccaggtaccagagggtctttgcgccagttcgcccacactgacaagtcccatggaatatccatcccccgtcaactccctgcataccccaccgctccatcgtcataacgtgtttaagcgccactctatgcgcgaggaggactttatccaaccatcatcccggggccctgcggctgtgggaggatag

SEQ ID NO: 284635 - DNA, 2409 bp, Artificial Sequence
  derived and/or modified sequence
ctgctgcctgagaggatgtctggagtgtctgagcccctgagccgggtgaagctgggcaccctgcggcggcctgagggccctgctgagcccatggtggtggtgcctgtggatgtggagaaggaggatgtgcgcatcctgaaggtgtgcttctacagcaacagcttcaaccctgggaagaacttcaagctggtgaagtgcaccgtgcagacagagatccgggagatcatcaccagcatcctgctgagcggcagaattggccccaacatccggctggctgaatgttatggcctgcggctgaagcacatgaagagtgatgagatccactggctgcacccccagatgacagtgggggaggtgcaggacaagtatgagtgcctgcacgtggaggccgagtggaggtatgacctgcagatccgctacctgcctgaggacttcatggagagcctgaaggaggacaggaccaccctgctgtacttctaccagcagctgagaaatgactacatgcagagatatgccagcaaggtgtctgagggcatggccctgcagctgggctgcctggagctgcggcgcttcttcaaggacatgccccacaatgccctggacaagaagagcaactttgagctgctggagaaggaggtgggcctggacctcttcttccccaagcagatgcaggagaacctgaagcccaagcagttcaggaagatgatccagcagaccttccagcagtatgccagcctgcgggaggaggagtgtgtgatgaagttcttcaacaccctggccggctttgccaacatcgaccaggagacctaccgctgtgagctgatccagggctggaacatcaccgtggacctggtgattggccccaagggcatccggcagctgaccagccaggatgccaagcccacctgcctggccgagttcaagcagatccgcagcatccgctgcctgcccctggaggagggccaggccgtgctgcagctgggcattgaaggagccccccaggccctgagcatcaagaccagcagcctggccgaggccgagaacatggctgacctgattgatggctactgccgcctgcagggcgagcaccagggcagcctcatcatccaccccaggaaggatggagagaagaggaacagcctgccccagatccccatgctgaacctggaggcccggcgcagccacctgtctgagagctgcagcattgaaagtgacatctatgcagagatcccagatgagaccctgcggcggcctgggggcccccagtatggaattgcccgggaggatgtggtgctgaaccgcatcctgggggagggcttctttggagaggtgtatgaaggagtgtacaccaaccacaagggggagaagatcaacgtggccgtgaagacctgcaagaaggactgcaccctggacaacaaggagaagttcatgtctgaggccgtcatcatgaagaacctggaccacccccacatcgtgaagctgattggcatcatcgaggaggagcccacctggatcatcatggagctgtacccctacggggagctgggccactacctggagaggaacaagaacagcctgaaggtgctgaccctggtgctgtacagcctgcagatctgcaaggccatggcctacctggagagcatcaactgtgtgcaccgggacattgctgtgaggaacatcctggtggccagcccagaatgtgtgaagctgggggactttggcctgagccgctacattgaagatgaggactactacaaggcctctgtgacccggctgcccatcaagtggatgagccctgagagcatcaacttccgccgcttcaccacagccagtgatgtgtggatgtttgctgtgtgcatgtgggagatcctgagctttgggaagcagcccttcttctggctggagaacaaggatgtgattggagtgctggagaagggggaccggctgcccaagccagacctgtgcccccctgtgctgtacaccctgatgacccgctgctgggactatgaccccagcgaccggccccgcttcacagagctggtgtgcagcctgagtgatgtgtaccagatggagaaggacatcgccatggagcaggagagaaatgcccgctaccgcacccccaagatcctggagcccacagccttccaggagcccccacccaagcccagccggcccaagtacagacctccaccccagaccaacctgctggcccccaagctgcagttccaggtgcctgagggcctgtgtgccagcagccccaccctgaccagccccatggagtaccccagccctgtgaacagcctgcacaccccacccctgcaccgccacaacgtgttcaagaggcacagcatgagggaggaggacttcatccagcccagcagccggggccctgctgctgtgggcggctag

SEQ ID NO: 284636 - DNA, 2409 bp, Artificial Sequence
  derived and/or modified sequence
ctgctgcccgagcggatgagcggcgtgagcgagcccctgagccgggtgaagttaggcaccctacggcgccccgaaggtcctgccgaacctatggtggtggtccccgtggacgtcgagaaggaagatgtgagaatactgaaggtgtgtttctattccaattcatttaatcccggcaagaacttcaaactcgtcaagtgtactgtccaaacagagatcagagaaatcatcacctctatcctcttatccggtaggatcggtccaaatatcaggctggcagagtgctatgggctacggttaaagcatatgaagtctgatgagatccactggctgcacccgcagatgaccgttggggaggtgcaggacaaatacgaatgcctgcatgtcgaggcggagtggcggtatgacttacagatcagatacctgcccgaggacttcatggagtccttgaaagaggaccggactactctactctatttttaccaacagctcagaaatgactacatgcagagatacgctagtaaggtgtcagagggcatggcccttcagctgggatgtctggaactccgcagattcttcaaggatatgccccacaatgctttagataagaaatcgaactttgagttactggagaaggaagtggggctcgatttgttctttcctaagcagatgcaggagaatctcaaacccaagcagttccgcaaaatgattcaacaaacttttcagcaatacgcctcattacgcgaggaagaatgcgttatgaagttttttaataccctagcaggtttcgccaatattgatcaagaaacctaccgctgcgagctgatacaaggttggaatattacagtcgatttggtgatcggaccaaagggcatccgacaattgaccagccaggacgcaaagccaacatgcctggcggagtttaagcagatccggtctatcaggtgcctgcctctggaggaggggcaagcagtactgcagctcgggattgaaggcgccccccaggccctatccataaaaactagttcgctggccgaggccgaaaatatggccgatctgattgacggttattgtcgactccagggagaacatcaagggtcactgattatccatccacggaaagatggcgaaaagcgaaactccctgcctcaaatcccgatgcttaacctggaggctaggcggtcccacctgtctgagtcctgttctatcgagtccgacatttacgccgaaattcctgacgagaccctgcggcgccccggaggccctcagtacgggattgctagggaggatgttgtgctgaaccgcattctgggcgagggattctttggagaggtgtacgagggagtctacactaaccataaaggagaaaagattaatgtcgcagtgaaaacatgcaaaaaagattgcacccttgacaataaggagaaattcatgtccgaggctgtcatcatgaagaacttggaccatccccacattgtgaagctcatcggaataattgaagaggagccgacgtggatcatcatggaactctacccatacggggagcttggccattatttagaacggaacaagaattccctgaaggtgttgaccttagtactgtatagtttgcagatctgtaaggcaatggcctatcttgagagtatcaactgtgtccatcgcgacattgccgtccgcaacattcttgtagcgtcccctgaatgtgtaaagttgggcgattttgggctgagtcggtacatagaggacgaggactactataaggctagtgtgacccgtttgcctataaagtggatgtcacccgagtccattaactttagaagatttactactgcttctgatgtctggatgttcgctgtgtgtatgtgggagatcctttcttttgggaagcagccttttttttggctcgagaataaggacgttatcggagtgttggagaagggcgataggttgccgaagcccgacctgtgtccacccgtgctgtacacccttatgacgagatgctgggactacgaccccagcgatcggcctagattcacagaactcgtttgttcccttagtgacgtgtaccaaatggaaaaggatatcgctatggagcaagagaggaatgcacggtaccgaactccaaagattctggagccaacagcctttcaagaaccacccccaaagccctcacgccctaagtaccgcccgcccccacagactaacctcctggcacctaagttgcagttccaggtaccagagggtctctgtgcaagctcccctacattgacttcacctatggagtatccttctcctgttaactctctgcacactcccccactccataggcataacgtctttaagaggcatagtatgcgggaggaagacttcattcaaccctcatccagggggcccgctgccgttggcggctag

SEQ ID NO: 284637 - DNA, 2409 bp, Artificial Sequence
  derived and/or modified sequence
ctcctgccggaacggatgtcaggcgtcagtgaaccgttgtcaagggtgaaactgggaaccctgcggagacctgagggaccagctgaacccatggtggtggtccccgtcgatgttgagaaggaagacgtccgcatactgaaagtatgcttttattctaactcttttaatcctggaaagaactttaaactggtgaagtgcaccgtccagactgagatccgtgagatcattacaagtattctcctctctggcagaatcggccctaacatcaggttggctgagtgctacggtctgagactcaagcacatgaagagtgatgaaatccactggctacaccctcagatgactgtgggcgaagtgcaagataagtatgaatgcctacacgtggaagctgagtggagatacgatttacagattcgttatcttccagaagactttatggagtctttaaaggaggatcgtacgactctgctctatttttaccagcagctaagaaatgattatatgcaacgctatgctagtaaagtctctgagggcatggccttgcaactaggttgcttagagctcaggcggttcttcaaagacatgccgcacaatgccctagacaagaagagcaacttcgagctcctggaaaaggaggtgggattggacttgttcttcccaaaacagatgcaagagaatctgaagcccaagcagttccgaaaaatgatacagcagacttttcagcagtacgcttcgttgcgcgaggaagagtgcgtgatgaagttcttcaatacactggcaggctttgcaaacattgaccaagagacataccggtgcgagctgatacaggggtggaacatcaccgttgacctggtcattggccctaagggaatacgtcagcttacctcgcaggacgcaaagccgacctgcctcgcagagttcaagcaaattcgatccatacgatgcttaccattggaagaaggccaggctgtgttgcagctgggaattgagggcgcaccacaggccctcagtatcaagacttcgagcctagcagaggcagaaaacatggcagatctgatagacggatactgtcgtctgcagggtgagcatcaaggctctctcatcatccacccgagaaaagacggagaaaagcgcaattccctgccacaaattcctatgcttaacctggaagcgagacgaagtcatctgtctgagagctgttcaatcgagtcagacatttacgctgaaattccggacgagacactaagaaggccaggcggaccccagtatggcatcgctagagaagatgtcgtactgaatcgcatacttggcgaaggcttctttggggaagtgtacgagggggtttacacgaatcataaaggggagaaaattaatgtagccgtcaagacatgcaaaaaggactgcaccctggacaataaagagaagttcatgtccgaggctgtcatcatgaagaaccttgaccacccccatatcgtaaagctcatcgggattatcgaagaggaacccacttggatcatcatggaactgtacccatatggagagctaggccactatctcgaacgaaataaaaacagccttaaggtgctaactcttgtgctgtacagtctgcagatttgtaaagcaatggcatatctcgaatcaatcaactgcgtgcacagagacatcgctgtgcgcaatattcttgtcgcaagcccagagtgcgttaagttgggagatttcgggctttcccggtatattgaggacgaggattactacaaagcttctgttactaggctgcccatcaaatggatgtcccctgagtctatcaactttcgaaggttcacgactgctagcgacgtttggatgtttgctgtctgcatgtgggagatcctgtcctttggaaagcagccgtttttctggctggagaataaagatgtgattggagttctcgaaaaaggcgatcgcctccctaagcccgacctctgccctcccgtgctttacaccttgatgacccgctgttgggattatgatccaagtgatcgacctaggtttaccgagctggtgtgtagcctgtcagacgtctatcaaatggagaaggacattgctatggagcaggagaggaatgccaggtacaggacccccaaaattctggagcccacagcctttcaagaacctccgccaaagccaagcagaccaaaatatcggcctccgccacagacgaatttgcttgccccaaagctgcaatttcaggttcccgaggggctgtgtgcatcctctcctactttgacgtctcccatggagtacccttcgcccgtcaacagcctccataccccgccactgcacaggcataacgtgtttaaacgccacagcatgcgtgaggaagacttcattcagccatccagtagggggcctgccgctgtgggcggatag

SEQ ID NO: 284638 - DNA, 4710 bp, Artificial Sequence
  derived and/or modified sequence
gcagttcccgcctcctcaggtccgggcgggtccctggccggggtagcacggaagggtctcccaggcggcgtagtagggcttccgtgttactggaaacctacttccggctgcaaatgggaaaaggagcctctaccttaaccaatccccgggaacctcaggcccgcggatgggagaaaccagagatgccaacttcctgcttccgaagtagtggctgggtcttaaagcaccgatgtttctgcattgaatagccctggaagacagaattcttgtctctccaaagatctggcagacttattcccaattataagagatccttgcaaaggaggtgtcttgcttcaccttcaccttccactgtgattgtaagttttctgaggcctcgccagccatgcggaactgaataggactagcaacttcatagacggttgtgaagacaagctagacggcagatgaaagttcttggcacagagtgaacacttgataaactatatggcagggagggctggaacggggcttgtttgaagagcaatatgagccagggttatagacctgagtttggggtaagagtggaacatccaaatggaagagtccagcagctgaaaggacatttgttcaaaggcctttttcattacagttttctccttcttctgatccagccacagcctccggagccgttgcacacctacctgcccggccgacttacctgtacttgccgccgtcccggctcacctggcggtgcccgaggagtagtcgctggagtccgcgcctccctgggactgcaatgtgccgatcttagctgctgcctgagaggatgtctggggtgtccgagcccctgagtcgagtaaagttgggcacgttacgccggcctgaaggccctgcagagcccatggtggtggtaccagtagatgtggaaaaggaggacgtgcgtatcctcaaggtctgcttctatagcaacagcttcaatcctgggaaaaacttcaaactggtcaaatgcactgtccagacggagatccgggagatcatcacctccatcctgctgagcgggcggatcgggcccaacatccggttggctgagtgctatgggctgaggctgaagcacatgaagtccgatgagatccactggctgcacccacagatgacggtgggtgaggtgcaggacaagtatgagtgtctgcacgtggaagccgagtggaggtatgaccttcaaatccgctacttgccagaagacttcatggagagcctgaaggaggacaggaccacgctgctctatttttaccaacagctccggaacgactacatgcagcgctacgccagcaaggtcagcgagggcatggccctgcagctgggctgcctggagctcaggcggttcttcaaggatatgccccacaatgcacttgacaagaagtccaacttcgagctcctagaaaaggaagtggggctggacttgtttttcccaaagcagatgcaggagaacttaaagcccaaacagttccggaagatgatccagcagaccttccagcagtacgcctcgctcagggaggaggagtgcgtcatgaagttcttcaacactctcgccggcttcgccaacatcgaccaggagacctaccgctgtgaactcattcaaggatggaacattactgtggacctggtcattggccctaaagggatccgccagctgactagtcaggacgcaaagcccacctgcctggccgagttcaagcagatcaggtccatcaggtgcctcccgctggaggagggccaggcagtacttcagctgggcattgaaggtgccccccaggccttgtccatcaaaacctcatccctagcagaggctgagaacatggctgacctcatagacggctactgccggctgcagggtgagcaccaaggctctctcatcatccatcctaggaaagatggtgagaagcggaacagcctgccccagatccccatgctaaacctggaggcccggcggtcccacctctcagagagctgcagcatagagtcagacatctacgcagagattcccgacgaaaccctgcgaaggcccggaggtccacagtatggcattgcccgtgaagatgtggtcctgaatcgtattcttggggaaggcttttttggggaggtctatgaaggtgtctacacaaatcacaaaggggagaaaatcaatgtagctgtcaagacctgcaagaaagactgcactctggacaacaaggagaagttcatgagcgaggcagtgatcatgaagaacctcgaccacccgcacatcgtgaagctgatcggcatcattgaagaggagcccacctggatcatcatggaattgtatccctatggggagctgggccactacctggagcggaacaagaactccctgaaggtgctcaccctcgtgctgtactcactgcagatatgcaaagccatggcctacctggagagcatcaactgcgtgcacagggacattgctgtccggaacatcctggtggcctcccctgagtgtgtgaagctgggggactttggtctttcccggtacattgaggacgaggactattacaaagcctctgtgactcgtctccccatcaaatggatgtccccagagtccattaacttccgacgcttcacgacagccagtgacgtctggatgttcgccgtgtgcatgtgggagatcctgagctttgggaagcagcccttcttctggctggagaacaaggatgtcatcggggtgctggagaaaggagaccggctgcccaagcctgatctctgtccaccggtcctttataccctcatgacccgctgctgggactacgaccccagtgaccggccccgcttcaccgagctggtgtgcagcctcagtgacgtttatcagatggagaaggacattgccatggagcaagagaggaatgctcgctaccgaacccccaaaatcttggagcccacagccttccaggaacccccacccaagcccagccgacctaagtacagaccccctccgcaaaccaacctcctggctccaaagctgcagttccaggttcctgagggtctgtgtgccagctctcctacgctcaccagccctatggagtatccatctcccgttaactcactgcacaccccacctctccaccggcacaatgtcttcaaacgccacagcatgcgggaggaggacttcatccaacccagcagccgaggcccagcagctgtgggaggctgaaaaggtcaaaatgcggcaaatcctggacaaacagcagaagcagatggtggaggactaccagtggctcaggcaggaggagaagtccctggaccccatggtttatatgaatgataagtccccattgacgccagagaaggaggtcggctacctggagttcacagggcccccacagaagcccccgaggctgggcgcacagtccatccagcccacagctaacctggaccggactgatgacctggtgtacctcaatgtcatggagctggtgcgggccgtgctggagctcaagaatgagctctgtcagctgccccccgagggctacgtggtggtggtgaagaatgtggggctgaccctgcggaagctcatcgggagcgtggatgatctcctgccttccttgccgtcatcttcacggacagagatcgagggcacccagaaactgctcaacaaagacctggcagagctcatcaacaagatgcggctggcacagcagaacgccgtgacctccctaagtgaggagtgcaagaggcagatgctgacggcttcacacaccctggctgtggacgccaagaacctgctcgacgctgtggaccaggccaaggttctggccaatctggcccacccacctgcagagtgacggagggtgggggccacctgcctgcgtcttccgcccctgcctgccatgtacctcccctgccttgctgttggtcatgtgggtcttccagggggaaggccaaggggagtcaccttcccttgccactttgcacgacgccctctccccacccctacccctggctgtactgctcaggctgcagctggacagaggggactctgggctatggacacagggtgacggtgacaaagatggctcagagggggactgctgctgcctggccactgctccctaagccagcctggtccatgcagggggctcctgggggtggggaggtgtcacatggtgcccctagctttatatatggacatggcaggccgatttgggaaccaagctattcctttcccttcctcttcggccctcagatgtcccttgatgcacagagaagctggggaggagctttgttttgggggtcaggcagccagtgagatgagggatgggcctggcattcttgtacagtgtatattgaaatttatttaatgtgagtttggtctggactgacagcatgtgccctcctgagggaggacctggggcacagtccaggaacaagctaattgggagtccaggcacaggatgctgtgttgtcaacaaaccaagcatcagggggaagaagcagagagatgcggccaagataggaccttgggccaaatccgctctcttcctgcccctctttctctttcttcctttactttcccttgcttttccctcttttcttactcctcctctttctctccccaacccccattctcatctgcacccttcttttctcatgtgtttgcataaacattcttttaacttctttctatttgacttgtggttgaattaaaattgtcccatttgc

SEQ ID NO: 284639 - protein, 711 aa, Artificial Sequence
  derived and/or modified sequence
MSSVQSQQEQLSQSDPSPSPNSCSSFELIDMDAGSLYEPVSPHWFYCKIIDSKETWIPFNSEDSQQLEEAYSSGKGCNGRVVPTDGGRYDVHLGERMRYAVYWDELASEVRRCTWFYKGDKDNKYVPYSESFSQVLEETYMLAVTLDEWKKKLESPNREIIILHNPKLMVHYQPVAGSDDWGSTPTEQGRPRTVKRGVENISVDIHCGEPLQIDHLVFVVHGIGPACDLRFRSIVQCVNDFRSVSLNLLQTHFKKAQENQQIGRVEFLPVNWHSPLHSTGVDVDLQRITLPSINRLRHFTNDTILDVFFYNSPTYCQTIVDTVASEMNRIYTLFLQRNPDFKGGVSIAGHSLGSLILFDILTNQKDSLGDIDSEKDSLNIVMDQGDTPTLEEDLKKLQLSEFFDIFEKEKVDKEALALCTDRDLQEIGIPLGPRKKILNYFSTRKNSMGIKRPAPQPASGANIPKESEFCSSSNTRNGDYLDVGIGQVSVKYPRLIYKPEIFFAFGSPIGMFLTVRGLKRIDPNYRFPTCKGFFNIYHPFDPVAYRIEPMVVPGVEFEPMLIPHHKGRKRMHLELREGLTRMSMDLKNNLLGSLRMAWKSFTRAPYPALQASETPEETEAEPESTSEKPSDVNTEETSVAVKEEVLPINVGMLNGGQRIDYVLQEKPIESFNEYLFALQSHLCYWESEDTVLLVLKEIYQTQGIFLDQPLQ

SEQ ID NO: 284640 - protein, 271 aa, Artificial Sequence
  derived and/or modified sequence
MEKETGISQQRNYYFTQSKGEPLQIDHLVFVVHGIGPACDLRFRSIVQCVNDFRSVSLNLLQTHFKKAQENQQIGRVEFLPVNWHSPLHSTGVDVDLQRITLPSINRLRHFTNDTILDVFFYNSPTYCQTIVDTVASEMNRIYTLFLQRNPDFKGGVSIAGHSLGSLILFDILTNQKDSLGDIDSEKDSLNIVMDQGDTPTLEEDLKKLQLSEFFDIFEKEKVDKEALALCTDRDLQEIGIPLGPRKNLSSAVAVILEMVTIWMLALGRCL

SEQ ID NO: 284641 - DNA, 2136 bp, Artificial Sequence
  derived and/or modified sequence
atgagcagcgtgcagagccagcaggagcagctgagccagagcgaccccagccccagccccaacagctgcagcagcttcgagctgatcgacatggacgccggcagcctgtacgagcccgtgagcccccactggttctactgcaagatcatcgacagcaaggagacctggatccccttcaacagcgaggacagccagcagctggaggaggcctacagcagcggcaagggctgcaacggcagagtggtgcccaccgacggcggcagatacgacgtgcacctgggcgagagaatgagatacgccgtgtactgggacgagctggccagcgaggtgagaagatgcacctggttctacaagggcgacaaggacaacaagtacgtgccctacagcgagagcttcagccaggtgctggaggagacctacatgctggccgtgaccctggacgagtggaagaagaagctggagagccccaacagagagatcatcatcctgcacaaccccaagctgatggtgcactaccagcccgtggccggcagcgacgactggggcagcacccccaccgagcagggcagacccagaaccgtgaagagaggcgtggagaacatcagcgtggacatccactgcggcgagcccctgcagatcgaccacctggtgttcgtggtgcacggcatcggccccgcctgcgacctgagattcagaagcatcgtgcagtgcgtgaacgacttcagaagcgtgagcctgaacctgctgcagacccacttcaagaaggcccaggagaaccagcagatcggcagagtggagttcctgcccgtgaactggcacagccccctgcacagcaccggcgtggacgtggacctgcagagaatcaccctgcccagcatcaacagactgagacacttcaccaacgacaccatcctggacgtgttcttctacaacagccccacctactgccagaccatcgtggacaccgtggccagcgagatgaacagaatctacaccctgttcctgcagagaaaccccgacttcaagggcggcgtgagcatcgccggccacagcctgggcagcctgatcctgttcgacatcctgaccaaccagaaggacagcctgggcgacatcgacagcgagaaggacagcctgaacatcgtgatggaccagggcgacacccccaccctggaggaggacctgaagaagctgcagctgagcgagttcttcgacatcttcgagaaggagaaggtggacaaggaggccctggccctgtgcaccgacagagacctgcaggagatcggcatccccctgggccccagaaagaagatcctgaactacttcagcaccagaaagaacagcatgggcatcaagagacccgccccccagcccgccagcggcgccaacatccccaaggagagcgagttctgcagcagcagcaacaccagaaacggcgactacctggacgtgggcatcggccaggtgagcgtgaagtaccccagactgatctacaagcccgagatcttcttcgccttcggcagccccatcggcatgttcctgaccgtgagaggcctgaagagaatcgaccccaactacagattccccacctgcaagggcttcttcaacatctaccaccccttcgaccccgtggcctacagaatcgagcccatggtggtgcccggcgtggagttcgagcccatgctgatcccccaccacaagggcagaaagagaatgcacctggagctgagagagggcctgaccagaatgagcatggacctgaagaacaacctgctgggcagcctgagaatggcctggaagagcttcaccagagccccctaccccgccctgcaggccagcgagacccccgaggagaccgaggccgagcccgagagcaccagcgagaagcccagcgacgtgaacaccgaggagaccagcgtggccgtgaaggaggaggtgctgcccatcaacgtgggcatgctgaacggcggccagagaatcgactacgtgctgcaggagaagcccatcgagagcttcaacgagtacctgttcgccctgcagagccacctgtgctactgggagagcgaggacaccgtgctgctggtgctgaaggagatctaccagacccagggcatcttcctggaccagcccctgcagtag

SEQ ID NO: 284642 - DNA, 816 bp, Artificial Sequence
  derived and/or modified sequence
atggagaaggagaccggcatcagccagcagagaaactactacttcacccagagcaagggcgagcccctgcagatcgaccacctggtgttcgtggtgcacggcatcggccccgcctgcgacctgagattcagaagcatcgtgcagtgcgtgaacgacttcagaagcgtgagcctgaacctgctgcagacccacttcaagaaggcccaggagaaccagcagatcggcagagtggagttcctgcccgtgaactggcacagccccctgcacagcaccggcgtggacgtggacctgcagagaatcaccctgcccagcatcaacagactgagacacttcaccaacgacaccatcctggacgtgttcttctacaacagccccacctactgccagaccatcgtggacaccgtggccagcgagatgaacagaatctacaccctgttcctgcagagaaaccccgacttcaagggcggcgtgagcatcgccggccacagcctgggcagcctgatcctgttcgacatcctgaccaaccagaaggacagcctgggcgacatcgacagcgagaaggacagcctgaacatcgtgatggaccagggcgacacccccaccctggaggaggacctgaagaagctgcagctgagcgagttcttcgacatcttcgagaaggagaaggtggacaaggaggccctggccctgtgcaccgacagagacctgcaggagatcggcatccccctgggccccagaaagaacctgagcagcgccgtggccgtgatcctggagatggtgaccatctggatgctggccctgggcagatgcctgtag

SEQ ID NO: 284643 - DNA, 2136 bp, Artificial Sequence
  derived and/or modified sequence
atgagtagcgtgcagtcacagcaggagcagctgtcccagtcagatcccagccctagtccgaattcatgctcgagttttgagctgattgacatggatgcgggcagtctatacgaaccagtgtcaccgcactggttttactgtaagatcatagactcaaaggagacgtggatccctttcaacagtgaggattcacaacagctggaagaggcatatagcagcggcaaagggtgtaatggacgggttgtcccgaccgatggtggaaggtacgatgtccatctgggtgagcgaatgcggtatgcggtgtactgggacgaactcgcaagcgaggtgagacgctgcacatggttctacaaaggggataaagacaacaaatatgtaccgtattccgagtctttctctcaggtgctggaggaaacttacatgctggccgtgacactcgatgagtggaaaaagaagctggaatcgcccaaccgggagattatcatccttcacaacccaaagctcatggtgcactatcagcccgtcgccggttccgatgactggggctcgacccccaccgaacagggacgacctcgcacagtcaaaagaggggttgagaacatttccgtagacatccactgcggagagcccctccaaattgatcacctggtcttcgtcgtgcacggaattggaccagcctgcgatcttagattccggagcatcgtgcagtgcgtgaacgatttcagatcagtgtccctgaaccttctgcaaactcacttcaaaaaggctcaggaaaaccagcaaatcggccgcgtggagtttcttccagtgaattggcacagtccccttcattctactggcgtggacgtggatctgcaacgcataaccctcccttctattaatagattacgtcactttacgaacgacactatactagatgtatttttctacaatagccctacctattgtcagacaattgtcgataccgtggctagtgagatgaatagaatttatactctgttcttgcagcggaatcctgacttcaaggggggggtgtctattgctggccactccttggggtcactcatcctgttcgacatcctgaccaaccagaaagactccttgggcgatattgatagtgagaaagactctctgaacattgtgatggaccagggcgatacacctacccttgaggaagatctcaaaaagctgcagctcagtgagttctttgatattttcgagaaagagaaagtggacaaggaagccctggcactgtgcacagatagggacctgcaagagattggaatcccacttgggccgcgtaaaaaaatattgaattacttttccacccggaagaatagtatgggaatcaagcgcccggctccacagcccgccagtggcgccaatattcccaaagagtccgagttttgcagtagttccaacacccggaacggcgactacttggacgtgggcatcgggcaggtttcggttaagtatcctcgactcatatacaagcccgaaatcttttttgcgttcgggtcacccataggaatgttccttacagttcgaggtctcaagcgcatagatccaaactaccggtttccaacttgcaagggttttttcaatatttaccacccgtttgaccctgtggcttaccgcatcgaacctatggtggtcccaggagtcgaattcgagccaatgctcataccccaccacaaagggagaaagcgcatgcacctggagcttcgcgagggtctcacaaggatgagtatggatctgaagaataatctgctggggtcactaaggatggcatggaagtcttttactcgagccccctaccctgccctacaggcctcggagacacccgaagagactgaggccgagcccgaaagtacatccgaaaaacccagcgatgtgaacaccgaggagacatccgtggccgttaaagaggaggtcctgcccatcaacgtaggaatgctgaatggggggcagcgaattgactatgtgctgcaggaaaaacctattgaaagttttaatgaatatctgtttgctctgcagtctcacctgtgttactgggaaagtgaagatacagtgctgctggtccttaaggagatctatcagactcagggcatctttctggaccaaccactacagtag

SEQ ID NO: 284644 - DNA, 816 bp, Artificial Sequence
  derived and/or modified sequence
atggaaaaagagacagggatctcgcagcaaaggaactactactttacgcaatccaagggggagcctttgcaaatcgaccacttggtgttcgtggtccacggcataggccccgcctgtgatctgagatttcgatcaattgtccagtgtgtgaatgatttccggtccgtcagcctcaatctgctccaaacacacttcaaaaaggcacaggagaatcaacaaattggacgggtcgagttcctcccggtcaattggcattctccccttcattcaactggcgtggacgttgatctgcagagaattactctaccaagcattaatcggctgaggcattttactaacgacactatacttgatgtgttcttttacaactcccccacatactgtcagactatcgtagataccgtagcaagtgagatgaataggatttacaccctgttcttgcagagaaaccccgacttcaaaggcggagtctccatcgccggtcactccctcggctccttaattctatttgatatcctgaccaatcagaaagattcattgggggacattgattcggaaaaggattcattgaacatagttatggaccagggtgatacacctacactggaggaagacctcaagaagctgcaactttcagaattcttcgacatcttcgagaaggaaaaggtcgataaggaagccctcgcattgtgtactgaccgcgacctccaagagatcggaattcctctgggacctagaaaaaatctgtctagcgccgtggctgtgatcctagaaatggtgaccatttggatgctcgcattgggacgatgcctgtag

SEQ ID NO: 284645 - DNA, 2136 bp, Artificial Sequence
  derived and/or modified sequence
atgtcaagcgtgcagtcacagcaagagcagctctcacagtccgacccgtctccttcacctaacagctgctcttcgtttgaactgattgacatggacgcagggtctctgtatgagccggtaagtcctcactggttttattgcaaaataatagactcaaaagagacatggatcccatttaattccgaagattctcagcaactggaagaagcttattcttccggcaaagggtgtaacggacgagttgtgcccactgatggcggtcgttacgacgtacatcttggcgagcggatgagatacgccgtgtactgggacgagctggcttctgaggttcgacgctgtacctggttttataagggggacaaagataataagtacgtcccatactccgagtctttttcccaggtcttggaggagacctatatgttggccgtcacattagacgagtggaagaagaagcttgagtcccctaacagagagatcatcatcctgcacaacccgaagcttatggtgcactatcaacccgtggccgggagcgatgactggggtagcacacccactgaacagggccggccacgtactgttaagagaggggtggaaaacatctcagtggacattcactgtggagagcccctgcagattgaccatttggttttcgttgtgcatggcatcgggcctgcctgcgatctgagattccgctcaatagtccagtgtgtgaatgatttccggagtgtcagcctaaatctgctccaaacacattttaaaaaggcacaagaaaaccagcagatcggtcgggtggagttcttaccggtgaactggcattctcccctgcatagcacaggggtcgatgtggatctacaacgaatcacacttcccagtatcaacagacttagacacttcaccaacgatactatcttggacgtcttcttctacaatagccctacttattgtcaaaccatcgtggacacggtggccagtgaaatgaacagaatatataccttatttctgcaacgaaatcccgatttcaagggtggagtgagcattgccgggcattccctagggtctctaatactgttcgatattctgaccaatcagaaggatagtctcggtgacattgattcagaaaaagattccttgaacatcgtgatggaccagggcgacacacccacactcgaggaggacttgaagaagttacaactcagcgagtttttcgatatattcgagaaagagaaggtggacaaggaggccctagccctttgtactgaccgtgacttgcaggagataggaattccattgggtccccggaaaaaaatcttaaattatttctctactaggaaaaattccatgggcatcaagagacccgctccccagccagcatcaggagcgaatatcccgaaggagagtgagttctgctcttccagtaacacgaggaatggtgactatctcgacgtcgggatcgggcaagtgtccgtgaaataccctcgtctgatctacaagccagagatcttcttcgcctttggctcccccattggcatgttccttactgtccgaggacttaaaaggatcgaccctaattatagattcccaacatgcaaagggttcttcaacatttatcaccctttcgatcccgtagcctaccggattgagcccatggtggtccctggcgtggaattcgagccaatgctgattccacatcataagggtaggaaacggatgcacctcgaactccgagagggcttgacacggatgtcaatggacctcaagaacaacctcctgggctctttgcggatggcctggaagtcctttactcgcgccccctatcccgcactccaggcgtctgagactcccgaggagactgaggccgaacctgagagcacatccgagaaaccatctgacgtgaacaccgaagagacgagtgtagccgtcaaggaggaggtactccccattaatgtcggcatgttgaatggcggccagcgaattgattatgtgttgcaggagaagcccatagaaagcttcaatgagtatctcttcgccctacaaagtcatctgtgttactgggagtctgaggacacagtactcttggtcttaaaagaaatctatcagacgcaggggatttttctcgaccaaccccttcagtag

SEQ ID NO: 284646 - DNA, 2136 bp, Artificial Sequence
  derived and/or modified sequence
atgagctctgtgcagagccagcaggagcagctgagccagagcgaccccagccccagccccaacagctgcagcagctttgagctgattgacatggatgctggcagcctgtatgagcctgtgagcccccactggttctactgcaagatcatcgacagcaaggagacctggatccccttcaacagcgaggacagccagcagctggaggaggcctacagcagcggcaagggctgcaatggccgggtggtgcccacagatggcggccgctatgatgtgcacctgggggagaggatgagatatgctgtgtactgggatgagctggccagcgaggtgcggcgctgcacctggttctacaagggggacaaggacaacaagtatgtgccctacagcgagagcttcagccaggtgctggaggagacctacatgctggccgtgaccctggatgagtggaagaagaagctggagagccccaaccgggagatcatcatcctgcacaaccccaagctgatggtgcactaccagcctgtggccggcagtgatgactggggcagcacccccacagagcagggccggcccaggacagtgaagaggggcgtggagaacatctctgtggacatccactgtggggagcccctgcagattgaccacctggtgtttgtggtgcatggaattggccctgcctgtgacctgcgcttccgcagcatcgtgcagtgtgtgaatgacttccgctctgtgtccctgaacctgctgcagacccacttcaagaaggcccaggagaaccagcagatcggccgggtggagttcctgcctgtgaactggcacagccccctgcacagcactggagtggatgtggacctgcagaggatcaccctgcccagcatcaaccggctgcggcacttcaccaatgacaccatcctggatgtgttcttctacaacagccccacctactgccagaccatcgtggacacagtggccagcgagatgaaccgcatctacaccctcttcctgcagagaaatccagacttcaagggcggcgtgtccattgctggccacagcctgggcagcctcatcctgtttgacatcctgaccaaccagaaggacagcctgggggacattgattctgagaaggacagcctgaacatcgtgatggaccagggcgacacccccaccctggaggaggacctgaagaagctgcagctgtctgagttctttgacatctttgagaaggagaaggtggacaaggaggccctggccctgtgcacagaccgggacctgcaggagatcggcatccccctgggccccaggaagaagatcctgaactacttcagcaccaggaagaacagcatgggcatcaagaggcctgccccccagcctgccagcggggccaacatccccaaggagagcgagttctgcagcagcagcaacaccagaaatggagactacctggatgtgggcatcggccaggtgtctgtgaagtaccccaggctcatctacaagccagagatcttctttgccttcggcagccccatcggcatgttcctgactgtgcggggcctgaagagaattgaccccaactaccgcttccccacctgcaagggcttcttcaacatctaccacccctttgatcctgtggcctacagaattgagcccatggtggtgcctggggtggagtttgagcccatgctgatcccccaccacaagggcaggaagaggatgcacctggagctgcgggagggcctgaccaggatgtccatggacctgaagaacaacctgctgggcagcctgaggatggcctggaagagcttcacccgggccccctacccagccctgcaggccagcgagaccccagaggagacagaggccgagcctgagagcaccagcgagaagcccagtgatgtgaacacagaggagacctctgtggccgtgaaggaggaggtgctgcccatcaacgtgggcatgctgaatggaggccagagaattgattatgtgctgcaggagaagcccatcgagagcttcaatgagtacctgtttgccctgcagagccacctgtgctactgggagagcgaggacacagtgctgctggtgctgaaggagatctaccagacccagggcatcttcctggaccagcccctgcagtag

SEQ ID NO: 284647 - DNA, 816 bp, Artificial Sequence
  derived and/or modified sequence
atggagaaggagaccggcatcagccagcagaggaactactacttcacccagagcaaaggagagcccctgcagattgaccacctggtgtttgtggtgcatggaattggccctgcctgtgacctgcgcttccgcagcatcgtgcagtgtgtgaatgacttccgctctgtgtccctgaacctgctgcagacccacttcaagaaggcccaggagaaccagcagatcggccgggtggagttcctgcctgtgaactggcacagccccctgcacagcactggagtggatgtggacctgcagaggatcaccctgcccagcatcaaccggctgcggcacttcaccaatgacaccatcctggatgtgttcttctacaacagccccacctactgccagaccatcgtggacacagtggccagcgagatgaaccgcatctacaccctcttcctgcagagaaatccagacttcaagggcggcgtgtccattgctggccacagcctgggcagcctcatcctgtttgacatcctgaccaaccagaaggacagcctgggggacattgattctgagaaggacagcctgaacatcgtgatggaccagggcgacacccccaccctggaggaggacctgaagaagctgcagctgtctgagttctttgacatctttgagaaggagaaggtggacaaggaggccctggccctgtgcacagaccgggacctgcaggagatcggcatccccctgggccccaggaagaacctgagcagcgctgtggccgtcatcctggagatggtgaccatctggatgctggccctgggccgctgcctgtag

SEQ ID NO: 284648 - DNA, 4921 bp, Artificial Sequence
  derived and/or modified sequence
attccgactttcccgccccgtacgtgaggggccgccttgaagcctcttccgccacggacactcgaaactgatcttgaagcccctgccgtcacggatactagaaactgatctcgaagccccttccgccacggacactcgaaactctcccccactgttagacctcagcagccagcagcccgccgcccggcgctgcagctccctgcccgcaggagccacgtctcgcgcgactccccccacctctcgcgacacttgccgcccgtgccctgcggccctgcacgccccacccgcggtcgcgcgccgcgctccccgccgcctcaccttttcgcctggcatccgggcccgctactcgcccactgggagcgccgtggcgcctggtgttcggcgcgagcccggcggggctgcaggttccgccctgctccgccgcgccccgcccgggctggggtaaaggccgcggccgggccatgcagtgtcctcctcagggagggcaggagagcctgaggagtggcggggccgccagagagcgaaatgtcatcagtgcagtcacaacaggagcagttgtcccagtcagatccatctccgtcaccaaactcatgtagttcctttgagctaatagacatggatgctggcagcttgtatgaaccagtttctccccattggttttattgtaagataatagattctaaggagacatggattcctttcaactctgaggattcacagcagctggaagaggcatatagctctggaaaaggttgtaatgggagagttgttcctactgatgggggcagatatgatgttcatttgggggagaggatgcggtatgctgtatactgggatgaactggcatcggaagtgagacgatgtacgtggttttacaagggggacaaagacaataagtatgttccctactcggagagcttcagccaagttttagaggaaacttacatgcttgctgtaactttggatgaatggaaaaagaaactggaatctcccaacagagaaattattattttacacaatccaaagcttatggtgcattaccagccagttgcagggtctgatgattggggttcaacacccacggagcagggtcgaccaagaactgtgaagagaggagttgagaacatctctgttgacattcattgtggagaacctttacaaatagatcacttggtttttgtagtccatgggattggaccagcttgtgatctccgctttcgaagcattgtacagtgtgttaatgattttcgcagtgtttccttgaacttgctacagacacattttaagaaagcccaagaaaatcagcagattgggagggtagaatttcttccagtcaactggcacagtcctttgcattctactggtgtggatgtagatctgcagcgaataaccctgcccagcattaaccgcctcaggcacttcaccaatgacacaattctggatgtcttcttctacaatagtcccacctactgtcagactattgtggacacagttgcttctgaaatgaaccgaatatacacactttttctacagaggaaccctgatttcaaagggggtgtatccattgctggtcatagtttaggttcgcttatattgtttgatatcctaacaaatcagaaagattctttgggggatattgacagtgaaaaggattcgctaaatattgtaatggatcaaggagatacacctacactagaggaagatttgaagaaacttcagctctctgaattctttgatatctttgagaaggagaaagtagataaggaagctctggctttatgtacagaccgagatcttcaggaaataggaattcctttaggaccaagaaagaagatattaaactatttcagcaccagaaaaaactcaatgggtattaagagaccagccccgcagcctgcttcaggggcaaacatccccaaagaatctgagttctgcagtagcagtaatactagaaatggtgactatctggatgttggcattgggcaggtgtctgtgaaatacccccggctcatctataaaccagagatattctttgcctttggatctcccattggaatgttccttactgtccgaggactaaaaagaattgatcccaactacagatttccaacgtgcaaaggtttcttcaatatttatcacccttttgatcctgtggcctataggattgaaccaatggtggtcccaggagtggaatttgagccaatgctgatcccacatcataaaggcaggaagcggatgcacttagaactgagagagggcttgaccaggatgagtatggaccttaagaacaacttgctaggttcgctgcggatggcctggaagtcttttaccagagctccataccctgccttacaagcttcagaaacaccagaagaaactgaagcagaacctgaatcaacttcagagaagcctagtgatgttaacacagaagagacctctgtggcagttaaagaagaagtcctgcctatcaatgtggggatgctgaatggaggccaacgcattgactatgtgctacaggagaagcctattgaaagttttaatgagtatttatttgctttacaaagccatctatgctactgggagtctgaagatacagtattgctcgtcctcaaagagatctaccaaacccagggtatcttccttgatcagcctttacagtaaaaatgacccatctatggctgcttaatacggacattgagggatccttccccagaaaatccacctgtttgttgctgcaattttcctctcctcagctgcgtcatttcctgcatgttgcctgccacttactcaccactggggtctttggaagataatcttcctctttggaaatgaatggaaaagcaaaaggccctattacttttaaccactggcttcatataaacacttgccatttttttctgcatagctgggggtggtttgtgtctttaattctttgatgatagtttatagttgccacactttattgattagtacttgacagggtgtaaagcctattttgggtttgatttgttttgggtggggtagacatgtttttaaggaacttattgcttatctttagaaaatgttctagtttggaaacagattcttgagattcagaaggcattttggagtacacttatctcttgtttgtgttgaactgaaggctaagtctcagtggacatggaaaagacttttgggtgatttatttttgaacctgcatttctttcttatgtgtagtgtatgaagaaagactagaatgtagctttaaaaaagtgttgtttactctcttagaactgacagacttattgccagaaatcactgatgttcattgtttttgcaactgtttgagctgctgtaagagtctaaagttgacaagttagttcatgttaggtgcatctttataaagcaaagatgttgtatatcctaggcctcccttttatatttgatagaagttatttgctaatagcttctattcttacgttgaaaatagttgtaaaagctgatgaacctgaaattgtgtagcctctacaggctgctgaggttctaaataaaaccttttagtggtgcctttatggtgaaacagaatttgtcacctgccatttctacttgagctaaggtagtattgtgtatcctctttccttcttaggtatccataatccacaaagcatatttaaaaggctcttggcacgggcagcattggttgagcaggtaggtttggctagggggaaatgtttaacttgttctgaaagaaaaacttatgtctgtagggtccaagaaacagctattccagagtcagtgtcagctgagtctggaacatatgaagtgaggtttacttctaagaacacaagtgactgcacactaattttgtcaaggcatcttttcactactttgctgtagatttttcttcttcattggtcagtttgtcattgtctttgtagttctctttatgataatcctttatacttgctctcagattccacaggcctctgtttatagagtggcaaaggcaggcgagctgtggtttattgtttataaatttttttataaatgttatggtattcaaagccactgacatttaatatttactgaagccattccttagacagcagtggtctttatccctttctggaaagaaaaggaaaatgaagggtaattactgtcaccatggagattgtagaggtaaggttggggtataggtcaggcctggcctttctttgtcatctgcttatagtctagtgctaagtatgccactaagtttcagatatatggaatactttatttttttaaaggtatataaactctgagttattgagaattaagtattcactgtatattaaggggaagcttttgccaagttgtggtcttcaaatttatgtttactcttcctattggcagaataggtgctatttaagagtaaaccaaaggataagcagagggagtccctataaccaaagatggacagcatagccctggatagccagataaaccactctttgtattaagaaatgtttctttcctagtggtgaggggtgggtaactgtgaaagagctttatatcttgtctattcatggtattatagctgtatattcccaggatgataagcttgattgaaatcctgtatttagtcatatattatttgcgctgcttcatttgtatcatgtgcaatctctagaccaaccctatttttaaactctggtacagcatcattttgtacatattcccagctgcagaactagtatcacttatctcagcaaaagagattgtttgcatggaaagattaatagcactgattagatttctaatattttgcatttttgaaatgtttgttttctacgtgattatatttaaaactttagtaaatactaacatgaaaccatattgactagtggcctacttttacctggactcacccgtctcaaagtcaagaaaatcagtacagtca

SEQ ID NO: 284649 - DNA, 2136 bp, Artificial Sequence
  derived and/or modified sequence
atgagcagcgtgcagagccagcaggagcagctgagccagagcgacccctctcctagccctaatagctgttcgtcatttgagctgatcgatatggatgcaggctcactatacgaaccagtgagccctcattggttttactgcaagatcatagacagcaaggagacctggatacccttcaactccgaggatagtcagcaattggaagaggcctacagttctggaaaaggatgcaacggtcgtgtagtccccacagatggaggcagatatgatgtgcacttgggagagaggatgaggtacgccgtctactgggatgaactggcttcagaggttcgaaggtgtacttggttctataagggcgataaggacaataaatacgtgccttattctgagtccttcagccaggttctggaggaaacatacatgctggccgtcactcttgacgagtggaagaagaagctcgagtcccccaatcgggagattatcatactccataacccgaaactgatggtccattaccaacctgtggccggcagcgatgactggggttcaactccaacagagcagggtagaccccgcaccgtaaaacgaggcgtggagaatatcagcgtcgatattcattgtggagagccgctgcagattgatcatcttgtgttcgtggttcatgggattggtccggcgtgtgatttgcggttccgtagcatagtgcagtgtgtgaacgacttccgaagcgtttctctcaacctgctgcagactcactttaagaaagctcaggaaaatcagcagatcggaagagtggaattcctgcctgtcaattggcactccccactccacagtactggagtggacgtcgacttgcagcgcattaccctgcccagcataaacagattgcgccacttcacgaatgataccatccttgacgtgttcttctataatagtcctacatactgtcagaccatcgtcgacacagtcgctagcgaaatgaacagaatttacactttatttctccagcgaaatccagactttaagggcggggtatccatcgccgggcatagccttgggagtctaatcctgtttgacattctcacaaaccagaaggatagtctaggtgatatcgattcagagaaagacagtctgaacatcgtaatggatcaaggtgacacacccacgctggaagaggacctcaagaaactgcagttgtctgagttctttgatatattcgaaaaagaaaaggtcgataaggaggccctagccctctgcaccgacagggacctgcaggaaatcggcattcctctgggtcccagaaaaaaaatcctgaactacttttctacacggaaaaactccatggggattaagcgccccgctcctcagccagcctctggcgcgaacattccaaaagagagcgaattctgttcctcatctaacactaggaatggggattatctggacgtcggcattggtcaggtgtctgtgaaataccccagacttatatataagcccgagatcttttttgctttcggctcccccattgggatgttccttactgtgagggggttaaagcgaattgacccaaattatcggtttcccacctgtaaagggtttttcaacatctatcatccttttgaccccgtcgcctaccgcatcgaacctatggtcgtgccaggggtcgagttcgagcccatgctcatcccccaccacaagggcaggaaaaggatgcacttggaactccgcgaaggactcaccaggatgtccatggatcttaagaacaatcttttgggcagcctgcgaatggcatggaaatccttcactagggccccttatccagccctacaggcatctgagactcctgaagagacagaagctgagcctgagtctacgtcagagaagccctcagacgtaaatacagaagagacgtccgtagccgtcaaggaagaggttttgcctattaatgtcggcatgctgaatgggggtcaaaggatagactatgtacttcaggagaaaccaattgagtcattcaacgagtatttatttgcgctccaaagtcatctttgttactgggaatccgaggacaccgtgctgttagttcttaaggagatctatcagactcaaggcatatttttggatcagcccctgcagtag

SEQ ID NO: 284650 - DNA, 816 bp, Artificial Sequence
  derived and/or modified sequence
atggagaaggagaccggcatcagccagcagcggaactactacttcacacaaagcaaaggggagcccctgcagattgatcaccttgtctttgtagtccacggaattggaccagcctgtgatctccggttccgcagtattgtccagtgtgtgaatgacttccgttctgttagtctgaacctactccagacgcactttaagaaggctcaggagaatcagcagattggcagagtagagtttttgcctgtgaactggcatagtcctctgcactctacaggagtcgatgttgacttgcagcggataaccctgccaagcatcaataggttgagacatttcactaacgacacaattctagacgtgtttttttacaactctccaacctactgtcagacaatcgtggacactgtcgcatccgaaatgaacaggatttacacgctatttctccagagaaacccagatttcaaaggaggcgtgtctatagccggacacagtcttggttctttgatcctgtttgatatcttaactaaccagaaagactctctgggagatatcgacagcgaaaaagatagcttgaacattgtgatggaccagggtgacaccccgacgcttgaggaagacttaaaaaagcttcagttgagcgagttctttgacatcttcgagaaggagaaggtggacaaagaagccctggccctgtgtaccgacagggatcttcaagaaattgggatcccacttggtccaaggaagaatctctctagtgctgtggcagtgattttggaaatggtaacaatctggatgctggccctggggcgttgtttgtag

SEQ ID NO: 284651 - DNA, 2136 bp, Artificial Sequence
  derived and/or modified sequence
atgagcagcgtgcagagccagcaggagcagctgagccagagcgaccccagtccaagccctaatagctgcagcagtttcgagctgattgacatggacgcgggttccttatatgaacccgtgagtccccattggttctactgcaagatcatcgactccaaggaaacatggattccttttaactctgaggatagccagcaattagaggaggcctattctagtgggaaaggatgcaatgggcgcgttgttccgactgacgggggtagatacgacgtccatctaggggagaggatgcgatatgccgtttattgggacgaactggcaagcgaggttaggcgctgtacgtggttctataaaggagacaaggacaacaaatatgtgccttactcagagtcttttagccaggtcctggaagagacctacatgttggcggttaccctcgatgagtggaagaagaaactagaatctccaaacagagagataattattttgcacaatcccaaattaatggttcattatcaaccggtagccggttcggacgactgggggagcacacctaccgaacaaggccggccccggactgtgaagcggggagtggagaacatctcggtggatattcattgtggagaacccctgcagatagaccacttggtgtttgtcgtacacggtatagggcctgcctgtgacctccggttccggtcaattgtccagtgcgtgaatgacttccgtagcgtgtcactcaacctcctgcagacacattttaaaaaggcacaggaaaaccagcagatcggacgagtggagttcctccccgtgaactggcactccccactgcacagcacgggtgtagatgtagatttgcaacgcattaccctgccgagcattaaccggttgaggcatttcacaaatgataccattctggatgtgttcttctataactctcctacctattgccagacaatcgtggacactgtcgcgagcgagatgaaccggatttacacactgttcctgcaacgaaatccagacttcaaaggaggcgtcagcatcgctggacattctttgggctcacttatattgttcgacatcctaactaatcaaaaggattcactcggtgacattgacagcgagaaagatagcctaaacatcgtaatggaccagggcgacaccccgactctggaagaggatctcaaaaagctgcaactgagtgaattttttgacatttttgaaaaggaaaaagtcgataaggaggccctcgctctctgtacggatagagacctgcaggagattggcatccctctgggtccccggaaaaagatcctgaattatttcagcactcgaaagaactccatgggcatcaaaaggccagcgcctcagccggcaagcggggcaaacatcccgaaggaaagcgaattttgttcttcgtctaacacgagaaacggggactacctggacgtcggcattgggcaggtctctgtgaagtacccgcggctgatttacaagcctgagattttctttgcgttcgggtcccctatcggaatgttcttaacagtccgaggcctgaagcgcatcgacccgaactaccgcttcccaacatgcaaaggattcttcaacatctaccatccctttgaccccgtggcttacaggatcgaaccaatggttgtacctggcgttgaattcgaacctatgctcatcccacatcacaaaggccgaaagcgcatgcaccttgaactccgtgaaggcctaacacgcatgtctatggacctgaagaataatcttctaggaagcctgaggatggcatggaaatcattcacgagagccccttaccctgctttgcaggcgtcggaaacccccgaggagacagaagcagagccagagtctaccagtgagaagccctctgacgttaacactgaagaaaccagcgtggcggtaaaagaggaggtcttaccaattaacgtggggatgctaaacggggggcagcggatagattacgttctgcaggaaaagcctatcgagtccttcaatgagtatctgtttgccctgcagtcgcatctctgctactgggaatcagaggatacagtactgctcgttttgaaagagatttatcagactcagggaatttttctggaccagcccctacagtag

SEQ ID NO: 284652 - DNA, 2136 bp, Artificial Sequence
  derived and/or modified sequence
atgtcttcggtgcagtcccagcaggagcagctgtctcaatccgatccatctccatcccccaattcctgctcctcatttgagcttatcgatatggatgcaggcagtctgtatgagcccgttagtcctcactggttctattgtaagataatcgactcgaaggagacatggatcccctttaatagcgaggactcccagcagcttgaggaggcctactcatccggcaaggggtgtaatggcagagtggtgcccacagatggcggtagatacgacgtgcacttgggagagaggatgcggtatgcggtctattgggacgagttggcctctgaggtgagacgctgtacatggttctataagggagacaaagataacaaatatgtgccttactcggaaagcttctcacaggttctggaagaaacgtacatgctggcagtgactctggatgagtggaaaaaaaagctcgagtcccccaaccgggagatcatcattctccacaaccccaagttaatggtgcactatcaaccagtggccggttcagacgactggggctccacccctaccgaacaggggagaccacggacagttaaacggggagtcgaaaatatttccgtggatattcactgcggagaacctcttcagattgatcatcttgtgttcgtggtgcatgggatcggcccagcatgtgatctcaggttccgtagcattgtgcagtgtgtgaatgattttaggtctgtaagcctcaacctgctgcagacgcactttaagaaagcccaggaaaaccagcagattggccgagtcgaatttttacccgttaactggcactcacctctccattccaccggagtagacgtagacctacagagaatcacactgccaagtatcaacagattgaggcacttcaccaacgacaccatcctcgacgtctttttctacaacagtccaacctattgtcagacaattgtagacactgtagcctcggagatgaacaggatctacaccttgttcctacagagaaatcccgatttcaagggcggagtttcgatcgccggtcactcattgggatcactgattctgttcgacattctgactaatcaaaaggattcgcttggtgatatcgattctgaaaaggactctctgaacattgtcatggatcaaggcgatacaccaactctggaggaagatttaaaaaagttacaactgagcgagttcttcgacatatttgagaaggagaaggtggataaagaggccttagctctctgcaccgaccgggacctccaagagatcggcatccccctgggccctcgtaaaaaaatcctgaactatttctccacacggaagaacagtatgggtattaagcggcctgcccctcagcctgcctccggagccaacatccccaaagagtctgaattctgctccagttctaatactcgaaatggggattacttggacgtgggtatcggccaagttagcgtgaagtaccctcggctcatttataaacccgaaattttttttgctttcggctcacctattggcatgttcctgacagtgcggggtcttaaaaggattgacccaaattataggttcccaacttgtaagggcttcttcaacatataccatcccttcgatccggtagcgtaccgtattgagcctatggtcgtgcccggagttgaattcgaacctatgctgatacctcaccataaaggcaggaaacgcatgcacttggaactccgcgagggccttaccagaatgtctatggacctgaaaaataatctgctgggttcactccggatggcttggaaaagtttcacccgcgcaccttaccccgctttacaagcgtcagagacgccggaggaaaccgaggctgagcctgaatcaacctctgagaaaccatccgatgtcaacaccgaggaaactagcgtggccgtcaaagaggaggtgcttccaatcaacgtgggaatgttgaacggaggccaacggattgattatgtattgcaagaaaagcctattgaaagtttcaatgagtacctgtttgcgcttcagtctcatctttgctattgggagtccgaggacaccgtgctgttagttctcaaggagatctaccaaacacagggaatcttcctggatcagcccctgcagtag

SEQ ID NO: 284653 - DNA, 816 bp, Artificial Sequence
  derived and/or modified sequence
atggagaaggagactggtattagtcagcagcgcaactactattttacccaatcaaagggagagccccttcagatcgaccacctcgtgttcgtagtacacggtatcggtccggcatgtgatctcagatttcgtagtattgtacagtgtgtgaacgatttccggtctgtctcactgaatctgttgcagacccactttaagaaagcccaggaaaaccagcaaattggacgcgttgagtttctccccgtgaattggcactctccactccattctactggcgtcgatgtagacctgcagcgaatcactctgccatctatcaataggctgaggcattttaccaacgacaccatccttgatgtcttcttctacaattcaccgacatattgccagaccatagtggatacagttgcatccgaaatgaaccggatctatactttattccttcagcggaacccagatttcaaggggggagtttccatcgctggacattcgctcggatccctcattttgtttgatattctcacgaaccagaaggattctctgggggacatcgactctgagaaggactcgctgaacattgttatggaccaaggtgatacacctaccctagaggaagacctgaaaaaactccaattgtccgaattttttgatattttcgaaaaagaaaaagtggacaaggaggcacttgccctttgtaccgatcgcgacctgcaagagatcggaattcctctggggccacgcaagaatctctcaagtgcagtggccgtaattttagagatggtgaccatctggatgctcgccttagggcgttgcctctag

SEQ ID NO: 284654 - DNA, 2136 bp, Artificial Sequence
  derived and/or modified sequence
atgtcttctgtgcaatctcagcaggagcagctgagccagtccgacccctctccctcacccaattcttgtagctccttcgaattgattgacatggacgccggaagcctatatgaaccagtatccccccactggttctactgtaagattatcgatagcaaagagacatggataccatttaattcagaggatagccagcaactcgaagaggcctatagctctggtaaggggtgtaacgggagggtggttcccacagatggaggcagatatgatgtccacctgggagaacgcatgcggtacgccgtttattgggacgagttagcttcagaggtgaggcgatgtacatggttctataaaggagataaagacaacaagtatgttccttattccgaaagctttagccaggtcctggaggaaacgtatatgctggccgtgaccctggacgaatggaaaaagaagctggaatcgcccaatagagagataattatactccacaatcccaagttaatggtccattaccagcctgtggcgggtagcgatgactggggatccacacctaccgagcaggggcgtccccgtacagttaaaagaggagtcgagaatatctcagtggacattcactgcggcgagccattgcagatcgaccacctggttttcgtggtgcacgggatcggccctgcctgcgacctgcgcttccggtccattgtacaatgcgtgaatgatttccgctctgtgtccttgaacttgctccaaacccactttaaaaaggcccaggaaaatcagcagatcggacgggtcgaatttctgccggtgaattggcactccccattgcacagcacaggagttgacgttgacctgcagaggatcactcttccatccattaacaggttgaggcacttcacaaacgatacaatcctggatgtttttttctacaactctcccacatattgccagacaatagtggacacagtagcgagcgagatgaacagaatttacacactgtttctgcagaggaatcccgacttcaaaggaggggtctctatcgcaggacacagcctgggatccctgatcctgttcgacattctcacaaaccagaaagacagcctgggggacattgattccgagaaagattcacttaatattgtgatggaccagggggacacccctacgctcgaggaggacctcaagaaacttcaattgagcgaatttttcgacatcttcgagaaggaaaaggtagacaaggaggcactcgccctctgcacagatagagacctgcaggagattgggatccctcttggcccaaggaaaaagattctgaattacttctctactcgaaaaaattcgatgggaataaaacgccctgcaccacagcctgcatccggagcaaacattccaaaagagagcgaattctgctcaagttcaaataccaggaatggcgactatctggacgtcgggatcggccaggtttctgtgaaatacccacggctcatatataagcctgagatttttttcgcctttgggtctccaatcggtatgtttcttactgtgaggggactaaagcgaatcgaccctaattacaggtttcccacttgtaaggggttttttaatatctatcacccattcgatcccgtagcttatagaatcgaacccatggttgtcccaggggtggaattcgaacctatgcttatccctcaccacaaaggcagaaaaaggatgcatctggaattgagagaagggttgaccagaatgtccatggacctaaaaaataacctcttgggctctctaagaatggcctggaagtctttcacccgcgcaccctacccagctctccaagcgagcgaaacccctgaggagacagaagcggaaccggagtcaacatccgagaaaccatcagatgttaacactgaagagacgtcagtagctgtgaaggaggaagtattgcctattaatgtgggaatgttaaatgggggacagaggatcgattacgttctgcaggagaagcctatcgagagttttaacgagtacttgtttgcactgcagtctcacctgtgctactgggagagcgaggacacagtgttactggtactgaaggagatatatcagacccagggaatctttctcgaccagccgctgcagtag

SEQ ID NO: 284655 - DNA, 1557 bp, Artificial Sequence
  derived and/or modified sequence
catcagtgcagtcacaacaggagcagttgtcccagtcagatccatctccgtcaccaaactcatgtagttcctttgagctaatagacatggatgctggcagcttgtatgaaccagtttctccccattggttttattgtaagataatagattctaaggagacatggattcctttcaactctgaggattcacagcagctggaagaggcatatagctctggaaaaggttgtaatgggagagttgttcctactgatgggggcagatatgatgttcatttgggggagaggatgcggtatgctgtatactgggatgaactggcatcggaagtgagacgatgtacgtggttttacaagggggacaaagacaataagtatgttccctactcggagagcttcagccaagttttagaggaaacttacatgcttgctgtaactttggatgaatggaaaaagaaactggaatctcccaacagagaaattattattttacacaatccaaaggagaacctttacaaatagatcacttggtttttgtagtccatgggattggaccagcttgtgatctccgctttcgaagcattgtacagtgtgttaatgattttcgcagtgtttccttgaacttgctacagacacattttaagaaagcccaagaaaatcagcagattgggagggtagaatttcttccagtcaactggcacagtcctttgcattctactggtgtggatgtagatctgcagcgaataaccctgcccagcattaaccgcctcaggcacttcaccaatgacacaattctggatgtcttcttctacaatagtcccacctactgtcagactattgtggacacagttgcttctgaaatgaaccgaatatacacactttttctacagaggaaccctgatttcaaagggggtgtatccattgctggtcatagtttaggttcgcttatattgtttgatatcctaacaaatcagaaagattctttgggggatattgacagtgaaaaggattcgctaaatattgtaatggatcaaggagatacacctacactagaggaagatttgaagaaacttcagctctctgaattctttgatatctttgagaaggagaaagtagataaggaagctctggctttatgtacagaccgagatcttcaggaaataggaattcctttaggaccaagaaagaatctgagttctgcagtagcagtaatactagaaatggtgactatctggatgttggcattgggcaggtgtctgtgaaatacccccggctcatctataaaccagagatattctttgcctttggatctcccattggaatgttccttactgtccgaggactaaaaagaattgatcccaactacagatttccaacgtgcaaaggtttcttcaatatttatcacccttttgatcctgtggcctataggattgaaccaatggtggtcccaggagtggaatttgagccaatgctgatcccacatcataaaggcaggaagcggatgcacttagaactgagagagggcttgaccaggatgagtatggaccttaagaacaacttgcta

SEQ ID NO: 284656 - DNA, 4532 bp, Artificial Sequence
  derived and/or modified sequence
ggaacctcggctcccgggaagccccgagcctgggggaaccctgggcaccctgtgaaccctgtggtctgcactggctgccctgctgctgtcgcggggctgcgggcggacgacctgagcccgagctccgagggcccggagcggggcgccagggcctagggtcgcgggggccaggggcgcgccagggtggctgagagagcgaaatgtcatcagtgcagtcacaacaggagcagttgtcccagtcagatccatctccgtcaccaaactcatgtagttcctttgagctaatagacatggatgctggcagcttgtatgaaccagtttctccccattggttttattgtaagataatagattctaaggagacatggattcctttcaactctgaggattcacagcagctggaagaggcatatagctctggaaaaggttgtaatgggagagttgttcctactgatgggggcagatatgatgttcatttgggggagaggatgcggtatgctgtatactgggatgaactggcatcggaagtgagacgatgtacgtggttttacaagggggacaaagacaataagtatgttccctactcggagagcttcagccaagttttagaggaaacttacatgcttgctgtaactttggatgaatggaaaaagaaactggaatctcccaacagagaaattattattttacacaatccaaagcttatggtgcattaccagccagttgcagggtctgatgattggggttcaacacccacggagcagggtcgaccaagaactgtgaagagaggagttgagaacatctctgttgacattcattgtggagaacctttacaaatagatcacttggtttttgtagtccatgggattggaccagcttgtgatctccgctttcgaagcattgtacagtgtgttaatgattttcgcagtgtttccttgaacttgctacagacacattttaagaaagcccaagaaaatcagcagattgggagggtagaatttcttccagtcaactggcacagtcctttgcattctactggtgtggatgtagatctgcagcgaataaccctgcccagcattaaccgcctcaggcacttcaccaatgacacaattctggatgtcttcttctacaatagtcccacctactgtcagactattgtggacacagttgcttctgaaatgaaccgaatatacacactttttctacagaggaaccctgatttcaaagggggtgtatccattgctggtcatagtttaggttcgcttatattgtttgatatcctaacaaatcagaaagattctttgggggatattgacagtgaaaaggattcgctaaatattgtaatggatcaaggagatacacctacactagaggaagatttgaagaaacttcagctctctgaattctttgatatctttgagaaggagaaagtagataaggaagctctggctttatgtacagaccgagatcttcaggaaataggaattcctttaggaccaagaaagaagatattaaactatttcagcaccagaaaaaactcaatgggtattaagagaccagccccgcagcctgcttcaggggcaaacatccccaaagaatctgagttctgcagtagcagtaatactagaaatggtgactatctggatgttggcattgggcaggtgtctgtgaaatacccccggctcatctataaaccagagatattctttgcctttggatctcccattggaatgttccttactgtccgaggactaaaaagaattgatcccaactacagatttccaacgtgcaaaggtttcttcaatatttatcacccttttgatcctgtggcctataggattgaaccaatggtggtcccaggagtggaatttgagccaatgctgatcccacatcataaaggcaggaagcggatgcacttagaactgagagagggcttgaccaggatgagtatggaccttaagaacaacttgctaggttcgctgcggatggcctggaagtcttttaccagagctccataccctgccttacaagcttcagaaacaccagaagaaactgaagcagaacctgaatcaacttcagagaagcctagtgatgttaacacagaagagacctctgtggcagttaaagaagaagtcctgcctatcaatgtggggatgctgaatggaggccaacgcattgactatgtgctacaggagaagcctattgaaagttttaatgagtatttatttgctttacaaagccatctatgctactgggagtctgaagatacagtattgctcgtcctcaaagagatctaccaaacccagggtatcttccttgatcagcctttacagtaaaaatgacccatctatggctgcttaatacggacattgagggatccttccccagaaaatccacctgtttgttgctgcaattttcctctcctcagctgcgtcatttcctgcatgttgcctgccacttactcaccactggggtctttggaagataatcttcctctttggaaatgaatggaaaagcaaaaggccctattacttttaaccactggcttcatataaacacttgccatttttttctgcatagctgggggtggtttgtgtctttaattctttgatgatagtttatagttgccacactttattgattagtacttgacagggtgtaaagcctattttgggtttgatttgttttgggtggggtagacatgtttttaaggaacttattgcttatctttagaaaatgttctagtttggaaacagattcttgagattcagaaggcattttggagtacacttatctcttgtttgtgttgaactgaaggctaagtctcagtggacatggaaaagacttttgggtgatttatttttgaacctgcatttctttcttatgtgtagtgtatgaagaaagactagaatgtagctttaaaaaagtgttgtttactctcttagaactgacagacttattgccagaaatcactgatgttcattgtttttgcaactgtttgagctgctgtaagagtctaaagttgacaagttagttcatgttaggtgcatctttataaagcaaagatgttgtatatcctaggcctcccttttatatttgatagaagttatttgctaatagcttctattcttacgttgaaaatagttgtaaaagctgatgaacctgaaattgtgtagcctctacaggctgctgaggttctaaataaaaccttttagtggtgcctttatggtgaaacagaatttgtcacctgccatttctacttgagctaaggtagtattgtgtatcctctttccttcttaggtatccataatccacaaagcatatttaaaaggctcttggcacgggcagcattggttgagcaggtaggtttggctagggggaaatgtttaacttgttctgaaagaaaaacttatgtctgtagggtccaagaaacagctattccagagtcagtgtcagctgagtctggaacatatgaagtgaggtttacttctaagaacacaagtgactgcacactaattttgtcaaggcatcttttcactactttgctgtagatttttcttcttcattggtcagtttgtcattgtctttgtagttctctttatgataatcctttatacttgctctcagattccacaggcctctgtttatagagtggcaaaggcaggcgagctgtggtttattgtttataaatttttttataaatgttatggtattcaaagccactgacatttaatatttactgaagccattccttagacagcagtggtctttatccctttctggaaagaaaaggaaaatgaagggtaattactgtcaccatggagattgtagaggtaaggttggggtataggtcaggcctggcctttctttgtcatctgcttatagtctagtgctaagtatgccactaagtttcagatatatggaatactttatttttttaaaggtatataaactctgagttattgagaattaagtattcactgtatattaaggggaagcttttgccaagttgtggtcttcaaatttatgtttactcttcctattggcagaataggtgctatttaagagtaaaccaaaggataagcagagggagtccctataaccaaagatggacagcatagccctggatagccagataaaccactctttgtattaagaaatgtttctttcctagtggtgaggggtgggtaactgtgaaagagctttatatcttgtctattcatggtattatagctgtatattcccaggatgataagcttgattgaaatcctgtatttagtcatatattatttgcgctgcttcatttgtatcatgtgcaatctctagaccaaccctatttttaaactctggtacagcatcattttgtacatattcccagctgcagaactagtatcacttatctcagcaaaagagattgtttgcatggaaagattaatagcactgattagatttctaatattttgcatttttgaaatgtttgttttctacgtgattatatttaaaactttagtaaatactaacatgaaaccata

SEQ ID NO: 284657 - protein, 330 aa, Artificial Sequence
  derived and/or modified sequence
MDQGDTPTLEEDLKKLQLSEFFDIFEKEKVDKEALALCTDRDLQEIGIPLGPRKKILNYFSTRKNSMGIKRPAPQPASGANIPKESEFCSSSNTRNGDYLDVGIGQVSVKYPRLIYKPEIFFAFGSPIGMFLTVRGLKRIDPNYRFPTCKGFFNIYHPFDPVAYRIEPMVVPGVEFEPMLIPHHKGRKRMHLELREGLTRMSMDLKNNLLGSLRMAWKSFTRAPYPALQASETPEETEAEPESTSEKPSDVNTEETSVAVKEEVLPINVGMLNGGQRIDYVLQEKPIESFNEYLFALQSHLCYWESEDTVLLVLKEIYQTQGIFLDQPLQ

SEQ ID NO: 284658 - protein, 156 aa, Artificial Sequence
  derived and/or modified sequence
MSSVQSQQEQLSQSDPSPSPNSCSSFELIDMDAGSLYEPVSPHWFYCKIIDSKETWIPFNSEDSQQLEEAYSSGKGCNGRVVPTDGGRYDVHLGERMRYAVYWDELASEVRRCTWFYKGDKDNKYVPYSESFSQVLEETYMLAVTLDEWKKKLESP

SEQ ID NO: 284659 - protein, 137 aa, Artificial Sequence
  derived and/or modified sequence
MSSVQSQQEQLSQSDPSPSPNSCSSFELIDMDAGSLYEPVSPHWFYCKIIDSKETWIPFNSEDSQQLEEAYSSGKGCNGRVVPTDGGRYDVHLGERMRYAVYWDELASEVRRCTWFYKGDKDNKYVPYSESFSQVLE

SEQ ID NO: 284660 - DNA, 993 bp, Artificial Sequence
  derived and/or modified sequence
atggaccagggcgacacccccaccctggaggaggacctgaagaagctgcagctgagcgagttcttcgacatcttcgagaaggagaaggtggacaaggaggccctggccctgtgcaccgacagagacctgcaggagatcggcatccccctgggccccagaaagaagatcctgaactacttcagcaccagaaagaacagcatgggcatcaagagacccgccccccagcccgccagcggcgccaacatccccaaggagagcgagttctgcagcagcagcaacaccagaaacggcgactacctggacgtgggcatcggccaggtgagcgtgaagtaccccagactgatctacaagcccgagatcttcttcgccttcggcagccccatcggcatgttcctgaccgtgagaggcctgaagagaatcgaccccaactacagattccccacctgcaagggcttcttcaacatctaccaccccttcgaccccgtggcctacagaatcgagcccatggtggtgcccggcgtggagttcgagcccatgctgatcccccaccacaagggcagaaagagaatgcacctggagctgagagagggcctgaccagaatgagcatggacctgaagaacaacctgctgggcagcctgagaatggcctggaagagcttcaccagagccccctaccccgccctgcaggccagcgagacccccgaggagaccgaggccgagcccgagagcaccagcgagaagcccagcgacgtgaacaccgaggagaccagcgtggccgtgaaggaggaggtgctgcccatcaacgtgggcatgctgaacggcggccagagaatcgactacgtgctgcaggagaagcccatcgagagcttcaacgagtacctgttcgccctgcagagccacctgtgctactgggagagcgaggacaccgtgctgctggtgctgaaggagatctaccagacccagggcatcttcctggaccagcccctgcagtag

SEQ ID NO: 284661 - DNA, 993 bp, Artificial Sequence
  derived and/or modified sequence
atggatcagggagacactccaactctggaggaggatctgaagaaattgcagttgagcgaattcttcgacatttttgagaaggagaaggtagacaaagaggcactagcactctgcacggacagagaccttcaggagattggaatacccttgggacccaggaaaaagattctgaattacttttccacccgcaagaactcaatgggcataaagcgccccgccccgcaaccggcctccggcgcaaatatacctaaggagtcagagttttgtagctcttccaacacacgtaacggagactatctcgacgtgggcatcggtcaagtcagcgttaagtacccccggctgatttacaagcccgagattttttttgcattcggaagcccgatcggcatgttcttgacagttcgggggctgaaacgaatcgacccaaattaccggttcccaacatgtaagggattttttaatatataccatcccttcgatcccgtcgcgtacaggatcgagccaatggttgtgcccggagtggagtttgagcccatgcttatcccacaccacaagggaagaaaaagaatgcacctggaactcagggaagggctaaccaggatgtccatggacctgaagaacaatctcctcggttctctccgcatggcctggaagtctttcaccagagctccatacccagccctccaagcatcagagactcctgaggagacagaggccgagccagagtcaacgtccgagaaacctagcgatgttaacacggaggaaacctctgtcgccgtgaaggaagaagtgttgccaatcaacgtcggaatgcttaacgggggacagagaattgactacgtgttgcaagaaaagccaatcgagagcttcaacgaatatctgtttgccctccagtcacacttatgttattgggagtcagaggataccgtcctattggttctaaaggagatctatcagacacaaggtatcttcctggaccagccccttcagtag

SEQ ID NO: 284662 - DNA, 993 bp, Artificial Sequence
  derived and/or modified sequence
atggaccagggcgacacccccaccctggaggaggacctgaagaagctgcagctgtctgagttctttgacatctttgagaaggagaaggtggacaaggaggccctggccctgtgcacagaccgggacctgcaggagatcggcatccccctgggccccaggaagaagatcctgaactacttcagcaccaggaagaacagcatgggcatcaagaggcctgccccccagcctgccagcggggccaacatccccaaggagagcgagttctgcagcagcagcaacaccagaaatggagactacctggatgtgggcatcggccaggtgtctgtgaagtaccccaggctcatctacaagccagagatcttctttgccttcggcagccccatcggcatgttcctgactgtgcggggcctgaagagaattgaccccaactaccgcttccccacctgcaagggcttcttcaacatctaccacccctttgatcctgtggcctaccgcatcgagcccatggtggtgcctggggtggagtttgagcccatgctgatcccccaccacaagggcaggaagaggatgcacctggagctgcgggagggcctgaccaggatgtccatggacctgaagaacaacctgctgggcagcctgaggatggcctggaagagcttcacccgggccccctacccagccctgcaggccagcgagaccccagaggagacagaagctgagcctgagagcaccagcgagaagcccagtgatgtgaacacagaggagacctctgtggccgtgaaggaggaggtgctgcccatcaacgtgggcatgctgaatggaggccagagaattgattatgtgctgcaggagaagcccatcgagagcttcaatgagtacctgtttgccctgcagagccacctgtgctactgggagagtgaagatactgtgctgctggtgctgaaggagatctaccagacccagggcatcttcctggaccagcccctgcagtag

SEQ ID NO: 284663 - DNA, 993 bp, Artificial Sequence
  derived and/or modified sequence
atggaccagggcgacacccccaccctggaggaggacctgaagaagttacagttaagcgagttcttcgatatttttgagaaagagaaggtggacaaggaagcattagcactctgtaccgaccgagacctgcaggaaattggaatacctctgggccctcggaagaagattttaaactattttagcacgagaaaaaattccatgggcatcaaacggcccgccccccaacccgcatcaggcgctaatatcccaaaagagagtgaattttgctctagttccaacactagaaatggcgactatttggatgtgggcatcggccaggtgagcgtcaagtatccgaggctcatctacaagcctgaaatcttttttgcgtttggaagcccgattggaatgttcctgactgtgcggggactgaagagaattgatcccaattatagattcccaacctgtaagggcttttttaatatctaccacccctttgatccagtggcctatcgtatagagcccatggttgtcccaggagtcgaattcgagccaatgctcattccccaccataaagggcgaaagcggatgcacctggagctcagggagggcttgacgagaatgtctatggatcttaaaaacaatctcctcggtagcctccggatggcctggaaaagctttacacgggccccctacccagcactgcaagcatccgaaacaccagaagagactgaggccgaacccgagtctaccagcgagaagccgtctgatgtaaatacagaagagacaagcgtggctgtgaaagaggaggttcttcccatcaacgttggtatgcttaacggcggacaacgaatcgattacgtacttcaggagaagccgatagaaagctttaacgaatatctattcgcgctccagagccacctctgttactgggagtcggaagacactgtacttctggttctaaaggagatctaccagacacaaggtatctttcttgaccagccccttcagtag

SEQ ID NO: 284664 - DNA, 993 bp, Artificial Sequence
  derived and/or modified sequence
atggatcagggagatactccaaccctggaggaggacctaaaaaagctacaattatctgagttttttgatatttttgagaaggaaaaagttgataaagaagctttggctctctgtacagatagagacctccaggaaattggaatccccctcgggcctcggaaaaagatcctgaactatttttctacaagaaaaaattccatgggcatcaaaagaccagctccccagcctgcttcgggagctaatattccgaaagagtccgagttctgctcctctagtaacacacggaacggagattaccttgacgtgggaatcggccaggtcagtgtgaaatatcctcgcctcatctacaagccggagatctttttcgccttcgggtcccctattgggatgttcctgactgtgcgtggactcaaacgcatcgaccccaactacaggtttcctacgtgcaagggcttcttcaacatttaccatcccttcgaccctgtggcatataggatcgagcctatggtggtgcctggtgttgaattcgagccaatgctgatacctcatcacaagggccgtaaacggatgcacctagagcttcgagaaggactcactagaatgtccatggatttgaagaacaatctccttggctccttaagaatggcctggaagtcttttaccagggctccatatcccgctctccaagcttcggaaaccccggaggagacggaggcggagcctgaaagcacaagcgagaaacctagcgatgtgaatacagaagagaccagcgtggcggtgaaggaggaggttctgcctataaatgtagggatgctgaatgggggacagagaatcgattacgtactgcaggagaaaccaatcgagagttttaacgagtacctgtttgcattgcagagtcacctgtgctactgggagtctgaggacacagtgctcttggtgttgaaagagatttaccagacccagggcatttttctggatcagccgctacaatag

SEQ ID NO: 284665 - DNA, 4113 bp, Artificial Sequence
  derived and/or modified sequence
gcactctagcctgggtgacagagtgagactccgtctcaaaaatatgcactgctgatctgttaatagagttatggaatcattgagctaaatgaagtttgcatatgaacaaatgaatgaattggctacaaattgatatgatttatagaaactctgttcgaaagtattggggacttgatgtttaaacattattttagtaaaaattcctataaccatgtatcatctgtaggattgatttggtacctatttctcctgttggaccatgagttcctccagagcagagcttttgtcttagactattttatttctatttctatttcttttttttctttctttttttttttttttttgagacagtctcttgctctgtcacccaggctggaatgcagtggcatgatctcggctcactgcaacctctgcctgcagggttcaaatgattctcctgcttcagcctccccagtagctgggacaggcgcatgccaccgtacccggctaatttttgtatctttagtagagacagggtgttggtcagactggtcttgaactcctgaccttgtgatccgcccacctcggcctcccaaagtgctgggattacagatgtgagccaccatgcccagcctagactgttttatttcttaagcactgttttcctaatttcttaagcactgagctcccttaaaattcagcaaatgtttgttaatgatgatgaatattttactaatttctttaaaaacatattttcaattgaagttgcaaaaccttggaacctcttaatttatatcttgcataaatgacaatttgttaaagttaagatacattgctgtggaaatctatgtatttctttactgcaaaatagtattaaaggaaactaaatgaatttcaagaatatgagctttataatttaatttttaggattcgctaaatattgtaatggatcaaggagatacacctacactagaggaagatttgaagaaacttcagctctctgaattctttgatatctttgagaaggagaaagtagataaggaagctctggctttatgtacagaccgagatcttcaggaaataggaattcctttaggaccaagaaagaagatattaaactatttcagcaccagaaaaaactcaatgggtattaagagaccagccccgcagcctgcttcaggggcaaacatccccaaagaatctgagttctgcagtagcagtaatactagaaatggtgactatctggatgttggcattgggcaggtgtctgtgaaatacccccggctcatctataaaccagagatattctttgcctttggatctcccattggaatgttccttactgtccgaggactaaaaagaattgatcccaactacagatttccaacgtgcaaaggtttcttcaatatttatcacccttttgatcctgtggcctataggattgaaccaatggtggtcccaggagtggaatttgagccaatgctgatcccacatcataaaggcaggaagcggatgcacttagaactgagagagggcttgaccaggatgagtatggaccttaagaacaacttgctaggttcgctgcggatggcctggaagtcttttaccagagctccataccctgccttacaagcttcagaaacaccagaagaaactgaagcagaacctgaatcaacttcagagaagcctagtgatgttaacacagaagagacctctgtggcagttaaagaagaagtcctgcctatcaatgtggggatgctgaatggaggccaacgcattgactatgtgctacaggagaagcctattgaaagttttaatgagtatttatttgctttacaaagccatctatgctactgggagtctgaagatacagtattgctcgtcctcaaagagatctaccaaacccagggtatcttccttgatcagcctttacagtaaaaatgacccatctatggctgcttaatacggacattgagggatccttccccagaaaatccacctgtttgttgctgcaattttcctctcctcagctgcgtcatttcctgcatgttgcctgccacttactcaccactggggtctttggaagataatcttcctctttggaaatgaatggaaaagcaaaaggccctattacttttaaccactggcttcatataaacacttgccatttttttctgcatagctgggggtggtttgtgtctttaattctttgatgatagtttatagttgccacactttattgattagtacttgacagggtgtaaagcctattttgggtttgatttgttttgggtggggtagacatgtttttaaggaacttattgcttatctttagaaaatgttctagtttggaaacagattcttgagattcagaaggcattttggagtacacttatctcttgtttgtgttgaactgaaggctaagtctcagtggacatggaaaagacttttgggtgatttatttttgaacctgcatttctttcttatgtgtagtgtatgaagaaagactagaatgtagctttaaaaaagtgttgtttactctcttagaactgacagacttattgccagaaatcactgatgttcattgtttttgcaactgtttgagctgctgtaagagtctaaagttgacaagttagttcatgttaggtgcatctttataaagcaaagatgttgtatatcctaggcctcccttttatatttgatagaagttatttgctaatagcttctattcttacgttgaaaatagttgtaaaagctgatgaacctgaaattgtgtagcctctacaggctgctgaggttctaaataaaaccttttagtggtgcctttatggtgaaacagaatttgtcacctgccatttctacttgagctaaggtagtattgtgtatcctctttccttcttaggtatccataatccacaaagcatatttaaaaggctcttggcacgggcagcattggttgagcaggtaggtttggctagggggaaatgtttaacttgttctgaaagaaaaacttatgtctgtagggtccaagaaacagctattccagagtcagtgtcagctgagtctggaacatatgaagtgaggtttacttctaagaacacaagtgactgcacactaattttgtcaaggcatcttttcactactttgctgtagatttttcttcttcattggtcagtttgtcattgtctttgtagttctctttatgataatcctttatacttgctctcagattccacaggcctctgtttatagagtggcaaaggcaggcgagctgtggtttattgtttataaatttttttataaatgttatggtattcaaagccactgacatttaatatttactgaagccattccttagacagcagtggtctttatccctttctggaaagaaaaggaaaatgaagggtaattactgtcaccatggagattgtagaggtaaggttggggtataggtcaggcctggcctttctttgtcatctgcttatagtctagtgctaagtatgccactaagtttcagatatatggaatactttatttttttaaaggtatataaactctgagttattgagaattaagtattcactgtatattaaggggaagcttttgccaagttgtggtcttcaaatttatgtttactcttcctattggcagaataggtgctatttaagagtaaaccaaaggataagcagagggagtccctataaccaaagatggacagcatagccctggatagccagataaaccactctttgtattaagaaatgtttctttcctagtggtgaggggtgggtaactgtgaaagagctttatatcttgtctattcatggtattatagctgtatattcccaggatgataagcttgattgaaatcctgtatttagtcatatattatttgcgctgcttcatttgtatcatgtgcaatctctagaccaaccctatttttaaactctggtacagcatcattttgtacatattcccagctgcagaactagtatcacttatctcagcaaaagagattgtttgcatggaaagattaatagcactgattagatttctaatattttgcatttttgaaatgtttgttttctacgtgattatatttaaaactttagtaaatactaacatgaaacc

SEQ ID NO: 284666 - protein, 492 aa, Artificial Sequence
  derived and/or modified sequence
MKLLLLHPAFQSCLLLTLLGLWRTTPEAHASSLGAPAISAASFLQDLIHRYGEGDSLTLQQLKALLNHLDVGVGRGNVTQHVQGHRNLSTCFSSGDLFTAHNFSEQSRIGSSELQEFCPTILQQLDSRACTSENQENEENEQTEEGRPSAVEVWGYGLLCVTVISLCSLLGASVVPFMKKTFYKRLLLYFIALAIGTLYSNALFQLIPEAFGFNPLEDYYVSKSAVVFGGFYLFFFTEKILKILLKQKNEHHHGHSHYASESLPSKKDQEEGVMEKLQNGDLDHMIPQHCSSELDGKAPMVDEKVIVGSLSVQDLQASQSACYWLKGVRYSDIGTLAWMITLSDGLHNFIDGLAIGASFTVSVFQGISTSVAILCEEFPHELGDFVILLNAGMSIQQALFFNFLSACCCYLGLAFGILAGSHFSANWIFALAGGMFLYISLADMFPEMNEVCQEDERKGSILIPFIIQNLGLLTGFTIMVVLTMYSGQIQIG

SEQ ID NO: 284667 - DNA, 2137 bp, Artificial Sequence
  derived and/or modified sequence
cacacgcccggacggctgggtggaggctgcacctggccgtggtgccgcgctggcgaggggagaggtcaaggcgcggcctgtccgcctggagggtgcgggatgctagagccgcagaagggtgcccagagcgtgggtcgccgcgccgaaggctgagccaggctcccggattccccgcgcggacacggacgcagaacgcagacagtttattcagtcaccatgaagctgctgctgctgcacccggccttccagagctgcctcctgctgaccctgcttggcttatggagaaccacccctgaggctcacgcttcatccctgggtgcaccagctatcagcgctgcctccttcctgcaggatctaatacatcggtatggcgagggtgacagcctcactctgcagcagctgaaggccctactcaaccacctggatgtgggagtgggccggggtaatgtcacccagcacgtgcaaggacacaggaacctctccacgtgctttagttctggagacctcttcactgcccacaatttcagcgagcagtcgcggattgggagcagcgagctccaggagttctgccccaccatcctccagcagctggattcccgggcctgcacctcggagaaccaggaaaacgaggagaatgagcagacggaggaggggcggccaagcgctgttgaagtgtggggatacggtctcctctgtgtgaccgtcatctccctctgctccctcctgggggccagcgtggtgcccttcatgaagaagaccttttacaagaggctgctgctctacttcatagctctggcgattggaaccctctactccaacgccctcttccagctcatcccggaggcatttggtttcaaccctctggaagattattatgtctccaagtctgcagtggtgtttgggggcttttatcttttctttttcacagagaagatcttgaagattcttcttaagcagaaaaatgagcatcatcatggacacagccattatgcctctgagtcgcttccctccaagaaggaccaggaggagggggtgatggagaagctgcagaacggggacctggaccacatgattcctcagcactgcagcagtgagctggacggcaaggcgcccatggtggacgagaaggtcattgtgggctcgctctctgtgcaggacctgcaggcttcccagagtgcttgctactggctgaaaggtgtccgctactctgatatcggcactctggcctggatgatcactctgagcgacggcctccataatttcatcgatggcctggccatcggtgcttccttcactgtgtcagttttccaaggcatcagcacctcggtggccatcctctgtgaggagttcccacatgagctaggagactttgtcatcctgctcaacgctgggatgagcatccaacaagctctcttcttcaacttcctttctgcctgctgctgctacctgggtctggcctttggcatcctggccggcagccacttctctgccaactggatttttgcgctagctggaggaatgttcttgtatatttctctggctgatatgttccctgagatgaatgaggtctgtcaagaggatgaaaggaagggcagcatcttgattccatttatcatccagaacctgggcctcctgactggattcaccatcatggtggtcctcaccatgtattcaggacagatccagattgggtagggctctgccaagagcctgtgggactggaagtcgggccctgggctgcccgatcgccagcccgaggacttaccatccacaatgcaccacggaagaggccgttctatgaaaaactgacacagactgtattcctgcattcaaatgtcagccgtttgtaaaatgctgtatcctaggaataagctgccctggtaaccagtctctagctagtgcctcttgccctctcctcacctccttttctctcagtgactctggaacctgaatgcagcttacaagacaagcctgacttttttctctgattaccttggcctcctcttggaaccagtgctgaaaggttttgaatcctttacccaacaatgcaaaaatagagccaatggttataacttggctagaaatatcaagagttgaatccatagtgtggggcccatgactctagctgggcaccttg

SEQ ID NO: 284668 - DNA, 4641 bp, Artificial Sequence
  derived and/or modified sequence
cgcgtgtctacgcggacgcaccggctaagctgcttctgccgccgccggccgcctgggaccttgcggtgaggctgcgcggggccgaggccgcctccgagcgccaggtttattcagtcaccatgaagctgctgctgctgcacccggccttccagagctgcctcctgctgaccctgcttggcttatggagaaccacccctgaggctcacgcttcatccctgggtgcaccagctatcagcgctgcctccttcctgcaggatctaatacatcggtatggcgagggtgacagcctcactctgcagcagctgaaggccctactcaaccacctggatgtgggagtgggccggggtaatgtcacccagcacgtgcaaggacacaggaacctctccacgtgctttagttctggagacctcttcactgcccacaatttcagcgagcagtcgcggattgggagcagcgagctccaggagttctgccccaccatcctccagcagctggattcccgggcctgcacctcggagaaccaggaaaacgaggagaatgagcagacggaggaggggcggccaagcgctgttgaagtgtggggatacggtctcctctgtgtgaccgtcatctccctctgctccctcctgggggccagcgtggtgcccttcatgaagaagaccttttacaagaggctgctgctctacttcatagctctggcgattggaaccctctactccaacgccctcttccagctcatcccggaggcatttggtttcaaccctctggaagattattatgtctccaagtctgcagtggtgtttgggggcttttatcttttctttttcacagagaagatcttgaagattcttcttaagcagaaaaatgagcatcatcatggacacagccattatgcctctgagtcgcttccctccaagaaggaccaggaggagggggtgatggagaagctgcagaacggggacctggaccacatgattcctcagcactgcagcagtgagctggacggcaaggcgcccatggtggacgagaaggtcattgtgggctcgctctctgtgcaggacctgcaggcttcccagagtgcttgctactggctgaaaggtgtccgctactctgatatcggcactctggcctggatgatcactctgagcgacggcctccataatttcatcgatggcctggccatcggtgcttccttcactgtgtcagttttccaaggcatcagcacctcggtggccatcctctgtgaggagttcccacatgagctaggagactttgtcatcctgctcaacgctgggatgagcatccaacaagctctcttcttcaacttcctttctgcctgctgctgctacctgggtctggcctttggcatcctggccggcagccacttctctgccaactggatttttgcgctagctggaggaatgttcttgtatatttctctggctgatatgttccctgagatgaatgaggtctgtcaagaggatgaaaggaagggcagcatcttgattccatttatcatccagaacctgggcctcctgactggattcaccatcatggtggtcctcaccatgtattcaggacagatccagattgggtagggctctgccaagagcctgtgggactggaagtcgggccctgggctgcccgatcgccagcccgaggacttaccatccacaatgcaccacggaagaggccgttctatgaaaaactgacacagactgtattcctgcattcaaatgtcagccgtttgtaaaatgctgtatcctaggaataagctgccctggtaaccagtctctagctagtgcctcttgccctctcctcacctccttttctctcagtgactctggaacctgaatgcagcttacaagacaagcctgacttttttctctgattaccttggcctcctcttggaaccagtgctgaaaggttttgaatcctttacccaacaatgcaaaaatagagccaatggttataacttggctagaaatatcaagagttgaatccatagtgtggggcccatgactctagctgggcaccttggacctccagctggccaatagaagagacaggagacaggaagccttcccattttttcaaagtctgtttaattgcctattacttctctcaaagagaacctgaagtcagaacacatgagcagggtgagaggtgaggcaaggttcatcctgaatgggagaggaagtcgaaccactgctgtgtgtcttgtcaggatgctcacttgttcctactgagatgctggatattgattttgtaacagcacctggtgtttcacggctgtccgagtgagctaacgtggcggtgtggctgcctggacctcctctttcaggttaacgctgacagaatggaggctcaggctgtctgcaagaaaacagttggtttggctgtgattttgacctcctcttccccactgccatcttctaagagactttgtagctgcctcctagaagcacattctgagcacatttgagacctctgtgttagaggggagactgcacaaactatcctcccccaggttgagacgtctgcagagtggcaagctgacttgtagaaatggggtgccatttatgctctacttagacaagggtaatcagaaatggaatcagtgcaggcaaaatttaggatttgccgcttccataaatcaaagcatgactaatagggggtctctgaaatgtaagggcacaaacttcacttagggcatcgcagatgtttgcagaatggttggcctaatgattatgctacagatgggttttaaatgacccgtctaggttactgcttccttgcaaaaaaagtcgaatcctgcattgaattgaatatgaatttctctaactctctccagaaaatggatggagataacttgtctttaaaactgtaggccagccttagccactgtggagcccttgcctccgagctctggcttcaaggggagctcttctccaggttcactaggtgaattgatttattattatcatattgataatgtgagattctttagccactttggggagcctgtctctccagaagcctttcttagtggtgcccacagttggagcccaggggccatgtttgcaaactgattcatgtgcatggctgacaggagtactggttcactaccaatgcctgagcttttctcttacatagaaaaactgtccgctctcagtaatcacaagcagcatccgttttgttttctcttcttgggagacatctgtcaaaccaggaatattcttgaaaagaacgtgagcaggaaaaactgctggtgatactttttttaagttttgtttttatcttgcctgttggcttcaatacatttgagaatacgctgaagagggaaaatttcagtgatggagattctagattaaatatcaggactgatttcctggtgggattatggtccagttttaccaaagaaccaattccttgaatgttggaatctaactttttatattgtcattattattgttgtttttaaacggttctttgtcttttctgttttatttttctcaagctgctttcaggagctagcagaaaataactcaaagttgaagactctggaagattttgctttaacctaactcgcattgatgtattaaatttataattttagcattcccaatagatcctatcattccttaaacataataccctttgtcttggagtagaatactaagttagagttagtggatttctagtttaggagaggagctcaaaactataatctttaacaaattgaaaaatgaaatagggtgttttccctttttgtgcacacctatattaccttaagaaatttccttccatagacagctgcctcaaagggaaatcctctttaaaccgtagttggcgcagaggtcagtcctagtcggagcttaggaggggcggagacgctcacatcgtctgacttgagtcgccactgattgtggcaacagctttgcctcatgagtcaaaaattggcaatttcttttgatttttagttgttgaatttgctgtttcaagcatttgtacatattagaagtctaaggagtagcaagtcagtgggaggactttttcacccctggcattagcagcttcgacctcattttccagatgcaccagctcctattaataagttagcaaggaaagtgtatgtcacgtgcaggaacagtgaggcagggacaggggttctgctccttctcacttcaccaccggcacacagcttgcccctgtctttgcccccaaaggtattttgtgtctagtgtcaaattggagctattcttcactggtccttaaccttgggttttaaaaagaaggcttctctgtttgggtagcgtaagagctgagtatagtaagtcctcttccaaagagatggcaatatgctgggcatctactttaaaacaaagttgtctgatttttgcaagagaggttaggattttattgttcttatttccctttacagttctgcagttccatcacagtatttttttaaataactcaggtgtatgagaagaaattagaaaagaaaattaacttatgtggactgtaaatgttttatttgtaagattctataaataaagctatattctgtaattgttgagaatcccacgggtgatcatttgcaataaatgtggatgtaatgaaggctgttgaacacaa

SEQ ID NO: 284669 - DNA, 6270 bp, Artificial Sequence
  derived and/or modified sequence
gcggcggcagcaggagcccggcgcgatccgctaggtcccagcccagcgcccagcgagcaggcgacgcggaggggccgggcctccagtgtcccgagggccgggcgctgagactccggccgcgcagctgggagctgcccgcgctgcgctgacagccgcgccgacgtcctccccgccggggcgctcgcaggacatgcccccggggcgcggcggcggggaccccggggctcgcctccgcccagggcccccctccacgccctcgggagccccgggcccccgctgagcactcctcccgcacgcctgggtccctccggccggcgcgcagcccggccccagcgctgtgggtccccgcggggcgatgggttgatgggcgccgggggacgcaggatgcggggggcgcccgcgcgcctgctgctgccgctgctgccgtggctcctgctgctcctggcgcccgaggctcggggcgcgcccggctgcccgctatccatccgcagctgcaagtgctcgggggagcggcccaaggggctgagcggcggcgtccctggcccggctcggcggagggtggtgtgcagcggcggggacctcccggagcctcccgagcccggccttctgcctaacggcaccgttaccctgctcttgagcaataacaagatcacggggctccgcaatggctccttcctgggactgtcactgctggagaagctggacctgaggaacaacatcatcagcacagtgcagccgggcgccttcctgggcctgggggagctgaagcgtttagatctctccaacaaccggattggctgtctcacctccgagaccttccagggcctccccaggcttctccgactaaacatatctggaaacatcttctccagtctgcaacctggggtctttgatgagctgccagcccttaaggttgtggacttgggcaccgagttcctgacctgtgactgccacctgcgctggctgctgccctgggcccagaatcgctccctgcagctgtcggaacacacgctctgtgcttaccccagtgccctgcatgctcaggccctgggcagcctccaggaggcccagctctgctgcgagggggccctggagctgcacacacaccacctcatcccgtccctacgccaagtggtgttccagggggatcggctgcccttccagtgctctgccagctacctgggcaacgacacccgcatccgctggtaccacaaccgagcccctgtggagggtgatgagcaggcgggcatcctcctggccgagagcctcatccacgactgcaccttcatcaccagtgagctgacgctgtctcacatcggcgtgtgggcctcaggcgagtgggagtgcaccgtgtccatggcccaaggcaacgccagcaagaaggtggagatcgtggtgctggagacctctgcctcctactgccccgccgagcgtgttgccaacaaccgcggggacttcaggtggccccgaactctggctggcatcacagcctaccagtcctgcctgcagtatcccttcacctcagtgcccctgggcgggggtgccccgggcacccgagcctcccgccggtgtgaccgtgccggccgctgggagccaggggactactcccactgtctctacaccaacgacatcaccagggtgctgtacaccttcgtgctgatgcccatcaatgcctccaatgcgctgaccctggctcaccagctgcgcgtgtacacagccgaggccgctagcttttcagacatgatggatgtagtctatgtggctcagatgatccagaaatttttgggttatgtcgaccagatcaaagagctggtagaggtgatggtggacatggccagcaacctgatgctggtggacgagcacctgctgtggctggcccagcgcgaggacaaggcctgcagccgcatcgtgggtgccctggagcgcattgggggggccgccctcagcccccatgcccagcacatctcagtggagctgagcgcctttcccagggaggtggggggcgccggggcagggctgcaccccgtggtatacccctgcacggccttgctgctgctctgcctcttcgccaccatcatcacctacatcctcaaccacagctccatccgtgtgtcccggaaaggctggcacatgctgctgaacttgtgcttccacatagccatgacctctgctgtctttgcggggggcatcacactcaccaactaccagatggtctgccaggcggtgggcatcaccctgcactactcctccctatccacgctgctctggatgggcgtgaaggcgcgagtgctccataaggagctcacctggagggcaccccctccgcaagaaggggaccccgctctgcctactcccagtcctatgctccggttctatttgatcgctggagggattccactcattatctgtggcatcacagctgcagtcaacatccacaactaccgggaccacagcccctactgctggctggtgtggcgtccaagccttggcgccttctacatccctgtggctttgattctgctcatcacctggatctatttcctgtgcgccgggctacgcttacggggtcctctggcacagaaccccaaggcgggcaacagcagggcctccctggaggcaggggaggagctgaggggttccaccaggctcaggggcagcggccccctcctgagtgactcaggttcccttcttgctactgggagcgcgcgagtggggacgcccgggcccccggaggatggtgacagcctctattctccgggagtccagctaggggcgctggtgaccacgcacttcctgtacttggccatgtgggcctgcggggctctggcagtgtcccagcgctggctgccccgggtggtgtgcagctgcttgtacggggtggcagcctccgccctgggcctcttcgtcttcactcaccactgtgccaggcggagggacgtgagagcctcgtggcgcgcctgctgcccccctgcctctcccgcggccccccatgccccgccccgggccctgcccgccgccgcagaggacggttccccggtgttcggggagggccccccctccctcaagtcctccccaagcggcagcagcggccatccgctggctctgggcccctgcaagctcaccaacctgcagctggcccagagtcaggtgtgcgaggcgggggcggcggccggcggggaaggagagccggagccggcgggcacccggggaaacctcgcccaccgccaccccaacaacgtgcaccacgggcgtcgggcgcacaagagccgggccaagggacaccgcgcgggggaggcctgcggcaagaaccggctcaaggccctgcgcgggggcgcggcgggggcgctggagctgctgtccagcgagagcggcagtctgcacaacagccccaccgacagctacctgggcagcagccgcaacagcccgggcgccggcctgcagctggaaggcgagcccatgctcacgccgtccgagggcagcgacaccagcgccgcgccgctttctgaggcgggccgggcaggccagcgccgcagcgccagccgcgacagtctcaagggcggcggcgcgctggagaaggagagccatcgccgctcgtacccgctcaacgccgccagcctaaacggcgcccccaaggggggcaagtacgacgacgtcaccctgatgggcgcggaggtagccagcggcggctgcatgaagaccggactctggaagagcgaaactaccgtctaaggtggggcgggcgacgcggtagacgggctggccacgcggctcgttcccccgctcctcggggccctccaaggtgtctccgtagtcagcaggttggaggcagaggagccgatggctggaggaagcccacaggcggatgttccccacttgcctagagggcatccctctggggtagcgacagacaatcccagaaacacgcataatacatttccgtccagcccggggcagtctgactgtcggtgccctcccaggaacggggaaggcctccgtctgtgtgaaagggcacagcacatcccaggtgcaccctccccaagtactcccaccccgcctactgtccatgcggcctcactgggggccatcagcctcaccagcaaagcagagatgagagcgtgggaactgtgttctttcctccctgccctctactgatttcagcccagcccctgcctagatcctaggtcccttttcctcccgagtttggctggcacgagagctagcccagcacatgaagcaggtgatgttaagtcacaaggtgctgcttttcagatccactatgcaagaggggagggtggggccacgtgaaaggcagctctagacatcaaccagtcctgggggaggggagtgggaaccgggcacaactaggaacaatgccaccattcccacaggagtggtacttaaaccagacagcagggttcagaggtggcacaccgggacaaagctgaggccctgcacctcaacagctgactgccaggtgcctgtgggtgaactgaggggagtagagggagagggcaggtggaactggggcagaatctagtcatgccctaaagctagtcctgtaaacaatggtgccccagaaagctgcaggtggtgtttggagaagcagttacttttcagttacaagacccatctccctagtctcagccttacaacaccacgggactaaggaagagcacttccttgcctccgtaaggccagaggaagaaccatcccaatcatttgatctccagctccacagtagagagaaacctacaaaatgtcaaaccagcttcccgactcccaggagctcaagccaagcccagaggcagtggctggggtccctgcaggtcatgaggggcctatgcctttactccttttaaacaccagcacccgtcttttccccaacctaaaaccaaccaccagcatttcactacaggaccaaatggaaaccgagggaaccctgggtcttgggaagaacaacaggaaaccaaggtctgacctagggttccctcccagtcttcacatcactctggcctcatcaccaaggtgacagaggacacaggggagggggaaaacccacacacactccttggaatgggtcctgttatttatgcttgctgcacagacatattagaagaaaaaaaaaagctttgtattattcttccacatatgctggctgctgtttacacaccctgccaatgccttagcactggagagctttttgcaatatgctggggaaaggggagggagggaatgaaagtgccaaagaaaacatgtttttaagaactcgggttttatacaatagaatgttttctagcagatgcctcttgttttaatatattaaaattttgcaaagccctttgagctactgccttagtctacccactgtccttttgttatgaggtagaggatctcatgacaccatacacacaaacccatcattgcctgtgaatgcacgtagggccagaattccccagttcccgctcctctgagggttgatactgctgggaatgccaaccactccacaagcagagggaagccccctcaggcctgcaggaggagccgcagcagtgtgtccaattcaaaccagcagcaaagagcctgacattttcccatccatctatgaggaaagccatctcacagaacatggacataggcaacttgctctcccacaccaagggatgggaatctctcctacctatagtcatccctgcactcctgactttactccaggacccagggtccaactaatggcagagcccctcttggttccttcaaacaagaaaagcaatacctacggactggtgtacacttccatccttggttataacaggaatgttatcaagctgtcagaacaggatgaagtgctcccagtggatatccatcagggagggttagggacactcgtggcagcctgtctagcagcctgggctctctgaaagtccctaacttcctgaggggtacgcaaatactgttctatttcactatcagaaatgttctcatctccagtgacagtggagacagggggtacagggcagatccgcttcggggacttcaacatgcagggtggcaagagaagggcaggactggccggccgcttcccctggggtaaacctaaggaattatttcccacctccccttctccttgcccctgtccccaccccggtggctccttctctcgggtctccacttctgctgtcccatcccgaaaggcagagcggaccagtgactggcggtgctggagaaggtcaccgatgtgcttcaccacagaccgtttgtcaagtctcagaa

SEQ ID NO: 284670 - DNA, 3366 bp, Artificial Sequence
  derived and/or modified sequence
atgggggccggcgggcggcgaatgcgtggtgccccagctcgcctgcttttgcccttactgccatggctcttactcctgcttgcgcccgaggcccgtggagcccccgggtgcccactgagtattaggtcatgcaagtgcagcggggagcgtcctaagggccttagcggcggagtgcctggaccagctaggaggagagtggtgtgctcaggtggtgacctacctgaacctcctgagccggggctgctgccaaacgggacagtgaccctgctcctgtctaataataaaattacaggcctgagaaacggaagttttctcgggctgtctctacttgagaagctcgacttgcggaacaacattatctcgacagtgcagccaggcgcctttctcgggctgggcgagctaaaaaggctcgacctctccaacaacagaatcggttgtcttactagcgaaacattccagggtttgccacggttactgagactgaatatctcaggaaacattttcagttccctacagccaggcgtgttcgacgagctcccagctttgaaagtagtggatctcggcactgagttcttgacatgtgattgccaccttcggtggctgcttccatgggcccaaaacagaagtttacaactgagtgagcacacactgtgtgcttacccaagtgcactgcatgcacaagctttgggtagtttacaggaggctcaactctgctgcgaaggtgcacttgagctgcacacccaccacctaatcccctctttgcgacaagtggtcttccagggcgaccgcctgcctttccagtgcagtgcctcttatttggggaacgatacgagaattcgttggtaccacaacagggcacctgtggagggcgacgaacaggcaggcatcctgcttgcagaaagtttgatacacgactgcaccttcattacaagtgagcttaccctgtcgcacataggggtctgggctagcggcgagtgggaatgtactgtatccatggcccaaggtaacgccagcaagaaggttgaaattgtggtcctggagacgagcgcctcctattgtccagcagaaagagtagctaacaatagaggcgattttcgctggcctcgcacgctggccgggataacagcttaccaaagctgcctgcagtacccatttacaagtgtcccactaggcggaggcgcgcctgggacgagggcttctcgacgctgcgatcgcgccggtagatgggagcccggggattacagccactgtctttatactaacgatataacccgggtgctgtacactttcgtgttgatgcccatcaatgcttccaatgctctgacactggcccaccaattgagagtatacaccgccgaagctgcgagtttttctgacatgatggatgttgtgtacgtggctcaaatgatccaaaagttcctgggctacgtcgatcagatcaaggaactggtggaggtgatggtggatatggcaagcaatttgatgctcgtggatgaacacttgctgtggctggcccagcgagaggacaaggcttgctctaggatagtcggtgctctagaaagaatcggcggcgcggctttgtccccccatgcacagcacataagtgtggaactgtcagcctttccccgtgaagtggggggagcaggtgctggcctgcatcctgttgtttatccatgcactgcacttctgctcttatgtcttttcgcaacaattattacatacatcttaaaccactcatccatacgcgtgtcacggaagggctggcatatgctgctgaacctttgctttcacatagctatgacatcagccgtctttgcgggaggcattaccttgaccaactaccagatggtctgtcaagccgtgggtatcactctccactattcttccctgagtacccttctgtggatgggggtgaaggccagagtgctccacaaggagcttacctggagagcccccccaccccaagagggggacccagccctgccaactccctccccaatgctgagattctacctgatagctggagggattcccctaattatttgcgggatcactgctgccgtgaacatccataactatagggatcatagtccctactgctggttagtttggcgccctagccttggggctttctacattcctgtggcgctcatcctgctcattacatggatttatttcctgtgtgccggactcaggctgcgcggccccctggctcagaatccgaaggccggcaattctcgcgcaagtctcgaggcaggggaggagctgagggggtctacccgattgcgaggctcagggcctttgttgtccgacagcggaagcctgctcgctacaggatcggcccgagtgggaactccaggcccacctgaggacggcgattccctttactctccaggagtgcagctaggtgcccttgtcacaacccattttctgtacttggcgatgtgggcctgtggcgccctggcggtgagtcagagatggctgccccgcgtcgtgtgcagctgtctttacggagtggccgcatcagccctcggtttgttcgtgttcactcatcactgtgcccgccgcagagacgttcgggctagctggcgggcatgttgccccccagcctctccagcagcaccgcacgctccacctagagctttaccagctgctgcagaggatggctccccagtgttcggtgagggccctcctagccttaagagcagcccaagcggatcaagcggtcatccgctggctcttgggccctgcaaactcaccaatctgcagctcgcgcagtcccaggtatgcgaggctggggctgccgccggaggggagggcgagcctgaacctgccggaacacgtggaaatctggcacacagacatcctaacaatgtgcatcacggccgccgggctcataaatcacgcgccaagggccaccgtgccggggaggcctgtgggaaaaaccgtctgaaggcgcttcgagggggagctgccggagccctggagttactaagcagtgagtcaggctctcttcacaatagccctaccgattcttatctaggcagctctcggaactctcctggcgccggactacagctggagggcgagcccatgctgaccccctcagaaggttctgatacctctgctgcccccctgagtgaggcaggccgggctggtcagcggcgtagcgcctcaagagatagcctcaagggggggggggcgttagagaaggagtcccatcgccgaagttatccccttaatgcagcatctctcaatggcgccccaaagggggggaaatacgacgatgtgaccctcatgggcgcggaagtggcgtccggagggtgtatgaaaaccggactttggaaatccgagaccaccgtgtag

SEQ ID NO: 284671 - DNA, 3366 bp, Artificial Sequence
  derived and/or modified sequence
atgggcgccggcggccgcaggatgagaggagccccagcccggctgctgctgcccctgctgccctggctgctgctgctgctggcccctgaggcccggggggcccctggctgccccctgagcatccgcagctgcaagtgcagcggggagcggcccaagggcctgtctggaggagtgcccggccctgcccggcggcgggtggtgtgcagcggcggggacctgcctgagcccccagagcccggcctgctgcccaacggcaccgtgaccctgctgctgagcaacaacaagatcaccggcctgagaaatggcagcttcctgggcctgagcctgctggagaagctggacctgaggaacaacatcatcagcacagtgcagcccggggccttcctgggcctgggggagctgaagaggctggacctgagcaacaaccgcatcggctgcctgaccagcgagaccttccagggcctgccccggctgctgcggctgaacatcagcggcaacatcttcagcagcctgcagcccggggtgtttgatgagctgcctgccctgaaggtggtggacctgggcacagagttcctgacctgtgactgccacctgcgctggctgctgccctgggcccagaacagaagcctgcagctgtctgagcacaccctgtgtgcctaccccagcgccctgcacgcccaggccctgggcagcctgcaggaggcccagctgtgctgtgagggcgccctggagctgcacacccaccacctgatccccagcctgcggcaggtggtgttccagggcgaccggctgcccttccagtgcagcgccagctacctgggcaatgacacccgcatccgctggtaccacaacagagcccctgtggagggagatgagcaggccggcatcctgctggccgagagcctcatccatgactgcaccttcatcaccagcgagctgaccctgagccacatcggcgtgtgggccagcggggagtgggagtgcaccgtgtccatggcccagggcaatgccagcaagaaggtggagatcgtggtgctggagaccagcgccagctactgcccagctgagcgggtggccaacaacagaggagacttccgctggcccaggaccctggccggcatcacagcctaccagagctgcctgcagtaccccttcacctctgtgcccctgggcggcggggcccctggcacccgggccagcagaagatgtgaccgggccggccgctgggagcccggggactacagccactgcctgtacaccaatgacatcaccagggtgctgtacacctttgtgctgatgcccatcaatgccagcaatgccctgaccctggcccaccagctgcgggtgtacacagctgaggccgccagcttcagtgacatgatggatgtggtgtatgtggcccagatgatccagaagttcctgggctacgtggaccagatcaaggagctggtggaggtgatggtggacatggccagcaacctgatgctggtggatgagcacctgctgtggctggcccagcgggaggacaaggcctgcagcagaattgtgggcgccctggagcgcatcggcggggccgccctgagcccccacgcccagcacatctctgtggagctgagcgccttcccccgggaggtgggcggggccggggccggcctgcaccctgtggtgtacccctgcacagccctgctgctgctgtgcctgtttgccaccatcatcacctacatcctgaaccacagcagcatccgggtgtccaggaagggctggcacatgctgctgaacctgtgcttccacatcgccatgaccagcgctgtgtttgctgggggcatcaccctgaccaactaccagatggtgtgccaggccgtgggcatcaccctgcactacagcagcctgagcaccctgctgtggatgggcgtgaaggcccgggtgctgcacaaggagctgacctggagggcccccccaccccaggagggggaccctgccctgcccacccccagccccatgctgcgcttctacctgattgctgggggcatccccctcatcatctgtggcatcacagctgctgtgaacatccacaactacagagaccacagcccctactgctggctggtgtggaggcccagcctgggcgccttctacatccctgtggccctgatcctgctgatcacctggatctacttcctgtgtgccggcctgcggctgcggggccccctggcccagaaccccaaggccggcaacagccgggccagcctggaggccggggaggagctgcggggcagcacccggctgcggggcagcggccccctgctgagtgacagcggcagcctgctggccaccggcagcgcccgggtgggcaccccaggccccccagaagatggagacagcctgtacagccctggggtgcagctgggcgccctggtgaccacccacttcctgtacctggccatgtgggcctgtggggccctggccgtgtcccagcgctggctgccccgggtggtgtgcagctgcctgtatggagtggccgccagcgccctgggcctgtttgtgttcacccaccactgtgcccggaggagagatgtgcgggcctcctggagggcctgctgccccccagccagccctgctgccccccacgccccaccccgggccctgcctgctgctgctgaagatggcagccctgtgtttggagagggcccccccagcctgaagagcagccccagcggcagcagcggccaccccctggccctgggcccctgcaagctgaccaacctgcagctggcccagagccaggtgtgtgaggccggggctgctgctggaggagagggggagcctgagcctgctggcacccggggcaacctggcccaccgccaccccaacaacgtgcaccacggcagaagagcccacaagagccgggccaagggccacagagctggggaggcctgtgggaagaaccggctgaaggccctgcggggcggggccgccggggccctggagctgctgagcagcgagagcggcagcctgcacaacagccccacagacagctacctgggcagcagcaggaacagccctggagctggcctgcagctggagggggagcccatgctgacccccagcgagggcagtgacaccagcgctgcccccctgtctgaggccggccgggccggccagaggagaagtgccagccgggacagcctgaagggcggcggggccctggagaaggagagccacagaagaagctaccccctgaatgctgccagcctgaatggagcccccaagggcggcaagtatgatgatgtgaccctgatgggcgctgaggtggccagcggcggctgcatgaagacaggcctgtggaagtctgagaccaccgtgtag

SEQ ID NO: 284672 - DNA, 3366 bp, Artificial Sequence
  derived and/or modified sequence
atgggcgccggcggccggcggatgcggggcgcccccgcccggctgctgctgcccctattgccttggctgctcctgttgctggcccctgaggcgaggggcgccccaggttgtcccctgtccatcagaagctgtaagtgctctggcgagcgccctaaaggcctgtccggaggtgtaccaggtccagcgaggaggagggtggtgtgctctggcggggacttaccggaacccccggagcccgggttactccccaacgggaccgtgacactgctcctctcaaataacaaaattacaggattgcgtaatggatcgtttctgggtctgtcactgctcgaaaaactggatctgcggaataatatcatctctactgtgcaaccaggtgcattcttaggactaggtgaacttaaaagactcgaccttagcaataataggatcggctgcctgacatccgaaacttttcaaggcctgccccggttgctgcgtctcaatatttctgggaacattttctcgtccctacagcctggggtgtttgatgaactgcccgccctgaaagttgtggatctggggaccgaattcctgacatgtgattgtcatctgagatggctgctaccgtgggctcagaaccgctccctccagctgtcggagcatacactgtgcgcttaccccagcgccttgcacgctcaggcgcttggctctctacaagaggcacagctatgttgcgaaggcgcactggagttacatacgcatcatttaatccctagtctccggcaggttgtcttccagggggaccgactgcccttccagtgtagtgcaagctaccttggtaacgatacacgtattcggtggtatcacaaccgcgctcccgtggagggtgacgaacaggctgggatcctgctggctgagtctttgatccacgactgtacattcatcacttcagagctgaccctatcacatatcggcgtttgggcgagtggcgagtgggagtgtaccgtatcgatggcacagggcaatgcatctaagaaagtcgaaatagtcgtcctggagacatccgcttcctattgcccagcagagcgagtcgcaaataatcgcggggactttcggtggcctaggacgttggcaggaataacagcctatcagtcatgcctccagtatccttttacatccgtacctctaggcgggggagcaccgggtactcgagcctcccggcggtgcgatagggccggccgctgggagccgggggattactcacactgcctttacacgaatgacatcacgcgggttctctacacgtttgtgctgatgcctatcaacgcttcgaatgcacttacactggctcatcagctgagagtgtataccgctgaagcggcctctttcagtgatatgatggacgtagtctacgttgcgcagatgatccagaaatttctcggctatgtcgatcagataaaggagctcgtcgaggtgatggttgacatggcgtcaaacctgatgctggtggatgaacatctgctttggcttgcccagcgcgaagacaaggcttgctccagaatcgtgggcgctctcgagcggatcggcggcgccgcgctttcccctcatgcccaacacatctccgtggagctgtccgcattcccaagggaagtgggcggcgctggagcaggtctgcatcctgtggtatatccttgtacagctctgctgcttctctgcctctttgcgacaatcataacctacatcctgaaccatagcagcattagggtgtcacgcaagggctggcatatgctgctgaatctgtgtttccacattgctatgaccagtgccgtcttcgccggtggaataaccttgaccaactaccagatggtgtgccaagcagtgggtatcaccctgcactatagcagtctgagcactctcctttggatgggggtgaaagcgagggtcttacacaaggaattgacctggcgagctcctcctccacaggaaggagacccagctctgccaacgccatctcccatgctgcgcttctacctcatcgcaggcggcatccctctgatcatctgcggtatcaccgccgctgtgaacatacataattacagagaccacagcccctactgctggctggtatggagaccatcactcggcgccttctacataccagtcgcactgatcctgctcatcacctggatttattttttgtgcgctgggcttagactgcgaggacccctggcccaaaatccgaaggctgggaacagcagggcgagcctggaagcgggtgaggagcttaggggtagcacaaggctgaggggcagcggcccactcctgtccgactcagggtccttattagccacaggtagcgcgagagtgggtacacctggcccgcctgaagatggagatagcctatatagcccaggggtccagctgggagcactggtcaccacccatttcttgtacctggctatgtgggcctgcggagccttagctgtgtcacagaggtggctgccaagggtggtgtgctcctgcctgtacggagtggcagcttctgcattgggactgttcgtgttcacccaccactgcgctcgcaggagggatgtcagggcctcttggcgcgcatgttgcccccctgcatcacctgctgcacctcacgctccgcccagggcactccccgctgcggctgaggacggttcgcccgtcttcggggagggtccccctagccttaaatccagcccttcgggatcctccggccaccccttagcattggggccttgtaaactaaccaacttgcagttggctcagtctcaggtgtgtgaggcaggggcagcggcagggggcgagggagagcccgagcctgccggaactcgaggcaacctagcccacagacacccgaacaacgtgcatcatggtcgaagagcgcacaagtcacgggctaaaggccatcgcgctggcgaggcatgcggaaaaaaccgactgaaagcattgcgcggaggcgctgccggagctctggaactgttgtcttccgagtctggatcactccacaatagtccaaccgatagctatctgggctctagcagaaactctccaggggcgggactccagcttgaaggcgaacctatgctgacacctagcgagggttcggatacatccgctgcacccctgagcgaagccggcagggcaggccaacgacgatctgcaagccgagactcactgaagggaggaggcgctttggaaaaagagtcacatcggcgctcatatccactgaatgccgcttctctgaacggagctcccaagggcggtaaatacgacgatgtgacactgatgggggccgaagttgcttcaggaggctgcatgaaaaccggtttgtggaagtcagaaaccaccgtgtag

SEQ ID NO: 284673 - DNA, 3366 bp, Artificial Sequence
  derived and/or modified sequence
atgggggcaggtggcaggaggatgcggggagcccctgctcgacttctgttgccgctcctcccatggctcctcctgcttttggccccagaagccagaggagccccaggctgtcccttgtcaatccgatcctgcaagtgctcaggagagcgccctaaaggtttgagtggcggagttcccggacccgcacggaggcgcgtggtgtgttcggggggagacctgccagagccacctgagcccggtctgttgccaaatggaacagtgaccctcctattgtctaataacaaaataaccggcctgaggaacggaagttttctcggcttgagtctgctggaaaagttggatcttcgaaacaacatcatctccacggttcagcctggagcctttcttggtctgggggagctcaagcgtctggatctgtccaataaccggattggatgccttactagcgaaacttttcagggcctcccaagattgttgagactaaacatctcaggcaatattttctcttcgctgcaacctggggtgttcgacgagctgcctgctctgaaggtggtcgatctgggcactgagttcctcacgtgcgactgtcatttaaggtggttgctgccgtgggcccagaatcggagcctacagttgtctgagcacactctgtgcgcctatccatcagcactgcatgctcaagccctgggctcccttcaagaagcacagctgtgctgcgagggcgctctcgagctccatacccatcacctgatcccgtcattgcgacaggttgtatttcagggggatagattgcccttccagtgctccgctagttatctgggcaacgacaccaggatccgatggtatcacaatcgcgctcctgtggagggcgacgagcaggccggtatacttcttgccgaatccttgattcacgattgcacttttatcacctctgagctcacgttgagtcacataggagtgtgggctagcggcgagtgggaatgtaccgtttccatggcacaagggaatgccagcaagaaggtcgaaatagtcgtattagagacctcggccagctattgccccgctgaaagggtggccaataatagaggagattttcggtggcctcgaacactagcaggaattactgcctaccagagttgcctgcagtatcccttcacatccgtgcccctggggggtggggctcccggtactagggcttcaagacggtgcgatagagcaggtcgctgggagccaggggattactcacactgtctttatacaaacgatattacaagggtcctctataccttcgtcctgatgccgattaatgcgtcaaatgcccttactctggcacaccagcttagggtttacaccgccgaagctgcatcgttttcagatatgatggacgtagtgtatgttgcccagatgatccaaaagttcctcggctatgtcgaccaaatcaaagagctcgtggaagttatggttgacatggcttccaatctgatgctggtagacgagcacctgctatggctggcgcagcgagaggataaagcctgttcacgaattgtaggggctcttgaaagaattggcggtgccgctctcagtcctcacgcccaacacatttctgtggagctctcagcctttccaagagaagtgggcggagccggtgccggtctgcacccagtggtgtacccgtgcaccgccttattgctgctgtgcctgtttgctaccatcatcacctacattctcaaccactcatccattcgagtgagccggaagggatggcatatgctcctgaatctttgctttcatatcgctatgaccagtgccgtgttcgccggaggcataactctcactaactaccagatggtttgccaagccgtcggcatcaccctacactattcatctttaagcacattgctttggatgggtgtgaaggcccgagtcctgcataaagaactgacctggcgcgctccccctccccaggaaggagaccccgcactgccaacaccatcccccatgctcagattttacctcatcgcaggtgggatccccctgatcatctgcggtattaccgccgctgtaaacatccataactaccgggaccatagcccttactgctggctcgtctggaggccaagcttgggcgctttttatatccctgtcgccctgatcctgctgatcacctggatctactttctttgcgcagggttgcgtctcaggggccctctggctcagaatccgaaggcgggaaattccagggcatcactggaagctggagaagagctacgagggtccaccagactccgcggatcaggacctctgctcagcgacagcggcagcctgctggccaccgggtccgcccgagtgggcacaccgggaccacccgaggacggcgatagtttgtacagccctggcgttcagctcggcgctctggtgactacccacttcctctatttagctatgtgggcctgcggtgcattggctgtgtcccaaagatggctgccacgggtcgtgtgcagttgcttatatggagttgctgcttctgcactggggctgtttgtattcacacaccactgcgccagacgacgcgacgtccgtgcctcctggagagcctgctgtccacccgcttccccggcagcgccacatgcacctcctcgtgcccttccagctgccgctgaggatgggtcaccagtgttcggagaagggcctccaagcctgaaaagttctcctagcggaagctctggtcaccctctcgccctcgggccttgcaagctaactaatctccaactcgctcagagtcaggtttgcgaggctggcgctgctgcaggcggagaaggtgagcctgagcctgcaggcacccgagggaatctagcacatcgacacccgaataacgtacatcatggcagacgcgcacataagtcaagagctaaagggcaccgggctggggaggcctgtggtaagaatcgactcaaagccttgagaggcggagccgctggcgcactcgaactgctttcgtccgagagcgggtctcttcataactctcctacagattcatacttaggctcaagtaggaactccccaggggctggcctgcaattggaaggcgagccgatgcttactccttcagaaggaagtgatacatccgcagcccctctgagcgaggccggaagagcaggacaaagacgctcagcgtctagagactctcttaagggagggggtgctttggaaaaagagtctcacaggaggtcatacccactgaacgccgcatctctgaacggcgcacccaagggcggaaaatacgatgatgtcacactgatgggggctgaggtggcatctggtgggtgcatgaagacaggcctctggaagagcgagacaaccgtttag

SEQ ID NO: 284674 - DNA, 3366 bp, Artificial Sequence
  derived and/or modified sequence
atgggcgccggcggcagaagaatgagaggcgcccccgccagactgctgctgcccctgctgccctggctgctgctgctgctggcccccgaggccagaggcgcccccggctgccccctgagcatcagaagctgcaagtgcagcggcgagagacccaagggcctgagcggcggcgtgcccggccccgccagaagaagagtggtgtgcagcggcggcgacctgcccgagccccccgagcccggcctgctgcccaacggcaccgtgaccctgctgctgagcaacaacaagatcaccggcctgagaaacggcagcttcctgggcctgagcctgctggagaagctggacctgagaaacaacatcatcagcaccgtgcagcccggcgccttcctgggcctgggcgagctgaagagactggacctgagcaacaacagaatcggctgcctgaccagcgagaccttccagggcctgcccagactgctgagactgaacatcagcggcaacatcttcagcagcctgcagcccggcgtgttcgacgagctgcccgccctgaaggtggtggacctgggcaccgagttcctgacctgcgactgccacctgagatggctgctgccctgggcccagaacagaagcctgcagctgagcgagcacaccctgtgcgcctaccccagcgccctgcacgcccaggccctgggcagcctgcaggaggcccagctgtgctgcgagggcgccctggagctgcacacccaccacctgatccccagcctgagacaggtggtgttccagggcgacagactgcccttccagtgcagcgccagctacctgggcaacgacaccagaatcagatggtaccacaacagagcccccgtggagggcgacgagcaggccggcatcctgctggccgagagcctgatccacgactgcaccttcatcaccagcgagctgaccctgagccacatcggcgtgtgggccagcggcgagtgggagtgcaccgtgagcatggcccagggcaacgccagcaagaaggtggagatcgtggtgctggagaccagcgccagctactgccccgccgagagagtggccaacaacagaggcgacttcagatggcccagaaccctggccggcatcaccgcctaccagagctgcctgcagtaccccttcaccagcgtgcccctgggcggcggcgcccccggcaccagagccagcagaagatgcgacagagccggcagatgggagcccggcgactacagccactgcctgtacaccaacgacatcaccagagtgctgtacaccttcgtgctgatgcccatcaacgccagcaacgccctgaccctggcccaccagctgagagtgtacaccgccgaggccgccagcttcagcgacatgatggacgtggtgtacgtggcccagatgatccagaagttcctgggctacgtggaccagatcaaggagctggtggaggtgatggtggacatggccagcaacctgatgctggtggacgagcacctgctgtggctggcccagagagaggacaaggcctgcagcagaatcgtgggcgccctggagagaatcggcggcgccgccctgagcccccacgcccagcacatcagcgtggagctgagcgccttccccagagaggtgggcggcgccggcgccggcctgcaccccgtggtgtacccctgcaccgccctgctgctgctgtgcctgttcgccaccatcatcacctacatcctgaaccacagcagcatcagagtgagcagaaagggctggcacatgctgctgaacctgtgcttccacatcgccatgaccagcgccgtgttcgccggcggcatcaccctgaccaactaccagatggtgtgccaggccgtgggcatcaccctgcactacagcagcctgagcaccctgctgtggatgggcgtgaaggccagagtgctgcacaaggagctgacctggagagccccccccccccaggagggcgaccccgccctgcccacccccagccccatgctgagattctacctgatcgccggcggcatccccctgatcatctgcggcatcaccgccgccgtgaacatccacaactacagagaccacagcccctactgctggctggtgtggagacccagcctgggcgccttctacatccccgtggccctgatcctgctgatcacctggatctacttcctgtgcgccggcctgagactgagaggccccctggcccagaaccccaaggccggcaacagcagagccagcctggaggccggcgaggagctgagaggcagcaccagactgagaggcagcggccccctgctgagcgacagcggcagcctgctggccaccggcagcgccagagtgggcacccccggcccccccgaggacggcgacagcctgtacagccccggcgtgcagctgggcgccctggtgaccacccacttcctgtacctggccatgtgggcctgcggcgccctggccgtgagccagagatggctgcccagagtggtgtgcagctgcctgtacggcgtggccgccagcgccctgggcctgttcgtgttcacccaccactgcgccagaagaagagacgtgagagccagctggagagcctgctgcccccccgccagccccgccgccccccacgccccccccagagccctgcccgccgccgccgaggacggcagccccgtgttcggcgagggcccccccagcctgaagagcagccccagcggcagcagcggccaccccctggccctgggcccctgcaagctgaccaacctgcagctggcccagagccaggtgtgcgaggccggcgccgccgccggcggcgagggcgagcccgagcccgccggcaccagaggcaacctggcccacagacaccccaacaacgtgcaccacggcagaagagcccacaagagcagagccaagggccacagagccggcgaggcctgcggcaagaacagactgaaggccctgagaggcggcgccgccggcgccctggagctgctgagcagcgagagcggcagcctgcacaacagccccaccgacagctacctgggcagcagcagaaacagccccggcgccggcctgcagctggagggcgagcccatgctgacccccagcgagggcagcgacaccagcgccgcccccctgagcgaggccggcagagccggccagagaagaagcgccagcagagacagcctgaagggcggcggcgccctggagaaggagagccacagaagaagctaccccctgaacgccgccagcctgaacggcgcccccaagggcggcaagtacgacgacgtgaccctgatgggcgccgaggtggccagcggcggctgcatgaagaccggcctgtggaagagcgagaccaccgtgtag

SEQ ID NO: 284675 - DNA, 915 bp, Artificial Sequence
  derived and/or modified sequence
atgctggacaaggcccccgtgctgaaggtgatcgtgaacagcctgaagaacatgatcaacaccttcgtgcccagcggcaagatcatgcaggtggtggacgagaagctgcccggcctgctgggcaacttccccggccccttcgaggaggagatgaagggcatcgccgccgtgaccgacatccccctgggccacctgatccacggccgcaacatggacttcggcgtgttcctgggctggaacatcaacaacgacacctgggtgatcaccgagcagctgaagcccctgaccgtgaacctggacttccagcgcaacaacaagaccgtgttcaaggccagcagcttcgccggctacgtgggcatgctgaccggcttcaagcccggcctgttcagcctgaccctgaacgagcgcttcagcatcaacggcggctacctgggcatcctggagtggatcctgggcaagaaggacgtgatgtggatcggcttcctgacccgcaccgtgctggagaacagcaccagctacgaggaggccaagaacctgctgaccaagaccaagatcctggcccccgcctacttcatcctgggcggcaaccagagcggcgagggctgcgtgatcacccgcgaccgcaaggagagcctggacgtgtacgagctggacgccaagcagggccgctggtacgtggtgcagaccaactacgaccgctggaagcaccccttcttcctggacgaccgccgcacccccgccaagatgtgcctgaaccgcaccagccaggagaacatcagcttcgagaccatgtacgacgtgctgagcaccaagcccgtgctgaacaagctgaccgtgtacaccaccctgatcgacgtgaccaagggccagttcgagacctacctgcgcgactgccccgacccctgcatcggctgg

SEQ ID NO: 284676 - DNA, 918 bp, Artificial Sequence
  derived and/or modified sequence
atgctggacaaggcccccgtgctgaaggtgatcgtgaacagcctgaagaacatgatcaacaccttcgtgcccagcggcaagatcatgcaggtggtggacgagaagctgcccggcctgctgggcaacttccccggccccttcgaggaggagatgaagggcatcgccgccgtgaccgacatccccctgggccacctgatccacggcagaaacatggacttcggcgtgttcctgggctggaacatcaacaacgacacctgggtgatcaccgagcagctgaagcccctgaccgtgaacctggacttccagagaaacaacaagaccgtgttcaaggccagcagcttcgccggctacgtgggcatgctgaccggcttcaagcccggcctgttcagcctgaccctgaacgagagattcagcatcaacggcggctacctgggcatcctggagtggatcctgggcaagaaggacgtgatgtggatcggcttcctgaccagaaccgtgctggagaacagcaccagctacgaggaggccaagaacctgctgaccaagaccaagatcctggcccccgcctacttcatcctgggcggcaaccagagcggcgagggctgcgtgatcaccagagacagaaaggagagcctggacgtgtacgagctggacgccaagcagggcagatggtacgtggtgcagaccaactacgacagatggaagcaccccttcttcctggacgacagaagaacccccgccaagatgtgcctgaacagaaccagccaggagaacatcagcttcgagaccatgtacgacgtgctgagcaccaagcccgtgctgaacaagctgaccgtgtacaccaccctgatcgacgtgaccaagggccagttcgagacctacctgagagactgccccgacccctgcatcggctggtag

SEQ ID NO: 284677 - DNA, 918 bp, Artificial Sequence
  derived and/or modified sequence
atgctcgataaggctcctgtgcttaaggtgattgtgaactcactgaagaacatgattaatacctttgtcccaagcgggaagatcatgcaggtggtagatgagaagttgcctggcttgctgggcaattttcccgggcctttcgaggaagagatgaaaggaattgccgccgtgaccgacatccctcttggacatctcatccacggcaggaacatggattttggcgttttcctaggatggaatataaataacgatacatgggtgattaccgagcagctgaagccactgacagtgaatctcgacttccagagaaataacaaaacagtgtttaaagcaagctcctttgctggatacgtcggaatgctcacaggtttcaagccaggactgtttagtctcaccctgaacgagaggttttcaatcaacggcgggtacctagggatcttggaatggattttgggaaagaaggacgttatgtggataggttttctgaccaggacagtgctcgaaaattcaacaagctatgaggaggcgaaaaacttactgactaagacaaagattctggcaccagcttacttcattctgggaggaaaccagtctggagagggctgtgtcatcacccgcgatcgaaaagaatctctggatgtgtacgaattggatgccaaacagggtcggtggtacgtggtgcagaccaattacgatcggtggaaacacccattctttctggacgataggcgcacacctgctaaaatgtgcctcaatagaactagccaggagaacatctcctttgaaaccatgtacgatgtactatctacaaaacctgtcctgaacaaattgactgtttataccactttgatcgacgtgaccaaaggccagtttgaaacgtatttgcgcgactgccctgatccgtgcatcggatggtag

SEQ ID NO: 284678 - DNA, 918 bp, Artificial Sequence
  derived and/or modified sequence
atgctggacaaggcccctgtgctgaaggtgattgtgaacagcctgaagaacatgatcaacacctttgtgcccagcggcaagatcatgcaggtggtggatgagaagctgcccggcctgctgggcaacttccctggcccctttgaggaggagatgaagggcattgctgctgtgacagacatccccctgggccacctgattcatggaagaaacatggactttggagtcttcctgggctggaacatcaacaatgacacctgggtgatcacagagcagctgaagcccctgactgtgaacctggacttccagaggaacaacaagacagtgttcaaggccagcagctttgctggctacgtgggcatgctgaccggcttcaagccaggcctcttcagcctgaccctgaatgaacgcttcagcatcaatggaggctacctgggcatcctggagtggatcctgggcaagaaggatgtgatgtggattggcttcctgaccaggacagtgctggagaacagcaccagctatgaggaggccaagaacctgctgaccaagaccaagatcctggccccagcctacttcatcctgggcggcaaccagagcggggagggctgcgtcatcacccgggacaggaaggagagcctggatgtgtatgagctggatgccaagcagggccgctggtacgtggtgcagaccaactatgaccgctggaagcaccccttcttcctggatgacaggaggaccccagccaagatgtgcctgaacagaaccagccaggagaacatcagctttgagaccatgtatgatgtgctgagcaccaagcctgtgctgaacaagctgactgtgtacaccaccctgattgatgtgaccaagggccagtttgagacctacctgcgggactgcccagacccctgcatcggctggtag

SEQ ID NO: 284679 - DNA, 918 bp, Artificial Sequence
  derived and/or modified sequence
atgctggacaaggcccccgtgctgaaggtgatcgtgaacagcctgaagaatatgataaacacattcgtaccaagtggcaagatcatgcaggtagtcgatgaaaagttgccaggcctgctggggaacttccctggccccttcgaggaggagatgaagggtattgctgctgtgacggacatccctttgggccacctgatacacggtaggaatatggatttcggtgtgttcctcgggtggaacatcaataatgacacctgggttattaccgagcagcttaagccactaaccgtcaacctggactttcaaagaaacaacaagaccgtcttcaaggccagtagctttgcgggctatgtgggcatgctgacggggttcaaaccgggcctcttttctctgactctcaacgagcggttcagtattaatggtgggtacctcggaatccttgaatggatacttggaaagaaagatgttatgtggattggattccttacacggactgtgctggagaatagcacctcctacgaggaggccaagaacctgcttaccaaaacgaaaatcctggctccagcgtattttatcttaggcggcaaccagagcggtgagggctgtgtgatcaccagggaccggaaagaatcactagacgtctatgaactggacgccaaacaagggagatggtatgtcgtgcaaaccaactatgatcggtggaaacacccttttttcctcgacgacaggcgaacccccgcaaaaatgtgcttaaacaggacctctcaggagaacataagttttgaaactatgtacgacgtgttatcaactaaaccagtgctcaataagttaaccgtatatacaactctcattgacgtgaccaagggacagtttgagacttacctgagagactgtcctgatccttgcatcggctggtag

SEQ ID NO: 284680 - DNA, 918 bp, Artificial Sequence
  derived and/or modified sequence
atgctcgacaaagcccctgtccttaaggtcatagtcaatagcctcaaaaacatgatcaatacattcgtaccgagcggcaagatcatgcaggtggtggacgaaaaattacctggtttgttgggtaattttcctgggccattcgaggaggagatgaagggcatcgccgctgtgacagacatacctttaggccacctgatccatgggcgtaatatggattttggcgtcttcctgggctggaatatcaataacgatacatgggttataaccgaacagctgaagccacttaccgttaatcttgacttccagagaaataataagacggtctttaaagctagctccttcgcaggttacgtcggcatgctcacgggtttcaagcctggcctctttagcttgaccctgaacgagcgattctcgataaacggcggatacctgggcatcttagaatggatcctagggaagaaagacgttatgtggatcgggtttctgacccgtacagtgttggaaaactcaacatcctatgaagaggcaaagaatcttctgactaaaacgaaaatcctggcgccagcctacttcatactcgggggtaatcagtctggggaaggatgtgtaatcactcgagacaggaaagagtccctggatgtgtacgagcttgatgctaaacagggcagatggtacgtagtccagaccaactatgaccggtggaagcaccctttcttcctggatgatagacggactcctgcaaagatgtgtctgaatagaacgtcccaggagaatatcagcttcgaaaccatgtatgacgtgctatcaactaaacccgtcctgaataaactgactgtttacaccacgctgatcgacgttacaaagggacagttcgagacataccttcgcgactgtcccgacccttgcatcgggtggtag

SEQ ID NO: 284681 - protein, 280 aa, Artificial Sequence
  derived and/or modified sequence
MSKRKAPQETLNGGITDMLTELANFEKNVSQAIHKYNAYRKAASVIAKYPHKIKSGAEAKKLPGVGTKIAEKIDEFLATGKLRKLEKIRQDDTSSSINFLTRVSGIGPSAARKFVDEGIKTLEGSQLDSCPVKGHLNGTESLLDLIWDVMTILKLKNADLRKNEDKLNHHQRIGLKYFGDFEKRIPREEMLQMQDIVLNEVKKVDSEYIATVCGSFRRGAESSGDMDVLLTHPSFTSESTKQPKLLHQVVEQLQKVHFITDTLSKGETKFMGVCQLPSKN

SEQ ID NO: 284682 - DNA, 843 bp, Artificial Sequence
  derived and/or modified sequence
atgagcaagagaaaggccccccaggagaccctgaacggcggcatcaccgacatgctgaccgagctggccaacttcgagaagaacgtgagccaggccatccacaagtacaacgcctacagaaaggccgccagcgtgatcgccaagtacccccacaagatcaagagcggcgccgaggccaagaagctgcccggcgtgggcaccaagatcgccgagaagatcgacgagttcctggccaccggcaagctgagaaagctggagaagatcagacaggacgacaccagcagcagcatcaacttcctgaccagagtgagcggcatcggccccagcgccgccagaaagttcgtggacgagggcatcaagaccctggagggcagccagctggacagctgccccgtgaagggccacctgaacggcaccgagagcctgctggacctgatctgggacgtgatgaccatcctgaagctgaagaacgccgacctgagaaagaacgaggacaagctgaaccaccaccagagaatcggcctgaagtacttcggcgacttcgagaagagaatccccagagaggagatgctgcagatgcaggacatcgtgctgaacgaggtgaagaaggtggacagcgagtacatcgccaccgtgtgcggcagcttcagaagaggcgccgagagcagcggcgacatggacgtgctgctgacccaccccagcttcaccagcgagagcaccaagcagcccaagctgctgcaccaggtggtggagcagctgcagaaggtgcacttcatcaccgacaccctgagcaagggcgagaccaagttcatgggcgtgtgccagctgcccagcaagaactag

SEQ ID NO: 284683 - DNA, 843 bp, Artificial Sequence
  derived and/or modified sequence
atgtcgaagcggaaagctcctcaagagacactcaacggaggaattaccgacatgctgacagaacttgccaatttcgagaagaacgtgtcccaggcaatccacaaatataacgcttaccggaaggccgccagcgtcattgccaagtatccacacaaaattaagtctggggcggaagctaagaagcttccaggtgtggggaccaaaatcgcggaaaaaatcgacgaatttctcgctaccggcaaactcaggaagttggaaaagatcaggcaggacgacacctcctcctccattaattttctgaccagggtgtccgggatcgggccctctgcagccagaaaattcgtggatgaaggaataaagaccctggaaggttcccagcttgatagctgccctgtcaagggccacctgaatggcactgagtcccttctggatctgatctgggacgtgatgacaattctgaaacttaaaaatgctgatcttcgcaaaaatgaggacaagctgaatcaccatcaaagaattggcttaaagtacttcggagactttgagaagcgtatcccacgggaagagatgctgcagatgcaggatatagttctgaatgaggtgaagaaggtggacagcgaatacatcgcgaccgtgtgtggctcattcaggagaggcgccgagtcatcgggggacatggatgtccttttgactcatcccagttttacctcagagtcgaccaaacagcctaaactccttcaccaggttgtggagcagctgcagaaagtacacttcataacggacactttaagcaaaggcgagactaagtttatgggggtgtgtcagctccccagcaagaactag

SEQ ID NO: 284684 - DNA, 843 bp, Artificial Sequence
  derived and/or modified sequence
atgagcaagaggaaggccccccaggagaccctgaatggaggcatcacagacatgctgacagagctggccaactttgagaagaatgtgtcccaggccatccacaagtacaatgcctacaggaaggccgccagcgtcatcgccaagtacccccacaagatcaagtctggagctgaggccaagaagctgcccggggtgggcaccaagattgctgagaagattgatgagttcctggccaccgggaagctgaggaagctggagaagatccggcaggatgacaccagcagcagcatcaacttcctgaccagggtgtctggcatcggccccagcgctgccaggaagtttgtggatgagggcatcaagaccctggagggcagccagctggacagctgccctgtgaagggccacctgaatggaacagagagcctgctggacctgatctgggatgtgatgaccatcctgaagctgaagaatgctgacctgaggaagaatgaagacaagctgaaccaccaccagagaattggcctgaagtactttggagactttgagaagaggatcccccgggaggagatgctgcagatgcaggacatcgtgctgaatgaggtgaagaaggtggacagcgagtacatcgccaccgtgtgtggcagcttcagaagaggagctgagagcagcggggacatggatgtgctgctgacccaccccagcttcaccagcgagagcaccaagcagcccaagctgctgcaccaggtggtggagcagctgcagaaggtgcacttcatcacagacaccctgagcaaaggagagaccaagttcatgggcgtgtgccagctgcccagcaagaactag

SEQ ID NO: 284685 - DNA, 843 bp, Artificial Sequence
  derived and/or modified sequence
atgagcaagcggaaggccccccaggagaccctgaacggcggcatcacggacatgttgacagagctggccaacttcgaaaagaacgtttctcaggctatacacaagtataatgcttaccgcaaggcagcatccgttattgcaaagtatcctcataagatcaagagtggcgctgaggcaaaaaagcttcccggcgtgggcacaaagatagcagaaaagatagacgagtttctggcaaccggaaagttgcggaaactggagaagatacgacaggacgacaccagctcctccataaacttcctgactcgggtctcgggcatcggacctagcgccgcaagaaagttcgtggacgagggcatcaaaactttggaaggatctcaattggacagttgtccagtcaaggggcatcttaacggtaccgagtccctgttggatttaatctgggacgtgatgacgatcttgaagttaaaaaatgcggacctgcggaagaacgaggacaagttgaaccatcatcagcggatcgggctgaagtacttcggggatttcgaaaaacgcatccctcgcgaggagatgctccaaatgcaggatatagttctcaacgaggtgaagaaggtggatagcgaatacatcgctactgtctgcggcagcttccgccggggggcagagagctccggagatatggacgttcttctcacccatccctcttttactagtgaatccacaaagcagccaaaactgctgcatcaggttgtggagcagctgcaaaaggtgcacttcatcaccgatacactgagcaagggagaaacaaaatttatgggcgtgtgccaattgccgtccaaaaactag

SEQ ID NO: 284686 - DNA, 843 bp, Artificial Sequence
  derived and/or modified sequence
atgagcaagagaaaagctccgcaggagactttgaatggcggtatcacggacatgttaaccgagctggctaactttgagaaaaacgtttcacaggcaatccacaagtataacgcataccgaaaggctgccagtgtcattgctaaatacccacacaaaatcaaatctggagccgaagcaaagaaactgcccggtgtgggaaccaagatcgctgagaagattgacgagttcctcgcaacaggcaaacttcgaaagctcgagaagatacgacaggatgatactagtagctccatcaatttcctgaccagagtgtccggtattgggccatccgctgcaagaaaattcgttgacgaagggataaaaaccctggaaggcagccagctggactcatgtcccgtgaagggccatttaaacgggaccgaatcgcttttggacttgatctgggacgtaatgacaatcttgaagctgaaaaacgcagacctcaggaagaatgaagacaaattgaatcatcaccagagaattggactgaagtactttggtgacttcgagaaaagaattcccagggaagagatgctgcagatgcaagacattgtactcaacgaagtgaaaaaagtggactcagagtatattgccacggtgtgtggctcatttcgacgcggagcggagtcctctggcgacatggatgtgctcctgacccatcctagctttacgagcgagtccacaaagcagccaaagctactccatcaagtcgtcgaacagctgcaaaaggtacactttatcaccgacacactgtctaaaggcgaaactaaatttatgggcgtgtgccagcttccatcaaaaaactag

SEQ ID NO: 284687 - DNA, 983 bp, Artificial Sequence
  derived and/or modified sequence
tcgggggcaaccattgttccgccggtcgcgccggagctgggttgctcctgctcccgtctccaagtcctggtacctccttcaagctgggagagggctctagtccctggttctgaacactctggggttctcgggtgcaggccgccatgagcaaacggaaggcgccgcaggagactctcaacgggggaatcaccgacatgctcacagaactcgcaaactttgagaagaacgtgagccaagctatccacaagtacaatgcttacagaaaagcagcatctgttatagcaaaatacccacacaaaataaagagtggagctgaagctaagaaattgcctggagtaggaacaaaaattgctgaaaagattgatgagtttttagcaactggaaaattacgtaaactggaaaagattcggcaggatgatacgagttcatccatcaatttcctgactcgagttagtggcattggtccatctgctgcaaggaagtttgtagatgaaggaattaaaacactagaaggctcacagctggattcatgcccagtaaagggacacctgaatggaactgagtcacttttagacttaatatgggatgttatgacaattcttaagttaaaaaatgcagatctcagaaaaaatgaagataaattgaaccatcatcagcgaattgggctgaaatattttggggactttgaaaaaagaattcctcgtgaagagatgttacaaatgcaagatattgtactaaatgaagttaaaaaagtggattctgaatacattgctacagtctgtggcagtttcagaagaggtgcagagtccagtggtgacatggatgttctcctgacccatcccagcttcacttcagaatcaaccaaacagccaaaactgttacatcaggttgtggagcagttacaaaaggttcattttatcacagataccctgtcaaagggtgagacaaagttcatgggtgtttgccagcttcccagtaaaaat

SEQ ID NO: 284688 - protein, 237 aa, Artificial Sequence
  derived and/or modified sequence
  misc_feature (1)..(1): Xaa can be any naturally occurring amino acid
XEKIDEFLATGKLRKLEKIRQDDTSSSINFLTRVSGIGPSAARKFVDEGIKTLEDLRKNEDKLNHHQRIGLKYFGDFEKRIPREEMLQMQDIVLNEVKKVDSEYIATVCGSFRRGAESSGDMDVLLTHPSFTSESTKQGVCQLPSKNDEKEYPHRRIDIRLIPKDQYYCGVLYFTGSDIFNKNMRAHALEKGFTINEYTIRPLGVTGVAGEPLPVDSEKDIFDYIQWKYREPKDRSE

SEQ ID NO: 284689 - DNA, 714 bp, Artificial Sequence
  derived and/or modified sequence
tgagagaagatcgacgagttcctggccaccggcaagctgagaaagctggagaagatcagacaggacgacaccagcagcagcatcaacttcctgaccagagtgagcggcatcggccccagcgccgccagaaagttcgtggacgagggcatcaagaccctggaggacctgagaaagaacgaggacaagctgaaccaccaccagagaatcggcctgaagtacttcggcgacttcgagaagagaatccccagagaggagatgctgcagatgcaggacatcgtgctgaacgaggtgaagaaggtggacagcgagtacatcgccaccgtgtgcggcagcttcagaagaggcgccgagagcagcggcgacatggacgtgctgctgacccaccccagcttcaccagcgagagcaccaagcagggcgtgtgccagctgcccagcaagaacgacgagaaggagtacccccacagaagaatcgacatcagactgatccccaaggaccagtactactgcggcgtgctgtacttcaccggcagcgacatcttcaacaagaacatgagagcccacgccctggagaagggcttcaccatcaacgagtacaccatcagacccctgggcgtgaccggcgtggccggcgagcccctgcccgtggacagcgagaaggacatcttcgactacatccagtggaagtacagagagcccaaggacagaagcgagtag

SEQ ID NO: 284690 - DNA, 714 bp, Artificial Sequence
  derived and/or modified sequence
taggagaagattgacgagttcctcgccacagggaagttgcgtaaacttgaaaagattaggcaggacgatacctcttccagcatcaatttcctaacaagggtctccggtatcgggccatcggccgcacggaaatttgtcgatgaaggcatcaaaactttggaagacctacggaagaacgaagacaaactcaaccatcaccaacgcatcgggttaaaatacttcggagacttcgagaaaagaattcctagagaggagatgcttcaaatgcaagacatcgtgctgaatgaggtgaaaaaggtggacagcgagtacattgctacggtttgtggaagcttccgccgcggggccgagtcaagcggggatatggatgtgctgttgactcacccgtcatttacgtcagagagtaccaaacaaggggtctgccagctgccttctaaaaacgacgaaaaggaatatccccaccggcggattgatatacggttgatcccaaaagatcagtactactgcggcgtcctctatttcactgggtccgatatcttcaacaagaacatgagagcccacgctctggagaaaggcttcactatcaacgagtataccattagacctctgggagtgacgggggttgccggagagcccctcccagtagatagtgagaaggacatctttgattatatccagtggaagtatcgagagcctaaggatcgtagcgaatag

SEQ ID NO: 284691 - DNA, 714 bp, Artificial Sequence
  derived and/or modified sequence
tgagagaagattgatgagttcctggccaccgggaagctgaggaagctggagaagatccggcaggatgacaccagcagcagcatcaacttcctgaccagggtgtctggaattggccccagcgctgccaggaagtttgtggatgagggcatcaagaccctggaggacctgaggaagaatgaagacaagctgaaccaccaccagagaattggcctgaagtactttggagactttgagaagaggatcccccgggaggagatgctgcagatgcaggacatcgtgctgaatgaggtgaagaaggtggacagcgagtacatcgccaccgtgtgtggcagcttcagaagaggagctgagagcagcggggacatggatgtgctgctgacccaccccagcttcaccagcgagagcaccaagcagggcgtgtgccagctgcccagcaagaatgatgagaaggagtacccccacagaagaattgacatccgcctcatccccaaggaccagtactactgcggcgtgctgtacttcaccggcagtgacatcttcaacaagaacatgagggcccacgccctggagaagggcttcaccatcaatgagtacaccatccggcccctgggcgtgactggagtggccggggagcccctgcctgtggacagcgagaaggacatctttgactacatccagtggaagtaccgggagcccaaggacagaagtgaatag

SEQ ID NO: 284692 - DNA, 714 bp, Artificial Sequence
  derived and/or modified sequence
tgagagaagatcgacgagttcctggccaccggcaagctgcggaagttggaaaagatcaggcaagatgacacctctagcagcatcaattttctgacaagggtgtcaggaatcgggccaagtgccgctagaaaatttgtcgacgaaggaattaagacactggaagacctacggaagaatgaagataaactgaaccaccaccagcggatcggactcaaatactttggggactttgaaaaacgtatccccagggaggaaatgcttcagatgcaggacatagtgctgaacgaagtaaaaaaagtcgattccgagtatatcgccactgtgtgtggatcatttcggagaggtgccgagtcctcaggagacatggatgtcctgctaacacatccctcatttacctccgagtctaccaaacagggggtttgccagcttccaagcaaaaatgacgagaaagagtacccccacaggcgcatcgatatccgcctgatccccaaagatcaatattattgcggcgttctctacttcaccggcagtgacatcttcaacaagaacatgagggcccacgctcttgagaagggcttcactattaatgagtataccattcggccactgggggtgaccggcgtggccggcgagccattgcccgtagatagtgagaaagacattttcgactatattcaatggaagtatagggagccaaaggaccgttccgagtag

SEQ ID NO: 284693 - DNA, 714 bp, Artificial Sequence
  derived and/or modified sequence
tgagaaaagatcgatgaatttctggcaactggtaaattgcgcaaactagagaaaatccggcaggatgatacatcctcttctattaattttttaacgagagtatccggtattggaccaagcgcagccagaaagtttgtggatgaggggatcaagaccttagaagatcttcgcaagaacgaggacaagctcaatcaccaccagcgaatcggcctgaagtacttcggcgattttgagaaaagaatcccaagagaggaaatgctacaaatgcaggatatagttctaaatgaggtgaaaaaagtggactccgagtacatcgctactgtctgcggttcctttagacgcggagccgagtcatccggagacatggacgtgcttcttacccatccatcttttaccagtgaaagtacaaagcagggggtgtgtcagctgccctcaaagaatgacgagaaagagtaccctcacagacgaatcgatatccgcctgatccctaaggatcagtattattgcggggtcctctacttcacaggaagcgacatctttaataaaaacatgagagctcacgccctggagaagggcttcaccataaatgaatatactattagacctttaggggtaacaggcgtggccggagaaccgctgcccgtggacagtgaaaaggacatcttcgattacatccagtggaagtatcgggagcccaaagacagaagcgaatag

SEQ ID NO: 284694 - DNA, 863 bp, Artificial Sequence
  derived and/or modified sequence
tgaaaagattgatgagtttttagcaactggaaaattacgtaaactggaaaagattcggcaggatgatacgagttcatccatcaatttcctgactcgagttagtggcattggtccatctgctgcaaggaagtttgtagatgaaggaattaaaacactagaagatctcagaaaaaatgaagataaattgaaccatcatcagcgaattgggctgaaatattttggggactttgaaaaaagaattcctcgtgaagagatgttacaaatgcaagatattgtactaaatgaagttaaaaaagtggattctgaatacattgctacagtctgtggcagtttcagaagaggtgcagagtccagtggtgacatggatgttctcctgacccatcccagcttcacttcagaatcaaccaaacagggtgtttgccagcttcccagtaaaaatgatgaaaaagaatatccacacagaagaattgatatcaggttgatacccaaagatcagtattactgtggtgttctctatttcactgggagtgatattttcaataagaatatgagggctcatgccctagaaaagggtttcacaatcaatgagtacaccatccgtcccttgggagtcactggagttgcaggagaacccctgccagtggatagtgaaaaagacatctttgattacatccagtggaaataccgggaacccaaggaccggagcgaatgaggcctgtatcctccctggcagacacaacccaataggagtcttaatttatttcttaacctttgctatgtaagggtctttggtgtttttaaatgattgtttcttcttcatgcttttgcttgcaatgtagtcaataaaacctcatgtactatta

SEQ ID NO: 284695 - DNA, 720 bp, Artificial Sequence
  derived and/or modified sequence
tgaggcgacttcgagaagagaatccccagagaggagatgctgcagatgcaggacatcgtgctgaacgaggtgaagaaggtggacagcgagtacatcgccaccgtgtgcggcagcttcagaagaggcgccgagagcagcggcgacatggacgtgctgctgacccaccccagcttcaccagcgagagcaccaagcagcccaagctgctgcaccaggtggtggagcagctgcagaaggtgcacttcatcaccgacaccctgagcaagggcgagaccaagttcatgggcgtgtgccagctgcccagcaagaacgacgagaaggagtacccccacagaagaatcgacatcagactgatccccaaggaccagtactactgcggcgtgctgtacttcaccggcagcgacatcttcaacaagaacatgagagcccacgccctggagaagggcttcaccatcaacgagtacaccatcagacccctgggcgtgaccgtgctgcaggccaccagagaggacctgatgcacaacatgctgctgggcccccagctgaaggccatcaaggagctgcaggagaacccctgccagtggatcgtgaagaagaccagcctgatcaccagcagcggcaacaccggcaaccccagaaccggcgccaacgaggcctgcatcctgcccggcagacacaaccccatcggcgtgctgatctacttcctgaccttcgccatgtag

SEQ ID NO: 284696 - DNA, 720 bp, Artificial Sequence
  derived and/or modified sequence
tgaggggactttgagaagcgcattccccgcgaggagatgctgcagatgcaagacattgtgcttaacgaagttaaaaaggttgacagtgagtacatcgctacagtttgtggtagcttcagaagaggcgcagagagctccggcgatatggatgtcttgctcacccacccaagttttacctctgaatctactaaacagccgaagttgctgcatcaagtcgtagagcagctgcaaaaagttcatttcataaccgacacattatccaagggggaaacgaagtttatgggcgtctgccagctcccatctaagaatgatgagaaggagtacccccaccgtaggatcgatataaggctgatccccaaagatcagtactactgtggcgtgttgtattttactggctccgatatatttaacaaaaatatgcgagcccacgcattagaaaaaggctttactatcaacgagtatacaatacgtccattaggcgttactgtcctccaggccacccgcgaggacctgatgcacaatatgctgttagggccacagctaaaggcgatcaaagaattgcaggagaatccttgccagtggatcgtgaagaagacaagtctcatcactagcagtggcaatacgggaaaccccaggactggtgctaacgaggcatgtatcctacccggaaggcacaatcctatcggcgtcctgatatattttctgacttttgcaatgtag

SEQ ID NO: 284697 - DNA, 720 bp, Artificial Sequence
  derived and/or modified sequence
tgaggagactttgagaagaggatcccccgggaggagatgctgcagatgcaggacatcgtgctgaatgaggtgaagaaggtggacagcgagtacatcgccaccgtgtgtggcagcttcagaagaggagctgagagcagcggggacatggatgtgctgctgacccaccccagcttcaccagcgagagcaccaagcagcccaagctgctgcaccaggtggtggagcagctgcagaaggtgcacttcatcacagacaccctgagcaagggggagaccaagttcatgggcgtgtgccagctgcccagcaagaatgatgagaaggagtacccccacagaagaattgacatccgcctcatccccaaggaccagtactactgcggcgtgctgtacttcaccggcagtgacatcttcaacaagaacatgagggcccacgccctggagaagggcttcaccatcaatgagtacaccatccggcccctgggcgtgacagtgctgcaggccacccgggaggacctgatgcacaacatgctgctgggcccccagctgaaggccatcaaggagctgcaggagaacccctgccagtggatcgtgaagaagaccagcctcatcaccagcagcggcaacacaggcaaccccaggactggagccaatgaggcctgcatcctgcccggccgccacaaccccatcggcgtgctgatctacttcctgacctttgccatgtag

SEQ ID NO: 284698 - DNA, 720 bp, Artificial Sequence
  derived and/or modified sequence
tgaggcgacttcgagaagcggatcccccgggaggagatgctgcagatgcaagacattgtactgaacgaagtaaaaaaagttgatagcgaatatatagcaacagtgtgtgggtcttttcgcagaggggccgaatcctccggtgacatggatgtgctcctcacccatccgtctttcactagcgaaagcaccaagcagcccaagttgcttcatcaggtcgtggaacagctccagaaagtccacttcataactgacaccctttcaaagggcgaaacgaagtttatgggagtgtgccagctgccttctaaaaatgacgagaaggagtaccctcaccgccggatagacattcgtctgatccccaaggaccaatactattgcggagtgttgtactttaccggcagcgacatttttaataaaaatatgagggcccacgctttggaaaaggggtttacaatcaatgagtacaccataaggcccttgggtgtgactgtgctgcaagccacacgtgaagatctgatgcataatatgctcttaggtccacagcttaaagctatcaaggagctgcaggagaacccctgtcagtggattgtaaaaaagaccagcctaattacatcatcagggaatacgggcaatccccgcactggagccaatgaggcctgtatattaccgggcagacataacccaatcggggtgctcatctattttctcacctttgcgatgtag

SEQ ID NO: 284699 - DNA, 720 bp, Artificial Sequence
  derived and/or modified sequence
tgaggcgacttcgagaagcgcatccccagagaggagatgctacaaatgcaggatatagtcttgaatgaggttaagaaagttgatagcgagtacattgctaccgtctgtggaagctttcggagaggcgcagagtcttcaggcgacatggacgtattattaactcatccttctttcaccagcgagtccacaaaacagccaaagttgttgcaccaggtggtggaacagctgcagaaagtccactttattaccgacaccttgagcaaaggcgagaccaaatttatgggcgtctgccaattaccatctaaaaatgacgaaaaagaataccctcatcgcagaatcgatataagactgattccaaaagaccagtattactgtggagtcctatacttcacagggagcgacatcttcaacaagaacatgcgagcacatgcattagagaaagggtttaccatcaacgagtacactatccgtcctctgggcgtaaccgttctgcaagccactagggaggacttgatgcacaatatgctgcttggcccacagctgaaggctattaaggagctgcaggaaaacccctgtcagtggattgtgaagaaaacctcactgatcaccagcagcgggaacacgggtaatccaaggacaggcgctaatgaggcttgtattcttcctggaagacataaccccattggcgtgttaatctattttctcacatttgccatgtag

SEQ ID NO: 284700 - DNA, 744 bp, Artificial Sequence
  derived and/or modified sequence
ttggggactttgaaaaaagaattcctcgtgaagagatgttacaaatgcaagatattgtactaaatgaagttaaaaaagtggattctgaatacattgctacagtctgtggcagtttcagaagaggtgcagagtccagtggtgacatggatgttctcctgacccatcccagcttcacttcagaatcaaccaaacagccaaaactgttacatcaggttgtggagcagttacaaaaggttcattttatcacagataccctgtcaaagggtgagacaaagttcatgggtgtttgccagcttcccagtaaaaatgatgaaaaagaatatccacacagaagaattgatatcaggttgatacccaaagatcagtattactgtggtgttctctatttcactgggagtgatattttcaataagaatatgagggctcatgccctagaaaagggtttcacaatcaatgagtacaccatccgtcccttgggagtcactgtccttcaggcaacgagagaggatttaatgcataacatgctcctaggccctcagttgaaggccatcaaggagttgcaggagaacccctgccagtggatagtgaaaaagacatctttgattacatccagtggaaataccgggaacccaaggaccggagcgaatgaggcctgtatcctccctggcagacacaacccaataggagtcttaatttatttcttaacctttgctatgtaagggtctttggtgtttttaaatgatt

SEQ ID NO: 284701 - DNA, 1048 bp, Artificial Sequence
  derived and/or modified sequence
attgttccgccggtcgcgccggagctgggttgctcctgctcccgtctccaagtcctggtacctccttcaagctgggagagggctctagtccctggttctgaacactctggggttctcgggtgcaggccgccatgagcaaacggaaggcgccgcaggagactctcaacgggggaatcaccgacatgctcacagaaaagcagcatctgttatagcaaaatacccacacaaaataaagagtggagctgaagctaagaaattgatctcagaaaaaatgaagataaattgaaccatcatcagcgaattgggctgaaatattttggggactttgaaaaaagaattcctcgtgaagagatgttacaaatgcaagatattgtactaaatgaagttaaaaaagtggattctgaatacattgctacagtctgtggcagtttcagaagaggtgcagagtccagtggtgacatggatgttctcctgacccatcccagcttcacttcagaatcaaccaaacagccaaaactgttacatcaggttgtggagcagttacaaaaggttcattttatcacagataccctgtcaaagggtgagacaaagttcatgggtgtttgccagcttcccagtaaaaatgatgaaaaagaatatccacacagaagaattgatatcaggttgatacccaaagatcagtattactgtggtgttctctatttcactgggagtgatattttcaataagaatatgagggctcatgccctagaaaagggtttcacaatcaatgagtacaccatccgtcccttgggagtcactggagttgcaggagaacccctgccagtggatagtgaaaaagacatctttgattacatccagtggaaataccgggaacccaaggaccggagcgaatgaggcctgtatcctccctggcagacacaacccaataggagtcttaatttatttcttaacctttgctatgtaagggtctttggtgtttttaaatgattgtttcttcttcatgcttttgcttgcaatgtagtcaataaaacctcatgtactatta

SEQ ID NO: 284702 - DNA, 546 bp, Artificial Sequence
  derived and/or modified sequence
atgctgcagatgcaggacatcgtgctgaacgaggtgaagaaggtggacagcgagtacatcgccaccgtgtgcggcagcttcagaagaggcgccgagagcagcggcgacatggacgtgctgctgacccaccccagcttcaccagcgagagcaccaagcagcccaagctgctgcaccaggtggtggagcagctgcagaaggtgcacttcatcaccgacaccctgagcaagggcgagaccaagttcatgggcgtgtgccagctgcccagcaagaacgacgagaaggagtacccccacagaagaatcgacatcagactgatccccaaggaccagtactactgcggcgtgctgtacttcaccggcagcgacatcttcaacaagaacatgagagcccacgccctggagaagggcttcaccatcaacgagtacaccatcagacccctgggcgtgaccggcgtggccggcgagcccctgcccgtggacagcgagaaggacatcttcgactacatccagtggaagtacagagagcccaaggacagaagcgagtag

SEQ ID NO: 284703 - DNA, 546 bp, Artificial Sequence
  derived and/or modified sequence
atgctccaaatgcaggatattgtgctcaacgaggtcaaaaaggtagatagcgaatacatcgccacagtttgtggctcattccgacgaggcgcggaatcatctggcgatatggatgtgctcctgactcacccatcgttcacctcagagtccaccaaacagccaaaactcctccatcaggttgtggagcagctccaaaaggtccatttcatcactgacactctgagtaaaggagagacaaaattcatgggggtgtgtcagctgcccagcaagaatgatgagaaagaatatccccatcgacgcatcgacatacgactgatcccaaaggaccaatattattgtggagtgctctactttacaggttccgacattttcaacaagaacatgcgcgcgcatgcccttgaaaagggattcacaatcaatgagtataccattcggccacttggagtcacaggcgtggcgggcgaacccttaccggtagactctgaaaaggacatattcgactacatccagtggaagtacagagagcccaaagaccgcagcgagtag

SEQ ID NO: 284704 - DNA, 546 bp, Artificial Sequence
  derived and/or modified sequence
atgctgcagatgcaggacatcgtgctgaatgaggtgaagaaggtggacagcgagtacatcgccaccgtgtgtggcagcttcagaagaggagctgagagcagcggggacatggatgtgctgctgacccaccccagcttcaccagcgagagcaccaagcagcccaagctgctgcaccaggtggtggagcagctgcagaaggtgcacttcatcacagacaccctgagcaagggggagaccaagttcatgggcgtgtgccagctgcccagcaagaatgatgagaaggagtacccccacagaagaattgacatccgcctcatccccaaggaccagtactactgcggcgtgctgtacttcaccggcagtgacatcttcaacaagaacatgagggcccacgccctggagaagggcttcaccatcaatgagtacaccatccggcccctgggcgtgactggagtggccggggagcccctgcctgtggacagcgagaaggacatctttgactacatccagtggaagtaccgggagcccaaggacagaagtgaatag

SEQ ID NO: 284705 - DNA, 546 bp, Artificial Sequence
  derived and/or modified sequence
atgctgcagatgcaggacatcgtgctgaacgaggtgaagaaggtggattctgagtacattgccacagtgtgtgggtcattcagaagaggagctgagtcttccggcgatatggacgtgctgctaacgcacccaagcttcactagcgaatctacaaagcaacctaagctgctccaccaagtggtggaacagctccagaaggttcacttcataaccgatactctgagcaaaggcgagaccaaatttatgggggtctgccaactcccgagtaagaacgatgaaaaagaatacccccaccgaagaattgacattaggttgatccccaaggatcagtattattgtggtgtgctgtattttactggttctgatatttttaacaagaacatgagagctcatgcgttggagaagggatttacaatcaacgaatacactatcaggcccctcggcgtcacaggcgtcgccggagagccccttccagttgattccgaaaaagacattttcgactacattcagtggaaataccgtgaacccaaggacagaagtgagtag

SEQ ID NO: 284706 - DNA, 546 bp, Artificial Sequence
  derived and/or modified sequence
atgctccagatgcaagatatcgtgctgaacgaggtgaaaaaggtggactcagagtacatagctacggtatgcggcagcttcaggagaggcgctgagtcaagcggcgatatggatgttctactcacacacccctcattcacctccgagtctaccaaacagcctaagctcttacatcaagtggtcgaacagctgcagaaagtccactttattaccgataccctgagcaaaggagaaaccaagtttatgggtgtgtgccagcttccaagtaagaatgacgaaaaggagtatccgcacaggaggattgacatccgtctgatcccgaaagatcagtattactgcggcgtcctctacttcactggttctgatatctttaacaaaaacatgcgggcacacgctttggaaaaagggttcactatcaacgagtatacaatcaggccactcggtgtgaccggggtcgcgggagagcccctgccggtggactccgagaaagacatattcgattacatccagtggaagtatcgggagcccaaagaccgaagcgaatag

SEQ ID NO: 284707 - protein, 1426 aa, Artificial Sequence
  derived and/or modified sequence
MDFSFSFMQGIMGNTIQQPPQLIDSANIRQEDAFDNNSDIAEDGGQTPYEATLQQGFQYPATTEDLPPLTNGYPSSISVYETQTKYQSYNQYPNGSANGFGAVRNFSPTDYYHSEIPNTRPHEILEKPSPPQPPPPPSVPQTVIPKKTGSPEIKLKITKTIQNGRELFESSLCGDLLNEVQASEHTKSKHESRKEKRKKSNKHDSSRSEERKSHKIPKLEPEEQNRPNERVDTVSEKPREEPVLKEEAPVQPILSSVPTTEVSTGVKFQVGDLVWSKVGTYPWWPCMVSSDPQLEVHTKINTRGAREYHVQFFSNQPERAWVHEKRVREYKGHKQYEELLAEATKQASNHSEKQKIRKPRPQRERAQWDIGIAHAEKALKMTREERIEQYTFIYIDKQPEEALSQAKKSVASKTEVKKTRRPRSVLNTQPEQTNAGEVASSLSSTEIRRHSQRRHTSAEEEEPPPVKIAWKTAAARKSLPASITMHKGSLDLQKCNMSPVVKIEQVFALQNATGDGKFIDQFVYSTKGIGNKTEISVRGQDRLIISTPNQRNEKPTQSVSSPEATSGSTGSVEKKQQRRSIRTRSESEKSTEVVPKKKIKKEQVETVPQATVKTGLQKGASEISDSCKPLKKRSRASTDVEMTSSAYRDTSDSDSRGLSDLQVGFGKQVDSPSATADADVSDVQSMDSSLSRRGTGMSKKDTVCQICESSGDSLIPCEGECCKHFHLECLGLASLPDSKFICMECKTGQHPCFSCKVSGKDVKRCSVGACGKFYHEACVRKFPTAIFESKGFRCPQHCCSACSMEKDIHKASKGRMMRCLRCPVAYHSGDACIAAGSMLVSSYILICSNHSKRSSNSSAVNVGFCFVCARGLIVQDHSDPMFSSYAYKSHYLLNESNRAELMKLPMIPSSSASKKKCEKGGRLLCCESCPASFHPECLSIEMPEGCWNCNDCKAGKKLHYKQIVWVKLGNYRWWPAEICNPRSVPLNIQGLKHDLGDFPVFFFGSHDYYWVHQGRVFPYVEGDKSFAEGQTSINKTFKKALEEAAKRFQELKAQRESKEALEIEKNSRKPPPYKHIKANKVIGKVQIQVADLSEIPRCNCKPADENPCGLESECLNRMLQYECHPQVCPAGDRCQNQCFTKRLYPDAEIIKTERRGWGLRTKRSIKKGEFVNEYVGELIDEEECRLRIKRAHENSDRIIDAGPKGNYSRFMNHSCNPNCETQKWTVNGDVRVGLFALCDIPAGMELTFNYNLDCLGNGRTECHCGADNCSGFLGVRPKSACASTNEEKAKNAKLKQKRRKIKTEPKQMHEDYCFQCGDGGELVMCDKKDCPKAYHLLCLNLTQPPYGKWECPWHQCDECSSAAVSFCEFCPHSFCKDHEKGALVPSALEGRLCCSEHDPMAPVSPEYWSKIKCKWESQDHGEEVKE

SEQ ID NO: 284708 - DNA, 4281 bp, Artificial Sequence
  derived and/or modified sequence
atggacttcagcttcagcttcatgcagggcatcatgggcaacaccatccagcagcccccccagctgatcgacagcgccaacatcagacaggaggacgccttcgacaacaacagcgacatcgccgaggacggcggccagaccccctacgaggccaccctgcagcagggcttccagtaccccgccaccaccgaggacctgccccccctgaccaacggctaccccagcagcatcagcgtgtacgagacccagaccaagtaccagagctacaaccagtaccccaacggcagcgccaacggcttcggcgccgtgagaaacttcagccccaccgactactaccacagcgagatccccaacaccagaccccacgagatcctggagaagcccagccccccccagcccccccccccccccagcgtgccccagaccgtgatccccaagaagaccggcagccccgagatcaagctgaagatcaccaagaccatccagaacggcagagagctgttcgagagcagcctgtgcggcgacctgctgaacgaggtgcaggccagcgagcacaccaagagcaagcacgagagcagaaaggagaagagaaagaagagcaacaagcacgacagcagcagaagcgaggagagaaagagccacaagatccccaagctggagcccgaggagcagaacagacccaacgagagagtggacaccgtgagcgagaagcccagagaggagcccgtgctgaaggaggaggcccccgtgcagcccatcctgagcagcgtgcccaccaccgaggtgagcaccggcgtgaagttccaggtgggcgacctggtgtggagcaaggtgggcacctacccctggtggccctgcatggtgagcagcgacccccagctggaggtgcacaccaagatcaacaccagaggcgccagagagtaccacgtgcagttcttcagcaaccagcccgagagagcctgggtgcacgagaagagagtgagagagtacaagggccacaagcagtacgaggagctgctggccgaggccaccaagcaggccagcaaccacagcgagaagcagaagatcagaaagcccagaccccagagagagagagcccagtgggacatcggcatcgcccacgccgagaaggccctgaagatgaccagagaggagagaatcgagcagtacaccttcatctacatcgacaagcagcccgaggaggccctgagccaggccaagaagagcgtggccagcaagaccgaggtgaagaagaccagaagacccagaagcgtgctgaacacccagcccgagcagaccaacgccggcgaggtggccagcagcctgagcagcaccgagatcagaagacacagccagagaagacacaccagcgccgaggaggaggagcccccccccgtgaagatcgcctggaagaccgccgccgccagaaagagcctgcccgccagcatcaccatgcacaagggcagcctggacctgcagaagtgcaacatgagccccgtggtgaagatcgagcaggtgttcgccctgcagaacgccaccggcgacggcaagttcatcgaccagttcgtgtacagcaccaagggcatcggcaacaagaccgagatcagcgtgagaggccaggacagactgatcatcagcacccccaaccagagaaacgagaagcccacccagagcgtgagcagccccgaggccaccagcggcagcaccggcagcgtggagaagaagcagcagagaagaagcatcagaaccagaagcgagagcgagaagagcaccgaggtggtgcccaagaagaagatcaagaaggagcaggtggagaccgtgccccaggccaccgtgaagaccggcctgcagaagggcgccagcgagatcagcgacagctgcaagcccctgaagaagagaagcagagccagcaccgacgtggagatgaccagcagcgcctacagagacaccagcgacagcgacagcagaggcctgagcgacctgcaggtgggcttcggcaagcaggtggacagccccagcgccaccgccgacgccgacgtgagcgacgtgcagagcatggacagcagcctgagcagaagaggcaccggcatgagcaagaaggacaccgtgtgccagatctgcgagagcagcggcgacagcctgatcccctgcgagggcgagtgctgcaagcacttccacctggagtgcctgggcctggccagcctgcccgacagcaagttcatctgcatggagtgcaagaccggccagcacccctgcttcagctgcaaggtgagcggcaaggacgtgaagagatgcagcgtgggcgcctgcggcaagttctaccacgaggcctgcgtgagaaagttccccaccgccatcttcgagagcaagggcttcagatgcccccagcactgctgcagcgcctgcagcatggagaaggacatccacaaggccagcaagggcagaatgatgagatgcctgagatgccccgtggcctaccacagcggcgacgcctgcatcgccgccggcagcatgctggtgagcagctacatcctgatctgcagcaaccacagcaagagaagcagcaacagcagcgccgtgaacgtgggcttctgcttcgtgtgcgccagaggcctgatcgtgcaggaccacagcgaccccatgttcagcagctacgcctacaagagccactacctgctgaacgagagcaacagagccgagctgatgaagctgcccatgatccccagcagcagcgccagcaagaagaagtgcgagaagggcggcagactgctgtgctgcgagagctgccccgccagcttccaccccgagtgcctgagcatcgagatgcccgagggctgctggaactgcaacgactgcaaggccggcaagaagctgcactacaagcagatcgtgtgggtgaagctgggcaactacagatggtggcccgccgagatctgcaaccccagaagcgtgcccctgaacatccagggcctgaagcacgacctgggcgacttccccgtgttcttcttcggcagccacgactactactgggtgcaccagggcagagtgttcccctacgtggagggcgacaagagcttcgccgagggccagaccagcatcaacaagaccttcaagaaggccctggaggaggccgccaagagattccaggagctgaaggcccagagagagagcaaggaggccctggagatcgagaagaacagcagaaagccccccccctacaagcacatcaaggccaacaaggtgatcggcaaggtgcagatccaggtggccgacctgagcgagatccccagatgcaactgcaagcccgccgacgagaacccctgcggcctggagagcgagtgcctgaacagaatgctgcagtacgagtgccacccccaggtgtgccccgccggcgacagatgccagaaccagtgcttcaccaagagactgtaccccgacgccgagatcatcaagaccgagagaagaggctggggcctgagaaccaagagaagcatcaagaagggcgagttcgtgaacgagtacgtgggcgagctgatcgacgaggaggagtgcagactgagaatcaagagagcccacgagaacagcgacagaatcatcgacgccggccccaagggcaactacagcagattcatgaaccacagctgcaaccccaactgcgagacccagaagtggaccgtgaacggcgacgtgagagtgggcctgttcgccctgtgcgacatccccgccggcatggagctgaccttcaactacaacctggactgcctgggcaacggcagaaccgagtgccactgcggcgccgacaactgcagcggcttcctgggcgtgagacccaagagcgcctgcgccagcaccaacgaggagaaggccaagaacgccaagctgaagcagaagagaagaaagatcaagaccgagcccaagcagatgcacgaggactactgcttccagtgcggcgacggcggcgagctggtgatgtgcgacaagaaggactgccccaaggcctaccacctgctgtgcctgaacctgacccagcccccctacggcaagtgggagtgcccctggcaccagtgcgacgagtgcagcagcgccgccgtgagcttctgcgagttctgcccccacagcttctgcaaggaccacgagaagggcgccctggtgcccagcgccctggagggcagactgtgctgcagcgagcacgaccccatggcccccgtgagccccgagtactggagcaagatcaagtgcaagtgggagagccaggaccacggcgaggaggtgaaggagtag

SEQ ID NO: 284709 - DNA, 4281 bp, Artificial Sequence
  derived and/or modified sequence
atggatttctcattttcattcatgcagggaatcatgggaaatacaatccagcaaccaccacagctgatagattctgcaaacattcggcaggaggacgccttcgacaataattccgacattgccgaggatggagggcagacgccttatgaggcaacactgcagcagggattccagtacccggcaacaacggaggatcttccacccttgaccaacggatacccgtcctccatatcggtgtacgagacccagacgaagtaccaatcttacaaccagtaccccaatggttctgctaatgggtttggagctgttcggaacttcagccctactgactattaccacagtgagatccccaacaccaggccccacgagatcctggaaaaaccatctcccccccaacctccgccccctccttccgtgccccaaactgttattccaaagaaaacggggtcacctgagattaaattgaagattacgaagaccattcagaacggacgggagttattcgagtcttctctgtgtggtgatttactgaatgaagtgcaggcctctgaacacactaagtccaagcacgagtctcggaaagaaaagagaaagaagtccaataagcacgactccagtaggtccgaggagagaaaatcacataaaattcccaagctggagccagaggaacaaaatcgccccaatgaaagagtagacacagtgagcgagaagccccgagaagagcctgtgctgaaagaggaggcccccgtgcagccgatcctcagttcagtgcccacgacagaggtgtccaccggggtgaagtttcaggtcggtgatctggtctggagtaaggtggggacttacccctggtggccatgtatggtatcttccgacccgcagctcgaggtgcataccaaaatcaatacccgcggggcacgggaatatcacgtccagtttttcagcaaccagcccgagcgcgcgtgggtgcacgagaagagggtgagagagtacaagggtcacaagcagtatgaagagcttctagccgaggccacaaagcaggcaagtaatcacagcgagaagcagaaaattcgaaagccccgaccccagagggagcgcgcccagtgggatatcgggatcgcccatgctgagaaggccctgaagatgactagagaagaacgtatcgaacagtacacattcatttacatcgataagcagcctgaggaggcattgtcccaggccaagaaatcggttgcctctaaaaccgaagtgaagaagacaagacgtcctcgcagtgtcctcaacactcagcctgaacagactaacgctggcgaggtggcctcttccctttcttccactgaaatcaggagacattcccaacggcgccatacttccgctgaggaggaggagcctcctcccgttaaaatcgcgtggaagactgcagccgccaggaagtcactgccagctagcattacaatgcataaagggtccctcgatttgcaaaagtgcaatatgagcccagtcgtgaaaatcgaacaggtctttgccctgcagaatgctaccggcgacggaaaattcatcgatcagtttgtgtactccacaaaaggcattggcaacaagacagagatttcagtgcgcggacaggaccggcttatcatatccactcccaatcaacggaacgaaaaacctactcagtccgtgtctagcccagaggccacctccggaagcacaggctccgtggaaaaaaaacagcagcggcgatccattaggactcgctcagaatccgaaaaatctactgaggtggtgccgaagaagaagatcaagaaggagcaggtagaaactgtgcctcaggccacagtaaaaacgggattacagaagggtgcctccgagatctctgactcttgcaagcccctcaaaaaaaggtctcgagctagcaccgacgtggaaatgacatcgagcgcctatagggacacgagcgatagcgactctaggggcttatccgatctccaggtgggattcggcaaacaggtggattccccgagtgccaccgccgatgcagatgtatcagatgtgcaatctatggactcctctctgagcagaaggggtacgggaatgagcaagaaagacaccgtgtgtcagatttgtgagtcatcaggagattctctgataccgtgcgagggcgaatgctgcaaacattttcatttggaatgtcttggactggctagcttacctgactctaagttcatatgtatggagtgcaaaacgggccaacatccctgtttttcctgcaaggtaagcgggaaggacgtgaagagatgctccgtgggcgcttgtggcaaattctaccatgaagcgtgtgtgaggaagtttcccacagcaatctttgagagcaaaggttttcggtgcccacagcactgctgcagtgcttgctccatggaaaaggacatccacaaggcctccaaaggtaggatgatgcggtgcctgcgctgccctgtggcttaccactccggcgatgcctgcattgcagccggatcaatgttggtatcatcttacatcctgatttgttcaaatcattcaaagaggtcatcaaattcatcagctgtgaatgtaggattctgctttgtgtgcgccaggggattgatcgttcaggatcactcagatcccatgttttcatcttatgcatacaaatcccactaccttctcaacgagtcaaaccgagccgagcttatgaagttgcccatgataccaagttccagcgcctccaagaaaaagtgtgaaaaaggaggtcgcttgctctgttgcgagtcgtgtcccgcctctttccaccctgaatgtctgagtatcgagatgcctgagggatgctggaattgcaacgactgcaaggctggaaagaaactccattacaaacagatagtttgggtgaagctgggtaactaccggtggtggcctgcagagatttgtaacccacggtccgtccctctgaatatacagggactcaagcacgacctcggcgacttccctgtgtttttcttcgggtctcatgactactattgggtccaccagggccgtgtgttcccctacgtagagggcgacaagtcctttgctgaaggacagacatcaataaacaagacttttaaaaaggcattggaagaagcagctaaaaggttccaggaactgaaggcccagagagaaagcaaggaggcactggaaattgagaagaattcacgcaaaccaccgccttacaaacacataaaagcgaacaaggtcatcgggaaggtccagatacaagttgcagatctctccgagatccctaggtgtaattgcaaaccggccgatgaaaatccttgcgggctcgaaagtgagtgtctgaacagaatgctgcaatatgagtgccacccacaggtgtgtccagcaggtgatcgatgccagaaccagtgtttcacaaagcggctttatcctgacgccgagataattaagaccgagcgccgagggtggggcctgaggacaaagcggagcattaaaaaaggcgagttcgtcaacgaatatgtaggagagctcattgacgaggaagagtgccgcctacgtattaagcgggcccacgagaattccgaccgaatcattgatgcgggcccaaaggggaattactctcgcttcatgaaccactcgtgcaaccccaactgcgagactcaaaagtggactgtgaacggggatgtacgcgtgggtctctttgcactgtgcgatatccctgccgggatggagctcacgtttaactataatctggactgtctagggaacggtcgaacagaatgccattgcggcgccgataattgctccgggtttttaggagtcagacccaagagcgcctgcgcctccaccaacgaggagaaagccaagaacgcaaaactcaaacagaagaggagaaagataaagacagaacccaaacagatgcacgaggattattgctttcagtgtggagacggcggcgagttggtgatgtgcgacaaaaaggactgcccaaaagcctatcacctcctgtgcctgaacctgacgcagcccccctacggcaaatgggaatgcccatggcatcaatgcgatgaatgttcaagcgctgcagtctcgttctgcgaattttgtccgcatagtttctgtaaggatcacgaaaaaggagcgcttgttccttctgccctggaaggccggttgtgctgctcggagcatgacccgatggcccctgtcagcccagaatactggagcaagattaaatgcaagtgggaaagtcaggatcatggggaggaggtgaaagaatag

SEQ ID NO: 284710 - DNA, 4281 bp, Artificial Sequence
  derived and/or modified sequence
atggacttctccttctccttcatgcagggcatcatgggcaacaccatccagcagcccccccagctgattgattctgccaacatccggcaggaggatgcctttgacaacaacagcgacattgctgaagatggcggccagaccccctatgaggccaccctgcagcagggcttccagtacccagccaccacagaggacctgccccccctgaccaacggctaccccagcagcatctctgtgtatgagacccagaccaagtaccagagctacaaccagtaccccaacggcagcgccaacggctttggagctgtgaggaacttcagccccacagactactaccacagcgagatccccaacacccggccccatgagatcctggagaagcccagccccccccagcccccacctccacccagcgtgccccagaccgtcatccccaagaagacaggcagccctgagatcaagctgaagatcaccaagaccatccagaatggccgggagctgtttgagagcagcctgtgtggggacctgctgaatgaggtgcaggccagcgagcacaccaagagcaagcatgagagcaggaaggagaagaggaagaagagcaacaagcatgacagcagccgctctgaggagaggaagagccacaagatccccaagctggagcctgaggagcagaaccggcccaatgaaagagtggacacagtgtctgagaagccccgggaggagcctgtgctgaaggaggaggcccctgtgcagcccatcctgagctctgtgcccaccacagaggtgtccactggagtgaagttccaggtgggggacctggtgtggagcaaggtgggcacctacccctggtggccctgcatggtgtccagtgacccccagctggaggtgcacaccaagatcaacaccaggggggcccgggagtaccacgtgcagttcttcagcaaccagcctgagcgggcctgggtgcatgagaagagggtgcgggagtacaagggccacaagcagtatgaggagctgctggccgaggccaccaagcaggccagcaaccacagcgagaagcagaagatcaggaagccccggccccagcgggagcgggcccagtgggacatcggcatcgcccatgctgagaaggccctgaagatgacccgggaggagagaattgagcagtacaccttcatctacatcgacaagcagcctgaggaggccctgagccaggccaagaagtctgtggccagcaagacagaggtgaagaagacccggcggcccaggtctgtgctgaacacccagcctgagcagaccaatgctggggaggtggccagcagcctgagcagcacagagatccgccgccacagccagaggaggcacaccagcgctgaggaggaggagcccccacctgtgaagatcgcctggaagacagctgctgccaggaagagcctgcctgccagcatcaccatgcacaagggcagcctggacctgcagaagtgcaacatgagccctgtggtgaagattgagcaggtgtttgccctgcagaatgccactggagatggcaagttcatcgaccagtttgtgtacagcaccaagggcatcggcaacaagacagagatctctgtgcggggccaggacaggctcatcatcagcacccccaaccagagaaatgagaagcccacccagagcgtgagcagccctgaggccaccagcggcagcactggatctgtggagaagaagcagcagaggaggagcatccgcaccaggtctgagagcgagaagagcacagaggtggtgcccaagaagaagatcaagaaggagcaggtggagaccgtgccccaggccaccgtgaagacaggcctgcagaagggggccagcgagatcagtgacagctgcaagcccctgaagaagaggagccgggccagcacagatgtggagatgaccagcagcgcctacagagacaccagtgacagcgacagccggggcctgagtgacctgcaggtgggctttgggaagcaggtggacagccccagcgccacagcagatgctgatgtgtctgatgtgcagagcatggacagcagcctgagccggcggggcaccggcatgagcaagaaggacacagtgtgccagatctgtgagagcagcggggacagcctcatcccctgtgagggggagtgctgcaagcacttccacctggagtgcctgggcctggccagcctgcctgacagcaagttcatctgcatggagtgcaagacaggccagcacccctgcttcagctgcaaggtgtctgggaaggatgtgaagcgctgcagcgtgggcgcctgtgggaagttctaccacgaggcctgtgtgaggaagttccccacagccatctttgagagcaagggcttccgctgcccccagcactgctgcagcgcctgcagcatggagaaggacatccacaaggccagcaaaggaaggatgatgcgctgcctgcgctgccctgtggcctaccacagcggagatgcctgcatcgctgctggctccatgctggtgagcagctacatcctgatctgcagcaaccacagcaagaggagcagcaacagcagcgctgtgaatgtgggcttctgctttgtgtgtgcccggggcctgattgtgcaggaccacagcgaccccatgttcagcagctatgcctacaagagccactacctgctgaatgaaagcaacagagctgagctgatgaagctgcccatgatccccagcagcagcgccagcaagaagaagtgtgagaagggcggccgcctgctgtgctgtgagagctgcccagccagcttccaccctgagtgcctgagcattgagatgcctgagggctgctggaactgcaatgactgcaaggccggcaagaagctgcactacaagcagatcgtgtgggtgaagctgggcaactaccgctggtggccagctgagatctgcaaccccaggtctgtgcccctgaacatccagggcctgaagcatgacctgggggacttccctgtgttcttcttcggcagccatgactactactgggtgcaccagggccgggtcttcccctacgtggagggggacaagagctttgctgagggccagaccagcatcaacaagaccttcaagaaggccctggaggaggccgccaagcgcttccaggagctgaaggcccagcgggagagcaaggaggccctggagattgagaagaacagcaggaagcccccaccctacaagcacatcaaggccaacaaggtgattggcaaggtgcagatccaggtggccgacctgtctgagatcccccgctgcaactgcaagccagcagatgagaacccctgtggcctggagagtgaatgtctgaacaggatgctgcagtatgagtgccacccccaggtgtgcccagctggggaccgctgccagaaccagtgcttcaccaagaggctgtacccagatgctgagatcatcaagacagagcggcggggctggggcctgcggaccaagaggagcatcaagaagggggagtttgtgaatgaatatgtgggggagctgattgatgaggaggagtgccgcctgcgcatcaagagggcccatgaaaattctgaccgcatcattgatgctggccccaagggcaactacagccgcttcatgaaccacagctgcaaccccaactgtgagacccagaagtggacagtgaatggagatgtgcgggtgggcctgtttgccctgtgtgacatcccagctggcatggagctgaccttcaactacaacctggactgcctgggcaatggaagaacagagtgccactgtggggctgacaactgcagcggcttcctgggcgtgcggcccaagagcgcctgtgccagcaccaatgaggagaaggccaagaatgccaagctgaagcagaagaggaggaagatcaagacagagcccaagcagatgcatgaggactactgcttccagtgtggagatggaggagagctggtgatgtgtgacaagaaggactgccccaaggcctaccacctgctgtgcctgaacctgacccagcccccctacggcaagtgggagtgcccctggcaccagtgtgatgagtgcagcagcgctgctgtgtccttctgtgagttctgcccccacagcttctgcaaggaccacgagaagggggccctggtgcccagcgccctggagggccgcctgtgctgcagcgagcatgaccccatggcccctgtgtccccagagtactggagcaagatcaagtgcaagtgggagagccaggaccacggggaggaggtgaaggagtag

SEQ ID NO: 284711 - DNA, 4281 bp, Artificial Sequence
  derived and/or modified sequence
atggacttcagcttcagcttcatgcagggcatcatgggcaacaccatccaacagcccccacagctcattgattctgctaacataagacaggaagatgccttcgataataacagcgatatcgctgaggacgggggtcagacaccctacgaggctacactgcagcagggctttcaataccccgcaacaacagaagatctgccacccctcaccaacggctatcctagcagcatcagtgtgtacgagactcagaccaagtatcagtcatataatcagtatccaaatggcagcgctaacggtttcggtgccgtgaggaacttcagtcccactgactattatcacagtgagatccccaatacacggccccatgaaatcctcgaaaaaccttcccccccccagccgcccccgccaccaagcgtcccacagaccgtgatccccaaaaagaccggctcgcctgagattaagctaaagattaccaaaactatacaaaatggccgagagctattcgaaagcagcctttgcggagacttattaaatgaggtgcaggcctctgagcacaccaaaagtaaacacgaatcgaggaaggaaaagaggaagaaaagtaataaacacgactcgtctcgttccgaagagcgaaaatctcacaaaattcctaaacttgaaccggaagagcagaatcgtccaaatgaacgagtggacactgtgtccgagaagcctcgggaggagccagttttgaaagaagaagccccggtgcaaccaatactgtcaagtgttcctacaactgaagtttccaccggcgtcaaattccaggtcggagatcttgtgtggagcaaagtggggacatatccttggtggccttgtatggtgtcctctgatccccaactggaagtccataccaagattaatacaaggggtgcccgtgaatatcacgtgcaattcttctccaaccagccagagagggcctgggttcatgagaagcgggtgagggagtataaggggcacaagcagtacgaagaactgttggcagaggccacaaaacaggcttccaaccatagtgagaaacagaagataagaaaacctcggcctcagcgggaacgagcccaatgggatatcggaatcgcccatgctgagaaagcactgaaaatgactagggaagaacgcatcgagcagtacaccttcatctatatcgataagcaacccgaagaagccctgtcacaggccaaaaaatccgttgcttctaagacagaagtgaagaagactcggaggccaaggtctgtgctcaacacccagcccgaacagaccaatgcgggagaagtggcatcctctttgtcaagtaccgaaattcgtaggcacagccagagacggcacacaagcgccgaagaagaggaacccccgcctgtgaagattgcttggaagaccgcagccgcgaggaaatcccttcctgctagcatcaccatgcataaagggagcctggacctccagaaatgtaacatgtcgccggtggtgaagatcgaacaggtctttgcattacagaacgccactggtgacgggaaattcatcgaccagtttgtctattcaacaaaagggataggcaataaaacagagatctctgtgagagggcaggacaggctaattatctcaacgccaaaccaacgcaatgaaaaaccaacccaatcggtgtcttcccccgaggctacaagtgggagtaccggctcagtggaaaagaagcagcagagaaggtcgatcagaacaaggtcggagagcgaaaaaagcaccgaggtggtgcccaagaaaaagatcaaaaaagagcaggttgagacagtgcctcaggccacagtgaagactggcttacagaagggcgcatctgagatatccgattcatgcaagcctctcaagaaacggtcccgggccagcacagatgtcgagatgaccagcagcgcgtaccgggatacttcagattctgatagtagaggcctgtctgacctgcaggtgggctttggcaagcaggtggactcaccaagcgctactgctgatgccgacgtctcagatgtccagtccatggactcctccctgtcccgacggggcaccggcatgtccaaaaaagacacggtgtgtcagatatgcgaaagctcaggagatagcttgataccatgtgagggcgagtgttgcaaacacttccacctcgagtgtctggggctggccagtctgcccgatagcaaattcatatgcatggagtgtaagacaggacagcacccctgtttttcctgcaaagtttccggcaaagatgtcaagcgttgctcagtgggagcgtgcgggaagttctaccatgaggcctgcgtacgaaaatttcctacggctatctttgagtcaaaggggtttagatgtcctcagcactgctgcagcgcctgcagcatggaaaaagacattcataaagcctcaaaaggcagaatgatgaggtgtctgcggtgcccagtggcatatcactccggcgatgcctgcatcgccgctggatctatgcttgtctcatcctacatcctcatttgctccaatcattctaaacgctcctcaaacagctctgccgtgaatgtaggtttctgttttgtgtgcgcccgcggactgatcgtccaagatcatagcgaccctatgttctcttcatacgcttataagtcgcattacctcttgaacgagagcaaccgcgccgagctcatgaagcttccaatgattccctccagcagtgcttctaagaaaaaatgcgagaaaggagggaggttgctgtgttgcgaatcatgtccagcgagttttcatcctgaatgtctctcaatcgaaatgccggagggctgctggaactgcaatgactgcaaggccggcaaaaagttacattacaaacagatcgtctgggttaagctcggaaattaccggtggtggcccgcggaaatttgcaatccccgttcagtgccactgaacattcaggggctgaagcatgatctcggcgatttccccgtgttcttctttggctcccatgactactactgggtgcaccaagggagggtctttccctacgtcgaaggcgacaagtcttttgcggagggccaaacaagcattaacaaaacgttcaaaaaagcactggaggaggcggccaaaagatttcaggaactgaaggctcaacgtgaatccaaagaagcactcgaaatcgaaaagaattcccgcaaacctcccccatacaaacacatcaaagccaacaaagttattggtaaagtccagattcaggtggcagacctgtctgagatccctagatgcaattgtaagccagccgatgaaaatccatgtggcctggaaagcgagtgcctgaaccgtatgctgcagtacgagtgccatccgcaggtttgtcccgcaggggatcgttgccagaatcagtgcttcaccaaaaggctgtacccggacgcggagattataaagacagagcggcggggctggggtctgcgcaccaagcggtcgatcaagaaaggggagttcgtaaacgaatacgtgggagaattaattgatgaggaggaatgtaggctgaggattaaaagggcacacgaaaacagcgatcgtattatcgatgcggggccaaaagggaattattctcgtttcatgaatcactcgtgcaaccccaactgcgaaactcaaaagtggacggtcaacggagatgtgcgcgtcggactgtttgcgctttgcgatatcccagctggcatggagctgaccttcaactataatttggattgtttgggcaacggtagaacagagtgtcactgcggggctgataactgcagcgggtttctgggggtccgaccgaaatctgcctgtgccagcacgaacgaggaaaaagccaagaatgctaaattgaagcagaagaggcgcaaaataaaaaccgagcctaaacagatgcacgaggattattgttttcaatgcggggatgggggagagctcgtgatgtgtgacaaaaaggactgtcctaaagcatatcatcttctgtgcctgaatctcacacagcctccctacgggaaatgggagtgtccatggcatcagtgcgacgagtgtagctccgctgccgtgtccttctgcgaattttgtcctcatagcttttgcaaggatcatgaaaagggcgctctagtgccgagcgcactggaggggagactgtgttgttctgaacacgatccaatggcccccgtgtcaccggagtactggagtaagattaaatgtaaatgggagagtcaggatcatggggaagaggtgaaggagtag

SEQ ID NO: 284712 - DNA, 4281 bp, Artificial Sequence
  derived and/or modified sequence
atggacttctccttttcatttatgcagggcatcatgggcaacacgatacaacaaccaccacagctgattgatagcgctaacatcagacaggaggacgccttcgataataactctgacatcgctgaggatggtggtcagaccccctacgaggctacgttgcagcagggatttcaatatccagccaccacagaggatctgcctccgctgaccaacggctacccgagctctatatccgtttacgaaacacaaacaaagtaccagtcttacaatcagtaccctaatgggtcagccaatgggttcggggctgtcaggaatttctctcctactgattattaccattccgaaataccaaacaccagaccccatgagattctggagaagccgtcacctcctcagcccccaccacccccttcagtcccccagactgtgatccctaagaaaactggttccccagagatcaagttgaaaataaccaagaccatccaaaacggtcgggaattgtttgagagctccttatgcggcgaccttctgaacgaggttcaggcatcggagcacacaaaatccaagcacgagagccggaaggagaagcggaaaaagtccaataaacacgattccagcaggtccgaggaacgaaaaagccacaagattcctaagcttgagccagaagagcagaatcgccctaatgagcgcgtcgataccgtgagcgaaaagcccagggaggaaccagtgctgaaggaggaggcgcctgttcaaccaatcctcagttccgtgcccactaccgaagtatctaccggagtaaagttccaagttggggaccttgtctggtcaaaagtggggacctacccctggtggccctgcatggtgagttctgatcctcagttagaagtccacaccaaaattaacacaaggggggcaagagaatatcatgtccagttcttcagtaaccagccggaacgcgcatgggttcacgagaaacgcgtgagagaatacaaagggcacaaacaatatgaggaactcctggctgaggcaacaaagcaagccagtaaccactcggagaagcaaaagattcggaagcccaggccacagagagagcgggctcagtgggacatagggattgctcatgcagagaaggccctgaagatgacaagagaagagcgaatcgaacagtatacctttatttacattgataagcagccagaggaggccttaagccaggcaaagaagagcgtggctagcaagaccgaggtcaagaaaacacggagacccagaagcgtcttaaatactcagcccgagcagacaaatgcgggagaggtggcttcttcgctaagcagcaccgagattaggaggcactcacagagaaggcacacttcagccgaagaggaagagccacctcccgtcaagattgcatggaaaactgccgcagccagaaaatctcttccagcctccataacaatgcacaagggcagcctcgatcttcagaaatgcaacatgagcccagtcgtgaaaatagaacaggtgtttgctctgcagaacgcaaccggagacgggaaatttattgatcaattcgtgtatagtactaaggggatcgggaacaagaccgaaattagcgtgagaggacaggatcggttaatcatcagtactcctaaccaaagaaacgagaaaccaactcaatccgtgagttcaccagaagcgaccagcgggtccacggggtccgtcgagaagaaacagcagcggaggtccattcgcactcgttccgaaagcgagaaatctacagaggtcgtgccaaagaagaagataaaaaaggaacaggtcgaaaccgtccctcaagcgactgtgaaaactggcctgcagaagggtgcatctgagatttccgactcttgtaaacctttaaaaaagagatcccgagcttccactgatgtggaaatgactagctctgcctatcgagatacaagcgattctgacagccgtggtctctccgatttacaggtgggctttggaaagcaggtggattctccatcagctaccgctgacgcagatgtgtctgatgtgcagtctatggactccagtctgtctcgaagaggcacaggcatgtctaagaaggacacagtctgccagatttgcgagtcctctggggactccttaatcccatgtgagggcgagtgctgtaaacacttccacttagagtgcctgggcctggcatctctccctgactcaaaattcatctgcatggagtgtaaaaccggtcaacatccctgcttttcctgcaaggtgtctggcaaggacgttaaacgctgttctgtgggtgcctgcggcaagttctatcacgaggcctgtgtgcgaaagttcccgacagctattttcgagtctaagggttttagatgcccacagcattgctgttctgcatgtagcatggagaaagatatacacaaggcaagtaagggaagaatgatgcgatgtctcaggtgtcccgtcgcataccactcaggagacgcctgtatcgccgctgggtccatgctggttagctcgtatatcctgatctgttccaatcactctaagcgttccagtaatagtagcgctgtcaacgtgggattctgttttgtgtgcgctaggggcctcatcgtccaggaccacagtgatcctatgtttagctcttacgcttacaaatctcactacctcctcaatgaatccaaccgtgccgagctgatgaagctgccgatgatcccctcaagctcagcgtccaaaaagaagtgcgagaagggcggaagattattatgttgcgaatcgtgccctgccagcttccacccagaatgcctgagcattgagatgcccgaagggtgctggaactgtaatgattgcaaagctggtaaaaaactacactacaaacagattgtctgggtgaagttgggaaattaccgctggtggcccgctgaaatctgtaatcccagatccgtaccgcttaatattcagggtctcaagcatgatctcggcgacttccccgtgtttttctttggcagccatgattactactgggtgcatcagggtagagtattcccctacgtggaaggagataagagcttcgccgaaggccaaacctcaattaacaaaacatttaagaaggcacttgaggaagcagctaagcgctttcaggagctgaaagctcagagggagtcgaaagaggctctggagatcgagaaaaactcgcgaaaaccccctccgtacaaacatatcaaggctaacaaggtgatcggtaaagttcagattcaggttgcagatttgagcgaaattccaagatgcaattgcaagcctgcggacgagaacccttgcggattggagagtgaatgtctcaaccggatgctccagtacgagtgccatccacaggtatgtccagccggagatagatgtcagaatcagtgcttcactaagcgtctttatccggatgccgagatcattaaaacagagagaagggggtggggcctccgtaccaaacgcagcattaaaaagggggaattcgtgaatgagtatgtcggcgaattaatagacgaggaagagtgtcggttgcggatcaaaagagcccatgagaattccgacaggataattgatgccggacccaaaggtaactactccaggttcatgaatcactcttgcaatcccaactgcgagacccagaaatggaccgtgaacggggacgttcgagtaggactctttgcactttgcgacatccctgccggaatggagttaacattcaattataatctggactgcctggggaacggcagaactgagtgtcattgcggggcagacaattgctctgggttccttggtgttagacccaagagtgcctgcgcgtctaccaacgaggaaaaggccaagaacgcgaaactgaagcagaagcggagaaaaattaagactgaacccaagcagatgcacgaggactactgcttccaatgcggggatgggggagaactcgtaatgtgtgacaaaaaggactgtcctaaggcctatcatctcctgtgtctgaatcttacccagcctccatatggcaaatgggaatgtccatggcatcagtgtgatgagtgtagcagcgccgcagttagcttttgtgaattttgtcctcactccttttgcaaggatcatgaaaaaggcgcactcgtgccgagtgcactggaaggaaggttgtgttgttccgaacatgaccccatggcccctgtctctcccgaatactggagtaagatcaaatgcaagtgggagtctcaggatcatggggaggaggtgaaagagtag

SEQ ID NO: 284713 - DNA, 4471 bp, Artificial Sequence
  derived and/or modified sequence
tgtgatcgcactgacacggccggggggttagaatggaacaaactgaaggcccgatgagagaaagggaaagttaaggatgctggagcagaacaatggatttctctttctctttcatgcaagggatcatgggaaacacaattcagcaaccacctcaactcattgactccgccaacatccgtcaggaggatgcctttgataacaacagtgacattgctgaagatggtggccagacaccatatgaagctactttgcagcaaggctttcagtacccagctacaacagaagatcttcctccactcacaaatgggtatccatcatcaatcagtgtgtatgaaactcaaaccaaataccagtcatataatcagtatcctaatgggtcagccaatggctttggtgcagttagaaactttagccccactgactattatcattcagaaattccaaacacaagaccacatgaaattctggaaaaaccttcccctccacagccaccacctcctccttcggtaccacaaactgtgattccaaagaagactggctcacctgaaattaaactaaaaataaccaaaactatccagaatggcagggaattgtttgagtcttccctttgtggagaccttttaaatgaagtacaggcaagtgagcacacgaaatcaaagcatgaaagcagaaaagaaaagaggaaaaaaagcaacaagcatgactcatcaagatctgaagagcgcaagtcacacaaaatccccaaattagaaccagaggaacaaaatagaccaaatgagagggttgacactgtatcagaaaaaccaagggaagaaccagtactaaaagaggaagccccagttcagccaatactatcttctgttccaacaacggaagtgtccactggtgttaagtttcaggttggcgatcttgtgtggtccaaggtgggaacctatccttggtggccttgtatggtttcaagtgatccccagcttgaggttcatactaaaattaacacaagaggtgcccgagaatatcatgtccagttttttagcaaccagccagagagggcgtgggttcatgaaaaacgggtacgagagtataaaggtcataaacagtatgaagaattactggctgaggcaaccaaacaagccagcaatcactctgagaaacaaaagattcggaaaccccgacctcagagagaacgtgctcagtgggatattggcattgcccatgcagagaaagcattgaaaatgactcgagaagaaagaatagaacagtatacttttatttacattgataaacagcctgaagaggctttatcccaagcaaaaaagagtgttgcctccaaaaccgaagttaaaaaaacccgacgaccaagatctgtgctgaatactcagccagaacagaccaatgcaggggaggtggcctcctcactctcaagtactgaaattcggagacatagccagaggcggcacacaagtgcggaagaggaagagccaccgcctgttaaaatagcctggaaaactgcggcagcaaggaaatccttaccagcttccattacgatgcacaaagggagcctggatttgcagaagtgtaacatgtctccagttgtgaaaattgaacaagtgtttgctcttcagaatgctacaggggatgggaaatttatcgatcaatttgtttattcaacaaagggaattggtaacaaaacagaaataagtgtcagggggcaagacaggcttataatttctacaccaaaccagagaaatgaaaagccaacgcagagtgtatcatctcctgaagcaacatctggttctacaggctcagtagaaaagaagcaacagagaagatcaattagaactcgttctgaatcagagaaatccactgaggttgtgccaaagaagaagatcaaaaaggagcaggttgaaacagttcctcaggctacagtgaagactggattacagaaaggtgccagcgagatttcagattcctgtaaacctctaaagaaaaggagtcgcgcctcaactgatgtagaaatgactagttcagcatacagagacacatctgactccgattctagaggactgagtgacctgcaggtaggctttggaaagcaagtagatagcccttcagctactgcagatgcagacgtttctgatgtgcagtccatggattcaagtttgtcgagaagaggcactggaatgagtaagaaggacactgtatgtcagatttgtgaaagctctggtgactctctgattccttgtgagggagagtgctgcaaacactttcacctggagtgcctgggattggcatcacttcctgatagcaagttcatctgcatggaatgtaaaactgggcagcacccatgtttttcgtgtaaagtgtctggtaaagatgtgaagcgttgttctgttggtgcttgtgggaaattttatcatgaagcctgtgtccgcaaattccccactgccatctttgaatcaaaaggattccgctgtcctcagcactgctgctctgcctgctctatggagaaagatatccacaaagcaagtaaaggccgcatgatgagatgtttaagatgtccagttgcctatcactctggagatgcttgcattgcggccggaagcatgttagtatcctcctacattctcatctgtagtaatcattccaaacggagcagtaattcttctgctgtaaatgtaggcttttgtttcgtttgtgccagagggctgatagttcaggaccattcagaccccatgttcagttcatatgcctataagtcccactacctactgaatgaatcaaatcgtgctgagttgatgaaattacctatgattccttcttcgtcagcttccaaaaagaaatgtgagaaaggtggaagattgctctgctgtgaatcgtgcccagcttccttccacccggaatgcctaagcatagaaatgccagaaggctgctggaattgtaatgactgtaaagctggcaagaaactacattacaagcagattgtttgggtcaaattgggaaattacagatggtggccagcagagatctgcaaccccaggtctgtgccactgaacatccagggccttaaacatgacttgggggacttccctgtattcttctttggttctcatgactactactgggtacaccagggcagagtgttcccttatgttgaaggagacaaaagctttgctgaagggcagactagtattaacaagaccttcaaaaaggcactggaagaagctgcaaaacgtttccaggaattgaaagcacaaagagaaagtaaagaagccctagagattgaaaaaaactcaagaaaaccccctccctacaaacacatcaaagctaacaaagtaataggaaaggtgcagatccaggttgctgacctgtcagagattccccgctgtaactgcaagccagctgatgaaaacccttgtggcttggaatcggagtgcctgaacagaatgttgcagtatgaatgccacccgcaggtgtgcccagctggagatcgttgtcagaaccagtgctttacaaagagactataccctgatgcagagatcatcaaaacggagcggagaggctggggcctcaggaccaaaaggagcattaagaagggtgaatttgtaaatgaatacgtcggtgaattaattgatgaagaagaatgcagattgcgaatcaagcgagcccacgagaacagtgaccgtataattgatgccggcccaaaaggaaattattctcgcttcatgaaccacagttgtaatcccaactgtgaaacacaaaagtggacagtgaatggagatgttcgagtgggactatttgctctctgtgatattcctgcagggatggagttaacatttaattataacctagattgtctgggcaacggcagaacggagtgccactgtggagcagataactgcagtggttttctaggagtgcggccaaagtcggcatgtgcgtcaacaaatgaagagaaggcaaaaaatgctaagttaaaacagaagagacgaaagatcaaaacagaaccaaagcagatgcatgaagattactgttttcaatgtggagatggtggagagctggtcatgtgtgacaaaaaagactgtcccaaagcataccacctcctatgccttaacctgactcagccaccatatggaaagtgggagtgtccgtggcatcagtgcgatgagtgcagcagtgcagctgtttccttctgtgaattctgtccacattcattttgtaaagatcatgaaaagggggccctggttccctctgcactggaaggccgcctctgctgctcggaacatgaccccatggctcctgtgtcaccagaatactggagcaagataaaatgtaaatgggaatcacaagatcatggagaagaagtaaaagaataaatgtgtggtgtcccctcctttctatttaagtgaaaaaagcaaatagatcatgcatttaaaaagaagagactgctacagtgcatacagcctttgccatc

SEQ ID NO: 284714 - protein, 1388 aa, Artificial Sequence
  derived and/or modified sequence
MDFSFSFMQGIMGNTIQQPPQLIDSANIRQEDAFDNNSDIAEDGGQTPYEATLQQGFQYPATTEDLPPLTNGYPSSISVYETQTKYQSYNQYPNGSANGFGAVRNFSPTDYYHSEIPNTRPHEILEKPSPPQPPPPPSVPQTVIPKKTGSPEIKLKITKTIQNGRELFESSLCGDLLNEVQASEHTKSKHESRKEKRKKSNKHDSSRSEERKSHKIPKLEPEEQNRPNERVDTVSEKPREEPVLKEEAPVQPILSSVPTTEVSTGVKFQVGDLVWSKVGTYPWWPCMVSSDPQLEVHTKINTRGAREYHVQFFSNQPERAWVHEKRVREYKGHKQYEELLAEATKQASNHSEKQKIRKPRPQRERAQWDIGIAHAEKALKMTREERIEQYTFIYIDKQPEEALSQAKKSVASKTEVKKTRRPRSVLNTQPEQTNAGEVASSLSSTEIRRHSQRRHTSAEEEEPPPVKIAWKTAAARKSLPASITMHKGSLDLQKCNMSPVVKIEQVFALQNATGDGKFIDQFVYSTKGIGNKTEISVRGQDRLIISTPNQRNEKPTQSVSSPEATSGSTGSVEKKQQRRSIRTRSESEKSTEVVPKKKIKKEQVETVPQATVKTGLQKGASEISDSCKPLKKRSRASTDVEMTSSAYRDTSDSDSRGLSDLQVGFGKQVDSPSATADADVSDVQSMDSSLSRRGTGMSKKDTVCQICESSGDSLIPCEGECCKHFHLECLGLASLPDSKFICMECKTGQHPCFSCKVSGKDVKRCSVGACGKFYHEACVRKFPTAIFESKGFRCPQHCCSACSMEKDIHKASKGRMMRCLRCPVAYHSGDACIAAGSMLVSSYILICSNHSKRSSNSSAVNVGFCFVCARGGRLLCCESCPASFHPECLSIEMPEGCWNCNDCKAGKKLHYKQIVWVKLGNYRWWPAEICNPRSVPLNIQGLKHDLGDFPVFFFGSHDYYWVHQGRVFPYVEGDKSFAEGQTSINKTFKKALEEAAKRFQELKAQRESKEALEIEKNSRKPPPYKHIKANKVIGKVQIQVADLSEIPRCNCKPADENPCGLESECLNRMLQYECHPQVCPAGDRCQNQCFTKRLYPDAEIIKTERRGWGLRTKRSIKKGEFVNEYVGELIDEEECRLRIKRAHENSVTNFYMLTVTKDRIIDAGPKGNYSRFMNHSCNPNCETQKWTVNGDVRVGLFALCDIPAGMELTFNYNLDCLGNGRTECHCGADNCSGFLGVRPKSACASTNEEKAKNAKLKQKRRKIKTEPKQMHEDYCFQCGDGGELVMCDKKDCPKAYHLLCLNLTQPPYGKWECPWHQCDECSSAAVSFCEFCPHSFCKDHEKGALVPSALEGRLCCSEHDPMAPVSPEYWSKIKCKWESQDHGEEVKE

SEQ ID NO: 284715 - DNA, 4167 bp, Artificial Sequence
  derived and/or modified sequence
atggacttcagcttcagcttcatgcagggcatcatgggcaacaccatccagcagcccccccagctgatcgacagcgccaacatcagacaggaggacgccttcgacaacaacagcgacatcgccgaggacggcggccagaccccctacgaggccaccctgcagcagggcttccagtaccccgccaccaccgaggacctgccccccctgaccaacggctaccccagcagcatcagcgtgtacgagacccagaccaagtaccagagctacaaccagtaccccaacggcagcgccaacggcttcggcgccgtgagaaacttcagccccaccgactactaccacagcgagatccccaacaccagaccccacgagatcctggagaagcccagccccccccagcccccccccccccccagcgtgccccagaccgtgatccccaagaagaccggcagccccgagatcaagctgaagatcaccaagaccatccagaacggcagagagctgttcgagagcagcctgtgcggcgacctgctgaacgaggtgcaggccagcgagcacaccaagagcaagcacgagagcagaaaggagaagagaaagaagagcaacaagcacgacagcagcagaagcgaggagagaaagagccacaagatccccaagctggagcccgaggagcagaacagacccaacgagagagtggacaccgtgagcgagaagcccagagaggagcccgtgctgaaggaggaggcccccgtgcagcccatcctgagcagcgtgcccaccaccgaggtgagcaccggcgtgaagttccaggtgggcgacctggtgtggagcaaggtgggcacctacccctggtggccctgcatggtgagcagcgacccccagctggaggtgcacaccaagatcaacaccagaggcgccagagagtaccacgtgcagttcttcagcaaccagcccgagagagcctgggtgcacgagaagagagtgagagagtacaagggccacaagcagtacgaggagctgctggccgaggccaccaagcaggccagcaaccacagcgagaagcagaagatcagaaagcccagaccccagagagagagagcccagtgggacatcggcatcgcccacgccgagaaggccctgaagatgaccagagaggagagaatcgagcagtacaccttcatctacatcgacaagcagcccgaggaggccctgagccaggccaagaagagcgtggccagcaagaccgaggtgaagaagaccagaagacccagaagcgtgctgaacacccagcccgagcagaccaacgccggcgaggtggccagcagcctgagcagcaccgagatcagaagacacagccagagaagacacaccagcgccgaggaggaggagcccccccccgtgaagatcgcctggaagaccgccgccgccagaaagagcctgcccgccagcatcaccatgcacaagggcagcctggacctgcagaagtgcaacatgagccccgtggtgaagatcgagcaggtgttcgccctgcagaacgccaccggcgacggcaagttcatcgaccagttcgtgtacagcaccaagggcatcggcaacaagaccgagatcagcgtgagaggccaggacagactgatcatcagcacccccaaccagagaaacgagaagcccacccagagcgtgagcagccccgaggccaccagcggcagcaccggcagcgtggagaagaagcagcagagaagaagcatcagaaccagaagcgagagcgagaagagcaccgaggtggtgcccaagaagaagatcaagaaggagcaggtggagaccgtgccccaggccaccgtgaagaccggcctgcagaagggcgccagcgagatcagcgacagctgcaagcccctgaagaagagaagcagagccagcaccgacgtggagatgaccagcagcgcctacagagacaccagcgacagcgacagcagaggcctgagcgacctgcaggtgggcttcggcaagcaggtggacagccccagcgccaccgccgacgccgacgtgagcgacgtgcagagcatggacagcagcctgagcagaagaggcaccggcatgagcaagaaggacaccgtgtgccagatctgcgagagcagcggcgacagcctgatcccctgcgagggcgagtgctgcaagcacttccacctggagtgcctgggcctggccagcctgcccgacagcaagttcatctgcatggagtgcaagaccggccagcacccctgcttcagctgcaaggtgagcggcaaggacgtgaagagatgcagcgtgggcgcctgcggcaagttctaccacgaggcctgcgtgagaaagttccccaccgccatcttcgagagcaagggcttcagatgcccccagcactgctgcagcgcctgcagcatggagaaggacatccacaaggccagcaagggcagaatgatgagatgcctgagatgccccgtggcctaccacagcggcgacgcctgcatcgccgccggcagcatgctggtgagcagctacatcctgatctgcagcaaccacagcaagagaagcagcaacagcagcgccgtgaacgtgggcttctgcttcgtgtgcgccagaggcggcagactgctgtgctgcgagagctgccccgccagcttccaccccgagtgcctgagcatcgagatgcccgagggctgctggaactgcaacgactgcaaggccggcaagaagctgcactacaagcagatcgtgtgggtgaagctgggcaactacagatggtggcccgccgagatctgcaaccccagaagcgtgcccctgaacatccagggcctgaagcacgacctgggcgacttccccgtgttcttcttcggcagccacgactactactgggtgcaccagggcagagtgttcccctacgtggagggcgacaagagcttcgccgagggccagaccagcatcaacaagaccttcaagaaggccctggaggaggccgccaagagattccaggagctgaaggcccagagagagagcaaggaggccctggagatcgagaagaacagcagaaagccccccccctacaagcacatcaaggccaacaaggtgatcggcaaggtgcagatccaggtggccgacctgagcgagatccccagatgcaactgcaagcccgccgacgagaacccctgcggcctggagagcgagtgcctgaacagaatgctgcagtacgagtgccacccccaggtgtgccccgccggcgacagatgccagaaccagtgcttcaccaagagactgtaccccgacgccgagatcatcaagaccgagagaagaggctggggcctgagaaccaagagaagcatcaagaagggcgagttcgtgaacgagtacgtgggcgagctgatcgacgaggaggagtgcagactgagaatcaagagagcccacgagaacagcgtgaccaacttctacatgctgaccgtgaccaaggacagaatcatcgacgccggccccaagggcaactacagcagattcatgaaccacagctgcaaccccaactgcgagacccagaagtggaccgtgaacggcgacgtgagagtgggcctgttcgccctgtgcgacatccccgccggcatggagctgaccttcaactacaacctggactgcctgggcaacggcagaaccgagtgccactgcggcgccgacaactgcagcggcttcctgggcgtgagacccaagagcgcctgcgccagcaccaacgaggagaaggccaagaacgccaagctgaagcagaagagaagaaagatcaagaccgagcccaagcagatgcacgaggactactgcttccagtgcggcgacggcggcgagctggtgatgtgcgacaagaaggactgccccaaggcctaccacctgctgtgcctgaacctgacccagcccccctacggcaagtgggagtgcccctggcaccagtgcgacgagtgcagcagcgccgccgtgagcttctgcgagttctgcccccacagcttctgcaaggaccacgagaagggcgccctggtgcccagcgccctggagggcagactgtgctgcagcgagcacgaccccatggcccccgtgagccccgagtactggagcaagatcaagtgcaagtgggagagccaggaccacggcgaggaggtgaaggagtag

SEQ ID NO: 284716 - DNA, 4167 bp, Artificial Sequence
  derived and/or modified sequence
atggacttctccttttcttttatgcaaggcatcatgggaaacactatccagcagccaccacagttaatcgattcagctaatatcagacaggaggatgcctttgacaacaactctgatatcgcagaagacggaggccagacaccctacgaggccaccctgcagcagggatttcagtatccagcaacaacagaagacctgcctcctctgacaaacggctacccgagctctatctcggtctacgagacccagactaaatatcaaagttataaccagtatccgaacggatctgccaacggatttggagccgtgcggaatttttcccctactgactattatcacagtgaaattccaaataccagaccccatgaaatcctggagaagccctcgcccccacaaccgccaccacccccttccgtgccacagactgtgatccctaaaaagactggaagtcccgagataaagctgaagatcacgaagacaattcagaatggacgcgaactgtttgaatccagtctgtgcggcgatcttctgaatgaggtgcaggcctctgagcacactaaaagcaaacatgagagcagaaaggagaagagaaaaaagagcaacaaacatgacagctctcggtccgaggaacgaaaatctcacaaaattcccaagctcgaaccagaagaacagaaccgcccaaatgagagagttgatacggtgagcgagaagcctagggaggagccggtgttgaaggaggaggctccagtgcagccaatcttaagttctgtgcccaccacggaagtaagcacaggcgttaaatttcaggtgggcgaccttgtgtggagcaaagtcgggacatacccctggtggccttgcatggtgtcttccgaccctcagttagaggtgcatactaagatcaatactcgaggcgcaagagagtaccatgtgcaatttttttcaaatcaaccggagcgagcctgggtccacgagaaacgggtgcgggaatataaaggacacaagcagtatgaagaactcctggcagaagcgacaaaacaggcgtctaaccattctgagaaacagaagattcggaagccaaggccacaacgcgaacgcgctcagtgggatataggcattgctcatgcagaaaaagccttgaagatgactagggaggagcgaatagaacagtatactttcatctacatcgataagcaaccggaggaggccttgtcccaagccaagaagtcagtagcatctaagaccgaagttaaaaaaacccgacggcctcgatccgtgctaaacactcaacccgagcaaactaatgctggcgaggtggcatctagtctctctagcacagaaattaggcgacacagccagcgaagacatacttctgccgaagaagaggagccaccacccgtgaaaatcgcgtggaagactgcagccgccaggaaaagcctgccagcttctatcaccatgcacaaaggctcactggacttacagaagtgtaacatgtctcctgtggttaagatcgagcaggtctttgctctccagaacgccacaggcgatggtaagtttatcgatcaattcgtgtatagcaccaaaggaattggtaacaaaaccgagatttcagtacgaggccaggaccggcttataatttccacccctaaccagagaaacgagaagccaactcagtctgtgtccagtccggaggcaacatccgggtctacaggcagtgtcgagaaaaagcagcagagaaggagcattcgcacgcgtagcgaaagtgaaaagtctactgaggttgtgcccaagaaaaaaatcaaaaaggagcaggtcgaaaccgtcccccaagctactgtgaaaaccgggcttcaaaaaggagcctcagaaatatctgattcctgtaaacccctgaagaaaaggagccgagcctccaccgacgtggagatgacttcttctgcttaccgggacacatcggacagcgactctcgaggactgtctgacttacaggtcgggtttgggaagcaagtggattccccttcagctaccgctgatgcggacgtgagcgacgtgcaatccatggatagtagtctttcacggcgaggcaccggaatgtctaaaaaagacaccgtttgccaaatatgcgagtcttctggggattccctgatcccgtgcgaaggggagtgctgcaagcactttcacctagagtgtcttggactggctagtctcccggattccaaattcatatgtatggaatgtaagactggacagcacccatgctttagttgcaaggtctctggcaaggacgtcaagaggtgcagcgtgggcgcctgcggcaagttttatcatgaggcgtgcgtgcggaaattccccaccgccatcttcgagagcaagggatttcgatgccctcagcattgctgctccgcatgttccatggaaaaagacatccacaaggccagtaagggacggatgatgcggtgtcttaggtgccccgtagcctatcactctggagatgcatgcatcgcggccgggagcatgctggtgtcgtcttatattttaatttgcagtaaccattccaagcgctcaagcaatagctccgcggtaaacgtcgggttctgtttcgtctgcgcaagaggcggcaggttgctgtgctgcgaatcctgcccggccagttttcacccagagtgcttgagcattgagatgcctgagggctgttggaactgtaacgattgtaaggccggcaaaaagctgcactacaaacaaattgtgtgggttaaattagggaattataggtggtggcccgctgaaatctgcaacccacggtctgtgccactcaacatccaaggcctcaaacacgatctgggagacttccctgtgtttttctttggctctcacgactattactgggtgcatcagggacgcgttttcccgtacgtggaaggggataagtcctttgccgaaggacagactagcatcaacaagactttcaaaaaggctctggaggaggccgccaagcgcttccaagagttaaaggcccaaagagaaagcaaggaggccctggagattgaaaagaattcacgcaaaccgcctccgtataagcacattaaggctaataaagtgatcggaaaagttcagatccaggtggccgatttgtctgagatcccccggtgcaattgcaaaccagccgacgagaatccctgtggtctggagagcgagtgtttaaatagaatgctccagtatgagtgtcaccctcaagtctgccccgccggcgataggtgtcagaaccagtgcttcactaagaggttgtatcctgatgccgagattattaaaaccgaaagaagaggatggggcctgaggactaagcgatctatcaaaaaaggagaattcgtcaatgaatatgtgggagaattgattgatgaggaagagtgcagattgcgaataaagcgcgcccacgagaattctgttaccaacttctatatgctcaccgtcacaaaggatcgcatcatcgatgcaggccccaagggaaattactcgcgcttcatgaaccactcatgtaatcctaattgcgaaacgcagaaatggactgttaacggcgacgtgcgcgtgggtctattcgctctttgcgatatcccagctgggatggaactgacattcaactataatctggactgtctaggcaatggcagaactgaatgccattgtggtgcagataactgcagcgggttcctgggcgtgcggcctaagtcagcatgcgcaagcaccaacgaggaaaaagctaaaaacgccaaattgaagcagaaacgccggaagatcaaaacagagcctaagcagatgcatgaagattactgttttcaatgcggcgacggcggggagctcgtgatgtgcgataaaaaggattgccccaaagcgtatcacctgctttgtttaaatctcacccaacctccatacgggaagtgggaatgcccttggcaccaatgtgacgagtgctccagtgcggctgtaagcttctgcgaattctgcccccattcgttttgtaaagaccacgagaagggtgcgctagtgccttccgcactggagggtagactgtgttgtagtgagcacgacccaatggctcccgtctctcccgaatactggtcgaagattaagtgcaagtgggagtcccaggaccacggggaggaggtgaaggagtag

SEQ ID NO: 284717 - DNA, 4167 bp, Artificial Sequence
  derived and/or modified sequence
atggacttctccttctccttcatgcagggcatcatgggcaacaccatccagcagcccccccagctgattgattctgccaacatccggcaggaggatgcctttgacaacaacagcgacattgctgaagatggcggccagaccccctatgaggccaccctgcagcagggcttccagtacccagccaccacagaggacctgccccccctgaccaacggctaccccagcagcatctctgtgtatgagacccagaccaagtaccagagctacaaccagtaccccaacggcagcgccaacggctttggagctgtgaggaacttcagccccacagactactaccacagcgagatccccaacacccggccccatgagatcctggagaagcccagccccccccagcccccacctccacccagcgtgccccagaccgtcatccccaagaagacaggcagccctgagatcaagctgaagatcaccaagaccatccagaatggccgggagctgtttgagagcagcctgtgtggggacctgctgaatgaggtgcaggccagcgagcacaccaagagcaagcatgagagcaggaaggagaagaggaagaagagcaacaagcatgacagcagccgctctgaggagaggaagagccacaagatccccaagctggagcctgaggagcagaaccggcccaatgaaagagtggacacagtgtctgagaagccccgggaggagcctgtgctgaaggaggaggcccctgtgcagcccatcctgagctctgtgcccaccacagaggtgtccactggagtgaagttccaggtgggggacctggtgtggagcaaggtgggcacctacccctggtggccctgcatggtgtccagtgacccccagctggaggtgcacaccaagatcaacaccaggggggcccgggagtaccacgtgcagttcttcagcaaccagcctgagcgggcctgggtgcatgagaagagggtgcgggagtacaagggccacaagcagtatgaggagctgctggccgaggccaccaagcaggccagcaaccacagcgagaagcagaagatcaggaagccccggccccagcgggagcgggcccagtgggacatcggcatcgcccatgctgagaaggccctgaagatgacccgggaggagagaattgagcagtacaccttcatctacatcgacaagcagcctgaggaggccctgagccaggccaagaagtctgtggccagcaagacagaggtgaagaagacccggcggcccaggtctgtgctgaacacccagcctgagcagaccaatgctggggaggtggccagcagcctgagcagcacagagatccgccgccacagccagaggaggcacaccagcgctgaggaggaggagcccccacctgtgaagatcgcctggaagacagctgctgccaggaagagcctgcctgccagcatcaccatgcacaagggcagcctggacctgcagaagtgcaacatgagccctgtggtgaagattgagcaggtgtttgccctgcagaatgccactggagatggcaagttcatcgaccagtttgtgtacagcaccaagggcatcggcaacaagacagagatctctgtgcggggccaggacaggctcatcatcagcacccccaaccagagaaatgagaagcccacccagagcgtgagcagccctgaggccaccagcggcagcactggatctgtggagaagaagcagcagaggaggagcatccgcaccaggtctgagagcgagaagagcacagaggtggtgcccaagaagaagatcaagaaggagcaggtggagaccgtgccccaggccaccgtgaagacaggcctgcagaagggggccagcgagatcagtgacagctgcaagcccctgaagaagaggagccgggccagcacagatgtggagatgaccagcagcgcctacagagacaccagtgacagcgacagccggggcctgagtgacctgcaggtgggctttgggaagcaggtggacagccccagcgccacagcagatgctgatgtgtctgatgtgcagagcatggacagcagcctgagccggcggggcaccggcatgagcaagaaggacacagtgtgccagatctgtgagagcagcggggacagcctcatcccctgtgagggggagtgctgcaagcacttccacctggagtgcctgggcctggccagcctgcctgacagcaagttcatctgcatggagtgcaagacaggccagcacccctgcttcagctgcaaggtgtctgggaaggatgtgaagcgctgcagcgtgggcgcctgtgggaagttctaccacgaggcctgtgtgaggaagttccccacagccatctttgagagcaagggcttccgctgcccccagcactgctgcagcgcctgcagcatggagaaggacatccacaaggccagcaaaggaaggatgatgcgctgcctgcgctgccctgtggcctaccacagcggagatgcctgcatcgctgctggctccatgctggtgagcagctacatcctgatctgcagcaaccacagcaagaggagcagcaacagcagcgctgtgaatgtgggcttctgctttgtgtgtgcccggggcggccgcctgctgtgctgtgagagctgcccagccagcttccacccagaatgtctgagcattgagatgcctgagggctgctggaactgcaatgactgcaaggccggcaagaagctgcactacaagcagatcgtgtgggtgaagctgggcaactaccgctggtggccagctgagatctgcaaccccaggtctgtgcccctgaacatccagggcctgaagcatgacctgggggacttccctgtgttcttcttcggcagccatgactactactgggtgcaccagggccgggtcttcccctacgtggagggggacaagagctttgctgagggccagaccagcatcaacaagaccttcaagaaggccctggaggaggccgccaagcgcttccaggagctgaaggcccagcgggagagcaaggaggccctggagattgagaagaacagcaggaagcccccaccctacaagcacatcaaggccaacaaggtgattggcaaggtgcagatccaggtggccgacctgtctgagatcccccgctgcaactgcaagccagcagatgagaacccctgtggcctggagagcgagtgcctgaacaggatgctgcagtatgagtgccacccccaggtgtgcccagctggggaccgctgccagaaccagtgcttcaccaagaggctgtacccagatgctgagatcatcaagacagaaagaagaggctggggcctgcggaccaagaggagcatcaagaagggggagtttgtgaatgaatatgtgggggagctgattgatgaggaggagtgccgcctgcgcatcaagagggcccacgagaacagcgtgaccaacttctacatgctgactgtgaccaaggaccgcatcattgatgctggccccaagggcaactacagccgcttcatgaaccacagctgcaaccccaactgtgagacccagaagtggacagtgaatggagatgtgcgggtgggcctgtttgccctgtgtgacatcccagctggcatggagctgaccttcaactacaacctggactgcctgggcaatggaagaacagagtgccactgtggggctgacaactgcagcggcttcctgggcgtgcggcccaagagcgcctgtgccagcaccaatgaggagaaggccaagaatgccaagctgaagcagaagaggaggaagatcaagacagagcccaagcagatgcatgaggactactgcttccagtgtggagatggaggagagctggtgatgtgtgacaagaaggactgccccaaggcctaccacctgctgtgcctgaacctgacccagcccccctacggcaagtgggagtgcccctggcaccagtgtgatgagtgcagcagcgctgctgtgtccttctgtgagttctgcccccacagcttctgcaaggaccacgagaagggggccctggtgcccagcgccctggagggccgcctgtgctgcagcgagcatgaccccatggcccctgtgtccccagagtactggagcaagatcaagtgcaagtgggagagccaggaccacggggaggaggtgaaggagtag

SEQ ID NO: 284718 - DNA, 4167 bp, Artificial Sequence
  derived and/or modified sequence
atggacttcagcttcagcttcatgcagggcatcatgggcaacaccattcagcagccgccgcagttaatagactcagccaatattaggcaggaagatgcttttgataacaactcggacatagcggaagatgggggccaaactccctacgaagccacactgcagcagggtttccagtatcctgctaccactgaggacctacccccactgactaacggatatccgagctctatttctgtttatgagacccagaccaagtaccagtcatacaaccagtaccccaatggcagcgccaacgggttcggcgccgtgcgaaattttagccccaccgactactatcattcagagattccaaatacccgtcctcatgagattctggagaaacctagtccccctcagccacctccgcctcctagcgtgcctcaaacagtaattcctaaaaagaccggttcacctgagattaagctcaaaatcactaaaactattcaaaatgggcgcgaactcttcgagagctcactgtgcggtgacctgctgaacgaagtgcaggcttcagaacacaccaaaagcaagcacgaaagccgaaaagaaaagaggaaaaaatcaaacaagcacgatagtagtaggtcggaagagcgaaaaagccataagatccctaaattagagccagaagagcaaaaccgcccaaatgagcgggtggatacagtgagcgagaagcccagggaggagccagtacttaaggaagaggcacccgtgcaacccatattgtcctctgttccaacaacagaagtttctaccggcgtgaaattccaagtgggcgatctggtctggtccaaagttggtacgtatccctggtggccttgcatggttagcagcgacccacaactggaggtccacaccaagattaatacccggggggctagagagtatcacgtccagttctttagtaaccagccagaacgtgcttgggttcacgaaaagcgcgttcgggagtacaaaggccataaacaatatgaggaactgctcgctgaggctactaagcaggcaagcaaccacagcgagaagcagaaaataagaaagccccgcccacagcgggagagggcccaatgggacatcggaattgctcatgcggagaaggccctgaaaatgactcgcgaagagcgcatcgagcaatatacattcatctacattgataaacaaccagaggaagctctgagccaggccaaaaagtctgttgcgtcgaagaccgaggtgaaaaaaacccgccgaccacgaagcgtgctgaatacccagcccgagcagaccaatgccggtgaggtcgccagcagcctgtcatctacggagatcagacgccattctcagcgtcgccatacaagcgccgaagaagaagagcccccgcctgtgaagattgcctggaaaacagctgcagcaaggaaaagcctgcccgcgagcatcaccatgcacaagggaagtttagatctgcagaagtgcaatatgagccccgtggtgaaaatagagcaggtcttcgccctgcaaaatgctactggcgatggaaagttcatcgatcagttcgtgtatagtacaaagggcatcggaaacaagactgagatctcagtgcggggccaagatagactcattatctccacaccgaatcaacgtaacgaaaaacccacccagagtgttagtagtcccgaggctacaagtggcagcactggtagcgtggaaaagaaacagcagaggcgctcaattaggactaggtctgagtccgagaagtcgacggaggttgtaccgaagaaaaagataaagaaagagcaggttgagactgtgcctcaggctaccgtgaaaacagggcttcagaaaggcgcttcagagatctcagacagctgtaaacctctgaagaagcgtagcagggcctctaccgacgtcgaaatgacaagctcagcctaccgcgacacttccgattccgacagccggggcctctctgatctacaggtgggttttgggaagcaggtcgactctccaagtgctactgcagacgccgatgtgtctgacgtgcagagcatggacagctcactctcacgtagggggactggtatgtctaaaaaagatacggtctgtcagatttgtgagagtagtggggatagcctcattccttgcgagggagagtgctgcaaacacttccatttggaatgtcttggactagcctccctgcctgattcaaaattcatttgtatggagtgtaaaactggccaacacccgtgttttagctgtaaggttagcgggaaggacgttaaacgctgctcggtgggcgcttgcggcaaattctaccacgaggcatgtgtccggaagtttcctacagctattttcgaaagtaaggggtttagatgtccacagcactgttgctctgcttgtagcatggaaaaagacatccacaaggccagcaagggtcgtatgatgcgctgcctgcgctgtcctgtggcataccactctggagacgcatgcatcgccgccggctccatgctggtgagctcatatatcctcatttgtagcaaccatagcaaacgatcaagtaattcttcagccgtcaacgttggtttctgtttcgtgtgcgcaaggggcggtagacttctatgctgcgagagttgtcctgcatctttccacccagaatgtctctctattgaaatgcccgaagggtgttggaactgcaacgactgtaaggccggtaagaaactgcactataaacagatcgtgtgggtgaaacttggcaattaccggtggtggcccgctgaaatatgtaaccccaggtcagtcccactcaacatacagggcttgaagcacgatctgggtgactttccagtctttttcttcgggtctcacgattactattgggtgcaccagggccgggtgttcccttacgtcgaaggtgacaaaagctttgcagagggtcagacgtccattaacaagaccttcaagaaagctcttgaagaggcggctaaacgtttccaggaactcaaagctcaacgtgagtcgaaagaagccctggagatcgaaaagaattccaggaagcctccaccatataagcatatcaaagctaataaggtgatcggcaaggttcagatacaggttgccgatctgtccgagattcctaggtgcaactgtaagccagcagacgagaacccatgtggcctggaaagcgagtgtctgaacagaatgttacagtatgagtgccatccacaagtatgtcccgccggagatcgctgccagaaccagtgttttactaagagactctacccggatgccgagatcatcaagaccgagaggagaggttggggtctgcgaaccaagcgatcaattaaaaaaggtgagttcgtcaacgaatacgtgggagagctgatcgatgaagaagagtgtcgcctgcgcataaaacgagctcacgaaaactccgtaacgaacttttacatgttaacggtcaccaaagaccgcatcatcgatgccgggcctaaggggaattatagccggtttatgaaccactcttgcaatccaaactgtgagacacaaaaatggacagtaaatggcgatgtgcgcgtaggactcttcgcactgtgcgatatcccagctggcatggaactgaccttcaattacaacctggactgcttaggcaacgggaggacagaatgtcactgcggggccgataattgctccggctttttgggggtccggcctaaaagtgcttgtgcaagtaccaacgaggagaaagcaaagaatgctaaattaaagcagaagcggaggaaaatcaagacggaacctaagcagatgcacgaagactactgctttcagtgcggggacggcggcgagctggtgatgtgcgataagaaagattgccctaaagcataccatctgttgtgcttgaacctgacacagccaccctacgggaagtgggagtgcccttggcaccagtgcgacgagtgttcgtccgccgccgtctcattctgtgaattttgtccacatagcttctgcaaggatcacgagaaaggcgcactcgtgccaagtgcgctggaaggaaggctgtgctgcagtgagcacgatcctatggcccccgtctcacccgagtattggtcaaaaattaaatgtaaatgggaatcccaggatcatggtgaagaagtgaaggagtag

SEQ ID NO: 284719 - DNA, 4167 bp, Artificial Sequence
  derived and/or modified sequence
atggacttttcatttagcttcatgcaaggaattatggggaacaccattcaacagccaccccaactcatcgactccgcgaacatccgccaggaagacgcgttcgacaacaactctgatattgcagaggacggcggtcagactccttacgaggctacactacagcaaggctttcaatacccggctaccacagaggacctgcccccactgacaaatggttacccttcctccataagtgtctatgagactcagactaaatatcagtcatacaaccagtatcccaatggctccgctaacgggtttggcgcagtgcgtaatttcagcccaaccgactactatcactcagaaatacctaatacccgaccacatgagatcctggaaaaaccttctccgcctcagccacctccacctccaagcgtcccgcagaccgtgattcccaaaaagacgggcagccctgagattaaactcaagattacaaagaccattcagaacggcagggaactgttcgaatcatctctgtgtggggatctcctgaacgaagtgcaggcctccgagcacacaaagtcaaagcatgagtcccggaaggaaaagcgaaagaaatctaataaacacgacagcagtcgtagtgaggaacgaaagtcacataaaatcccaaagcttgagcccgaggagcagaatcgtcccaacgagcgcgttgataccgtttctgaaaaacccagagaggagcctgtgctgaaggaagaggcacccgtgcagcctatcctctcctcagttcctaccacagaggtctccaccggcgttaaattccaggtaggtgacctcgtctggtcgaaggtcgggacctacccttggtggccttgcatggtctcttcggacccgcagctcgaggtgcacacaaaaattaatacaaggggagctcgtgaatatcacgtccagttcttctcgaaccaacccgagcgcgcttgggtccacgaaaaacgggtgcgcgagtataaggggcacaaacagtacgaggagcttctcgctgaggcaaccaagcaggctagtaatcactcggagaagcagaagatccgcaagccacgccctcagcgtgagagggcacagtgggacattggcattgcgcacgcagaaaaggccttgaaaatgaccagagaggaacgcattgagcaatacacctttatctacatcgacaagcagcccgaggaagcactcagccaggctaagaagtctgtagccagcaaaacggaagtgaagaagactcgcaggcccaggtctgtgctcaatacccagcctgagcagacgaacgcgggagaagtggcctccagcctgtctagcacagagattaggcgccatagccagcggagacatacctcggctgaagaggaggaaccaccgcctgtaaagatagcctggaagaccgccgctgcgaggaagagcctgcctgcttccatcactatgcataagggttctctcgacctccagaaatgcaatatgtcccccgtcgtcaagattgaacaggtgtttgccttgcagaatgcaaccggggacggcaaattcatcgatcaatttgtgtactccactaaaggaatcgggaataagaccgagatcagcgtgcggggacaggataggctgattattagtacacccaatcagagaaatgaaaagcccacccagtctgttagttctccagaagctaccagtggatcaaccggatccgtagagaagaagcagcaaaggagatccatccggacacgctccgagtctgaaaaatccaccgaggtagtccctaagaaaaaaatcaaaaaggagcaggtggagaccgtcccccaggctaccgtgaaaactggactgcagaaaggggcttctgaaatttccgactcttgtaaaccactgaaaaaaagatctcgggcttccacagatgtggagatgactagcagcgcctacagggatacttctgacagcgactctagaggcctctccgatctccaggtgggatttggcaagcaggtggattcccccagcgccaccgccgacgcagatgtgagcgacgtacagagtatggactcttccctgagtaggcgtggtaccgggatgtccaagaaggacacagtgtgccagatctgtgagagctccggggactcattgataccttgtgagggcgagtgttgcaagcattttcacttggagtgtctcggactggcatccctacccgactccaagttcatatgtatggaatgcaaaacagggcagcacccttgtttttcctgtaaagtcagtggtaaagatgtgaaacgctgcagtgtgggtgcttgtggaaagttttaccatgaggcatgtgtaagaaagtttcccactgcaatttttgagagcaaaggcttccggtgcccccagcattgctgctcagcttgcagtatggagaaagatatccacaaggcctccaagggacggatgatgagatgcctgagatgtcccgtcgcttaccacagcggtgacgcctgtattgctgccggatcaatgcttgtaagcagctacattctcatctgctctaaccattctaagcgttcttccaacagttcagccgtgaacgtaggattttgctttgtgtgcgcaagaggtggcagactgctttgctgtgagtcttgtcccgctagtttccatcctgaatgtttgtctattgagatgccggaggggtgttggaattgtaacgattgtaaggctggaaaaaaactgcactacaaacaaatcgtatgggtcaagctggggaattacaggtggtggcccgctgaaatttgcaaccctcggagtgtgcccttaaacatccagggacttaagcacgatctgggcgattttccggtcttttttttcgggtcacacgattattattgggtgcatcaggggagggtgtttccttatgtggagggggacaaaagtttcgcagagggccagacatctatcaacaagacgttcaagaaggccctcgaagaggccgcaaaacgcttccaagagctcaaggcccaaagggaatcaaaggaagccctcgaaattgagaaaaactctcgcaagccacccccttacaaacatataaaggcaaacaaagtcatcggaaaggtgcagatccaggtcgcagacctcagcgagattccccgatgcaactgcaaacccgctgatgagaacccgtgtggacttgagagtgagtgtttgaatcgcatgctacaatatgaatgccatccccaggtgtgtcctgctggagaccggtgccaaaatcagtgcttcaccaagaggttgtaccctgatgcggagatcattaaaaccgaacggagaggatggggactgcggactaagcggtctataaagaagggggaatttgtgaatgagtatgtgggggagctaatcgacgaggaggagtgtcgccttcggattaagagagcgcacgaaaacagtgtgaccaacttctatatgttgaccgttactaaagataggattatcgacgcgggtccaaagggtaattactctcgtttcatgaaccattcatgcaaccccaattgtgaaactcagaaatggacagtcaacggggatgttcgggtgggtctcttcgccctgtgcgatattccagcaggaatggagctaacctttaattataacctcgactgtctggggaacggcagaacagagtgccactgcggcgcagacaattgcagcggatttctgggcgtgagacctaagagtgcctgtgctagcaccaacgaagaaaaggccaagaacgcaaaactgaagcagaagaggcggaagataaagaccgagccaaaacagatgcacgaagattattgttttcagtgtggcgacggtggcgagctagtcatgtgcgacaaaaaggactgccccaaggcatatcatctcctttgcctcaatctcacccagccaccttatgggaagtgggagtgtccttggcaccaatgtgacgaatgcagctcagctgccgtctccttctgcgaattctgcccacatagcttctgcaaggatcatgaaaaaggcgctcttgttccatctgctctcgagggcaggctgtgttgcagcgaacatgaccccatggccccagtgtctccggagtactggagcaaaataaaatgcaaatgggagtcccaggatcacggggaagaggtgaaagaatag

SEQ ID NO: 284720 - DNA, 5273 bp, Artificial Sequence
  derived and/or modified sequence
agaggcggcggcggcggccagcacggaggcggaggccgagggggctgtgcacaggtcgccgcggagaggcgtgcgaattccgagccgagcgccgaggaccgtgctacccaggccgggctgccagccgcaggctcctctctggcagcagcggcggcgcggcgacccccgtccctcggcctccccttcccatcccacctcccgagccttcctcttcccgcagcacgcccggcccggcccggccgtggccctcctcagtgccggccgccatggcagaggcgtccggcgcggggaaaatctagcccggggatttcatgcggcctagctcggttccgcctcctcctcgcgcggccccagcggctgcccgcaccccagccccactccgggcctccgtgtctctcctgtgatcgcactgacacggccggggggttagaatggaacaaactgaaggcccgatgagagaaagggaaagttaaggatgctggagcagaacaatggatttctctttctctttcatgcaagggatcatgggaaacacaattcagcaaccacctcaactcattgactccgccaacatccgtcaggaggatgcctttgataacaacagtgacattgctgaagatggtggccagacaccatatgaagctactttgcagcaaggctttcagtacccagctacaacagaagatcttcctccactcacaaatgggtatccatcatcaatcagtgtgtatgaaactcaaaccaaataccagtcatataatcagtatcctaatgggtcagccaatggctttggtgcagttagaaactttagccccactgactattatcattcagaaattccaaacacaagaccacatgaaattctggaaaaaccttcccctccacagccaccacctcctccttcggtaccacaaactgtgattccaaagaagactggctcacctgaaattaaactaaaaataaccaaaactatccagaatggcagggaattgtttgagtcttccctttgtggagaccttttaaatgaagtacaggcaagtgagcacacgaaatcaaagcatgaaagcagaaaagaaaagaggaaaaaaagcaacaagcatgactcatcaagatctgaagagcgcaagtcacacaaaatccccaaattagaaccagaggaacaaaatagaccaaatgagagggttgacactgtatcagaaaaaccaagggaagaaccagtactaaaagaggaagccccagttcagccaatactatcttctgttccaacaacggaagtgtccactggtgttaagtttcaggttggcgatcttgtgtggtccaaggtgggaacctatccttggtggccttgtatggtttcaagtgatccccagcttgaggttcatactaaaattaacacaagaggtgcccgagaatatcatgtccagttttttagcaaccagccagagagggcgtgggttcatgaaaaacgggtacgagagtataaaggtcataaacagtatgaagaattactggctgaggcaaccaaacaagccagcaatcactctgagaaacaaaagattcggaaaccccgacctcagagagaacgtgctcagtgggatattggcattgcccatgcagagaaagcattgaaaatgactcgagaagaaagaatagaacagtatacttttatttacattgataaacagcctgaagaggctttatcccaagcaaaaaagagtgttgcctccaaaaccgaagttaaaaaaacccgacgaccaagatctgtgctgaatactcagccagaacagaccaatgcaggggaggtggcctcctcactctcaagtactgaaattcggagacatagccagaggcggcacacaagtgcggaagaggaagagccaccgcctgttaaaatagcctggaaaactgcggcagcaaggaaatccttaccagcttccattacgatgcacaaagggagcctggatttgcagaagtgtaacatgtctccagttgtgaaaattgaacaagtgtttgctcttcagaatgctacaggggatgggaaatttatcgatcaatttgtttattcaacaaagggaattggtaacaaaacagaaataagtgtcagggggcaagacaggcttataatttctacaccaaaccagagaaatgaaaagccaacgcagagtgtatcatctcctgaagcaacatctggttctacaggctcagtagaaaagaagcaacagagaagatcaattagaactcgttctgaatcagagaaatccactgaggttgtgccaaagaagaagatcaaaaaggagcaggttgaaacagttcctcaggctacagtgaagactggattacagaaaggtgccagcgagatttcagattcctgtaaacctctaaagaaaaggagtcgcgcctcaactgatgtagaaatgactagttcagcatacagagacacatctgactccgattctagaggactgagtgacctgcaggtaggctttggaaagcaagtagatagcccttcagctactgcagatgcagacgtttctgatgtgcagtccatggattcaagtttgtcgagaagaggcactggaatgagtaagaaggacactgtatgtcagatttgtgaaagctctggtgactctctgattccttgtgagggagagtgctgcaaacactttcacctggagtgcctgggattggcatcacttcctgatagcaagttcatctgcatggaatgtaaaactgggcagcacccatgtttttcgtgtaaagtgtctggtaaagatgtgaagcgttgttctgttggtgcttgtgggaaattttatcatgaagcctgtgtccgcaaattccccactgccatctttgaatcaaaaggattccgctgtcctcagcactgctgctctgcctgctctatggagaaagatatccacaaagcaagtaaaggccgcatgatgagatgtttaagatgtccagttgcctatcactctggagatgcttgcattgcggccggaagcatgttagtatcctcctacattctcatctgtagtaatcattccaaacggagcagtaattcttctgctgtaaatgtaggcttttgtttcgtttgtgccagaggtggaagattgctctgctgtgaatcgtgcccagcttccttccacccggaatgcctaagcatagaaatgccagaaggctgctggaattgtaatgactgtaaagctggcaagaaactacattacaagcagattgtttgggtcaaattgggaaattacagatggtggccagcagagatctgcaaccccaggtctgtgccactgaacatccagggccttaaacatgacttgggggacttccctgtattcttctttggttctcatgactactactgggtacaccagggcagagtgttcccttatgttgaaggagacaaaagctttgctgaagggcagactagtattaacaagaccttcaaaaaggcactggaagaagctgcaaaacgtttccaggaattgaaagcacaaagagaaagtaaagaagccctagagattgaaaaaaactcaagaaaaccccctccctacaaacacatcaaagctaacaaagtaataggaaaggtgcagatccaggttgctgacctgtcagagattccccgctgtaactgcaagccagctgatgaaaacccttgtggcttggaatcggagtgcctgaacagaatgttgcagtatgaatgccacccgcaggtgtgcccagctggagatcgttgtcagaaccagtgctttacaaagagactataccctgatgcagagatcatcaaaacggagcggagaggctggggcctcaggaccaaaaggagcattaagaagggtgaatttgtaaatgaatacgtcggtgaattaattgatgaagaagaatgcagattgcgaatcaagcgagcccacgagaacagtgtaactaatttttatatgttaactgttaccaaggaccgtataattgatgccggcccaaaaggaaattattctcgcttcatgaaccacagttgtaatcccaactgtgaaacacaaaagtggacagtgaatggagatgttcgagtgggactatttgctctctgtgatattcctgcagggatggagttaacatttaattataacctagattgtctgggcaacggcagaacggagtgccactgtggagcagataactgcagtggttttctaggagtgcggccaaagtcggcatgtgcgtcaacaaatgaagagaaggcaaaaaatgctaagttaaaacagaagagacgaaagatcaaaacagaaccaaagcagatgcatgaagattactgttttcaatgtggagatggtggagagctggtcatgtgtgacaaaaaagactgtcccaaagcataccacctcctatgccttaacctgactcagccaccatatggaaagtgggagtgtccgtggcatcagtgcgatgagtgcagcagtgcagctgtttccttctgtgaattctgtccacattcattttgtaaagatcatgaaaagggggccctggttccctctgcactggaaggccgcctctgctgctcggaacatgaccccatggctcctgtgtcaccagaatactggagcaagataaaatgtaaatgggaatcacaagatcatggagaagaagtaaaagaataaatgtgtggtgtcccctcctttctatttaagtgaaaaaagcaaatagatcatgcatttaaaaagaagagactgctacagtgcatacagcctttgccatcggaactgccttattaaagcaaaaatgggaaaccagttcatgcaggcagaagcagttggtggtgtctggtttttgtttgatttggttggtttgggattcttttgtggagggttaaattcccttggtcttttcttgccttttattgtgcttcagtgccattgcagcttgaaaaagaaatgtttttgctgttaaaataagaacaaagagaaaagtaagttttgttaatgagataaatttaaagtctaagatgtgttccttggttgtataaagcaaaagtagccatcattcctttatttattttcatttttaggaatttcaagaagtgtagttcaatagtctaatcaagtgtgtgtgtgttttaagtaggaatctgagaaagccctctaggaaagggtatgataagctttatatacctctttactgagcagtaggtaggctcacttctctttcccttcaaaatgcttttcataggcttagagaagggctctatggaagtattaaatctggcctcttgaaaa

SEQ ID NO: 284721 - DNA, 1431 bp, Artificial Sequence
  derived and/or modified sequence
aagtgaccctagagaaacgagttgtggctgaggaccccggcggcagacgcaggttcgggaccatgagctggattccttttaagattgggcagcccaagaaacagattgtgcccaaaacaccatgtcaaaatctgccgtgaagatatccttggacttactctccaatcccctctgtgagcaagaccaggaccttctgaacatggtgacggccctggacacggccatgaagcggatggatgccttcaatcaggaaaaggtgaaccagatccagaagactgtgatcgagcccttaaaaaagttcggcagtgtcttcccgagcctcaacatggctgtgaagaggcgggaacaggccttgcaggactacaggaggctgcaggccaaggtggagaagtatgaggaaaaggagaagacggggccagtgctggccaagctccaccaggcacgagaggagctgcggcctgtgcgggaggactttgaagccaagaacaggcagctgctggaggagatgccgcgcttctacggcagccgcctcgactacttccagcccagctttgagtccctcatccgagctcaggttgtgtactactcggaaatgcacaagatctttggagacctgtcccatcagcttgaccagccaggccactccgatgagcagcgggagcgggagaacgaggccaaactcagtgagctccgggccctctccattgtggccgatgactgaatccccgtcactcttggaggactcctgtgacgtggtcagcctcattcatccttgcccttctcagggctagctgctcctctcacaggctggggacagaggtggccctggttcacttgccggccctttgcaatgaatgactcttcctgagcctggcaccaggagccctaggcaggccgccgtctccccactcacagccccagcaggtaagcagtgtagacaaacccttggggcttttttatttggagaaccgtccagcatgcatcctggcccacggcctgagcaagctgcagcccttctgaggccatgggcttcgttggctaagttgggggtcttagccttgcatgcgttgtgggcatcaaatctacctccaaaagacccatcctggggagccctctggcccctcgttgccttttcacttcaaaacctcttttttctgggagaggccctgaaccctgtgcgggagagctggtcctccagccctggcaggccctcagccagcttcccagcaagacaaagggcacccttgtggctttgggacctaagtggttggggttcccgaggtcactgaggactggtacctcgggaacgcaagctgtcagtggaactgtcccacaagaattcacaggtctcaaagcaggaacagtgggtttgtgtctcacctgagtatctggaattttattttttcaagtaaaattttcaatgaaacgtcc

SEQ ID NO: 284722 - protein, 1270 aa, Artificial Sequence
  derived and/or modified sequence
MTDDNSDDKIEDELQTFFTSDKDGNTHAYNPKSPPTQNSSASSVNWNSANPDDMVVDYETDPAVVTGENISLSLQGVEVFGHEKSSSDFISKQVLDMHKDSICQCPALVGTEKPKYLQHSCHSLEAVEGQSVEPSLPFVWKPNDNLNCAGYCDALELNQTFDMTVDKVNCTFISHHAIGKSQSFHTAGSLPPTGRRSGSTSSLSYSTWTSSHSDKTHARETTYDRESFENPQVTPSEAQDMTYTAFSDVVMQSEVFVSDIGNQCACSSGKVTSEYTDGSQQRLVGEKETQALTPVSDGMEVPNDSALQEFFCLSHDESNSEPHSQSSYRHKEMGQNLRETVSYCLIDDECPLMVPAFDKSEAQVLNPEHKVTETEDTQMVSKGKDLGTQNHTSELILSSPPGQKVGSSFGLTWDANDMVISTDKTMCMSTPVLEPTKVTFSVSPIEATEKCKKVEKGNRGLKNIPDSKEAPVNLCKPSLGKSTIKTNTPIGCKVRKTEIISYPRPNFKNVKAKVMSRAVLQPKDAALSKVTPRPQQTSASSPSSVNSRQQTVLSRTPRSDLNADKKAEILINKTHKQQFNKLITSQAVHVTTHSKNASHRVPRTTSAVKSNQEDVDKASSSNSACETGSVSALFQKIKGILPVKMESAECLEMTYVPNIDRISPEKKGEKENGTSMEKQELKQEIMNETFEYGSLFLGSASKTTTTSGRNISKPDSCGLRQIAAPKAKVGPPVSCLRRNSDNRNPSADRAVSPQRIRRVSSSGKPTSLKTAQSSWVNLPRPLPKSKASLKSPALRRTGSTPSIASTHSELSTYSNNSGNAAVIKYEEKPPKPAFQNGSSGSFYLKPLVSRAHVHLMKTPPKGPSRKNLFTALNAVEKSRQKNPRSLCIQPQTAPDALPPEKTLELTQYKTKCENQSGFILQLKQLLACGNTKFEALTVVIQHLLSEREEALKQHKTLSQELVNLRGELVTASTTCEKLEKARNELQTVYEAFVQQHQAEKTERENRLKEFYTREYEKLRDTYIEEAEKYKMQLQEQFDNLNAAHETSKLEIEASHSEKLELLKKAYEASLSEIKKGHEIEKKSLEDLLSEKQESLEKQINDLKSENDALNEKLKSEEQKRRAREKANLKNPQIMYLEQELESLKAVLEIKNEKLHQQDIKLMKMEKLVDNNTALVDKLKRFQQENEELKARMDKHMAISRQLSTEQAVLQESLEKESKVNKRLSMENEELLWKLHNGDLCSPKRSPTSSAIPLQSPRNSGSFPSPSISPR

SEQ ID NO: 284723 - protein, 770 aa, Artificial Sequence
  derived and/or modified sequence
MTDDNSDDKIEDELQTFFTSDKDGNTHAYNPKSPPTQNSSASSVNWNSANPDDMVVDYETDPAVVTGENISLSLQGVEVFGHEKSSSDFISKQVLDMHKDSICQCPALVGTEKPKYLQHSCHSLEAVEGQSVEPSLPFVWKPNDNLNCAGYCDALELNQTFDMTVDKVNCTFISHHAIGKSQSFHTAGSLPPTGRRSGSTSSLSYSTWTSSHSDKTHARETTYDRESFENPQVTPSEAQDMTYTAFSDVVMQSEVFVSDIGNQCACSSGKVTSEYTDGSQQRLVGEKETQALTPVSDGMEVPNDSALQEFFCLSHDESNSEPHSQSSYRHKEMGQNLRETVSYCLIDDECPLMVPAFDKSEAQVLNPEHKVTETEDTQMVSKGKDLGTQNHTSELILSSPPGQKVGSSFGLTWDANDMVISTDKTMCMSTPVLEPTKVTFSVSPIEATEKCKKVEKGNRGLKNIPDSKEAPVNLCKPSLGKSTIKTNTPIGCKVRKTEIISYPRPNFKNVKAKVMSRAVLQPKDAALSKVTPRPQQTSASSPSSVNSRQQTVLSRTPRSDLNADKKAEILINKTHKQQFNKLITSQAVHVTTHSKNASHRVPRTTSAVKSNQEDVDKASSSNSACETGSVSALFQKIKGILPVKMESAECLEMTYVPNIDRISPEKKGEKENGTSMEKQELKQEIMNETFEYGSLFLGSASKTTTTSGRNISKPDSCGLRQIAAPKAKVGPPVSCLRRNSDNRNPSADRAVSPQRIRRVSSSVLPKAAFS

SEQ ID NO: 284724 - protein, 342 aa, Artificial Sequence
  derived and/or modified sequence
MGCPSSKLCLYSPCAATRREEALKQHKTLSQELVNLRGELVTASTTCEKLEKARNELQTVYEAFVQQHQAEKTERENRLKEFYTREYEKLRDTYIEEAEKYKMQLQEQFDNLNAAHETSKLEIEASHSEKLELLKKAYEASLSEIKKGHEIEKKSLEDLLSEKQESLEKQINDLKSENDALNEKLKSEEQKRRAREKANLKNPQIMYLEQELESLKAVLEIKNEKLHQQDIKLMKMEKLVDNNTALVDKLKRFQQENEELKARMDKHMAISRQLSTEQAVLQESLEKESKVNKRLSMENEELLWKLHNGDLCSPKRSPTSSAIPLQSPRNSGSFPSPSISPR

SEQ ID NO: 284725 - protein, 415 aa, Artificial Sequence
  derived and/or modified sequence
MKTPPKGPSRKNLFTALNAVEKSRQKNPRSLCIQPQTAPDALPPEKTLELTQYKTKCENQSGFILQLKQLLACGNTKFEALTVVIQHLLSEREEALKQHKTLSQELVNLRGELVTASTTCEKLEKARNELQTVYEAFVQQHQAEKTERENRLKEFYTREYEKLRDTYIEEAEKYKMQLQEQFDNLNAAHETSKLEIEASHSEKLELLKKAYEASLSEIKKGHEIEKKSLEDLLSEKQESLEKQINDLKSENDALNEKLKSEEQKRRAREKANLKNPQIMYLEQELESLKAVLEIKNEKLHQQDIKLMKMEKLVDNNTALVDKLKRFQQENEELKARMDKHMAISRQLSTEQAVLQESLEKESKVNKRLSMENEELLWKLHNGDLCSPKRSPTSSAIPLQSPRNSGSFPSPSISPR

SEQ ID NO: 284726 - DNA, 3813 bp, Artificial Sequence
  derived and/or modified sequence
atgaccgacgacaacagcgacgacaagatcgaggacgagctgcagaccttcttcaccagcgacaaggacggcaacacccacgcctacaaccccaagagcccccccacccagaacagcagcgccagcagcgtgaactggaacagcgccaaccccgacgacatggtggtggactacgagaccgaccccgccgtggtgaccggcgagaacatcagcctgagcctgcagggcgtggaggtgttcggccacgagaagagcagcagcgacttcatcagcaagcaggtgctggacatgcacaaggacagcatctgccagtgccccgccctggtgggcaccgagaagcccaagtacctgcagcacagctgccacagcctggaggccgtggagggccagagcgtggagcccagcctgcccttcgtgtggaagcccaacgacaacctgaactgcgccggctactgcgacgccctggagctgaaccagaccttcgacatgaccgtggacaaggtgaactgcaccttcatcagccaccacgccatcggcaagagccagagcttccacaccgccggcagcctgccccccaccggcagaagaagcggcagcaccagcagcctgagctacagcacctggaccagcagccacagcgacaagacccacgccagagagaccacctacgacagagagagcttcgagaacccccaggtgacccccagcgaggcccaggacatgacctacaccgccttcagcgacgtggtgatgcagagcgaggtgttcgtgagcgacatcggcaaccagtgcgcctgcagcagcggcaaggtgaccagcgagtacaccgacggcagccagcagagactggtgggcgagaaggagacccaggccctgacccccgtgagcgacggcatggaggtgcccaacgacagcgccctgcaggagttcttctgcctgagccacgacgagagcaacagcgagccccacagccagagcagctacagacacaaggagatgggccagaacctgagagagaccgtgagctactgcctgatcgacgacgagtgccccctgatggtgcccgccttcgacaagagcgaggcccaggtgctgaaccccgagcacaaggtgaccgagaccgaggacacccagatggtgagcaagggcaaggacctgggcacccagaaccacaccagcgagctgatcctgagcagcccccccggccagaaggtgggcagcagcttcggcctgacctgggacgccaacgacatggtgatcagcaccgacaagaccatgtgcatgagcacccccgtgctggagcccaccaaggtgaccttcagcgtgagccccatcgaggccaccgagaagtgcaagaaggtggagaagggcaacagaggcctgaagaacatccccgacagcaaggaggcccccgtgaacctgtgcaagcccagcctgggcaagagcaccatcaagaccaacacccccatcggctgcaaggtgagaaagaccgagatcatcagctaccccagacccaacttcaagaacgtgaaggccaaggtgatgagcagagccgtgctgcagcccaaggacgccgccctgagcaaggtgacccccagaccccagcagaccagcgccagcagccccagcagcgtgaacagcagacagcagaccgtgctgagcagaacccccagaagcgacctgaacgccgacaagaaggccgagatcctgatcaacaagacccacaagcagcagttcaacaagctgatcaccagccaggccgtgcacgtgaccacccacagcaagaacgccagccacagagtgcccagaaccaccagcgccgtgaagagcaaccaggaggacgtggacaaggccagcagcagcaacagcgcctgcgagaccggcagcgtgagcgccctgttccagaagatcaagggcatcctgcccgtgaagatggagagcgccgagtgcctggagatgacctacgtgcccaacatcgacagaatcagccccgagaagaagggcgagaaggagaacggcaccagcatggagaagcaggagctgaagcaggagatcatgaacgagaccttcgagtacggcagcctgttcctgggcagcgccagcaagaccaccaccaccagcggcagaaacatcagcaagcccgacagctgcggcctgagacagatcgccgcccccaaggccaaggtgggcccccccgtgagctgcctgagaagaaacagcgacaacagaaaccccagcgccgacagagccgtgagcccccagagaatcagaagagtgagcagcagcggcaagcccaccagcctgaagaccgcccagagcagctgggtgaacctgcccagacccctgcccaagagcaaggccagcctgaagagccccgccctgagaagaaccggcagcacccccagcatcgccagcacccacagcgagctgagcacctacagcaacaacagcggcaacgccgccgtgatcaagtacgaggagaagccccccaagcccgccttccagaacggcagcagcggcagcttctacctgaagcccctggtgagcagagcccacgtgcacctgatgaagaccccccccaagggccccagcagaaagaacctgttcaccgccctgaacgccgtggagaagagcagacagaagaaccccagaagcctgtgcatccagccccagaccgcccccgacgccctgccccccgagaagaccctggagctgacccagtacaagaccaagtgcgagaaccagagcggcttcatcctgcagctgaagcagctgctggcctgcggcaacaccaagttcgaggccctgaccgtggtgatccagcacctgctgagcgagagagaggaggccctgaagcagcacaagaccctgagccaggagctggtgaacctgagaggcgagctggtgaccgccagcaccacctgcgagaagctggagaaggccagaaacgagctgcagaccgtgtacgaggccttcgtgcagcagcaccaggccgagaagaccgagagagagaacagactgaaggagttctacaccagagagtacgagaagctgagagacacctacatcgaggaggccgagaagtacaagatgcagctgcaggagcagttcgacaacctgaacgccgcccacgagaccagcaagctggagatcgaggccagccacagcgagaagctggagctgctgaagaaggcctacgaggccagcctgagcgagatcaagaagggccacgagatcgagaagaagagcctggaggacctgctgagcgagaagcaggagagcctggagaagcagatcaacgacctgaagagcgagaacgacgccctgaacgagaagctgaagagcgaggagcagaagagaagagccagagagaaggccaacctgaagaacccccagatcatgtacctggagcaggagctggagagcctgaaggccgtgctggagatcaagaacgagaagctgcaccagcaggacatcaagctgatgaagatggagaagctggtggacaacaacaccgccctggtggacaagctgaagagattccagcaggagaacgaggagctgaaggccagaatggacaagcacatggccatcagcagacagctgagcaccgagcaggccgtgctgcaggagagcctggagaaggagagcaaggtgaacaagagactgagcatggagaacgaggagctgctgtggaagctgcacaacggcgacctgtgcagccccaagagaagccccaccagcagcgccatccccctgcagagccccagaaacagcggcagcttccccagccccagcatcagccccagatag

SEQ ID NO: 284727 - DNA, 3813 bp, Artificial Sequence
  derived and/or modified sequence
atgacagacgacaactcagatgataagatcgaggacgaattgcagactttttttacatctgacaaggacggaaacacccatgcgtataacccaaagagtcctcctacccagaacagctccgcaagctctgtgaactggaattctgccaatcccgatgacatggtggtggactacgagactgaccccgcagtggtcaccggtgagaacatctccctgtccctacagggcgtggaagtgttcggccatgagaaatctagcagtgatttcatatctaagcaagtcctcgatatgcataaagattcaatctgtcagtgccccgctttggttggcaccgaaaagcccaaatacctgcagcactcttgccactccttggaggctgtggagggccagagcgttgagcctagcttacccttcgtctggaaaccgaacgacaacttgaattgtgctgggtattgtgacgccctcgagcttaatcaaacatttgacatgactgtggacaaggtgaactgtaccttcatcagccatcacgcaattggtaagtcccagagtttccacactgccggctccttaccaccaactgggcggagaagtggaagcacatcttccctctcctactcaacatggacctctagtcatagcgataagactcatgcccgggagaccacatatgaccgggagagtttcgaaaaccctcaggtaactccgtcggaggcccaagacatgacttacaccgcctttagtgatgtggtcatgcagagcgaagtgttcgttagtgatatcggtaatcaatgcgcatgttcatccggcaaggtcacttcagaatacactgacggttcacagcaaagattggtcggcgagaaggaaacgcaagcccttactcccgtatcagatggcatggaagtgcccaatgatagcgccctccaagaatttttctgcctctctcatgatgaatctaactccgaaccccacagtcaatccagctatcgccacaaggagatgggtcagaatctgcgggagacagtgagctactgcctgattgatgacgagtgccccctgatggtgcccgcatttgataaaagtgaggcccaggtccttaacccggagcacaaagtgaccgaaactgaggatactcaaatggtttccaaaggaaaggacctaggaacccagaatcacacctcagaattgatcctctcatctccgccaggtcagaaagttgggagctccttcggcttgacatgggatgcaaatgacatggtgatttcgactgacaaaaccatgtgcatgagtaccccagtcctggaaccgaccaaggttacattctcagtctctcctatagaggcgacagagaaatgtaagaaggtggagaaaggtaacagagggctgaagaacattcctgacagcaaagaagcaccagtaaatctatgcaagccctcacttggcaaaagcacgatcaaaacgaacactccaataggttgtaaggtgcggaaaacagaaattatttcttatcctaggcccaacttcaaaaatgtcaaggccaaggtgatgtctcgtgctgtgctacagcctaaagacgccgctttgtcaaaagtgactccacgccctcagcaaacatccgcctcatccccatcatccgtgaattccaggcagcagacagtcctgtcacgcactcctcggagtgaccttaacgcagataaaaaggccgaaatcctgatcaataagacccacaagcagcagttcaacaaactgatcaccagtcaggccgtgcacgtcacgactcacagcaagaatgcctcccaccgcgtgccaaggaccactagtgcagtaaagtcaaatcaggaagacgtggacaaggcgtcaagctccaattccgcttgcgaaaccgggagcgtcagtgcattgtttcaaaaaatcaaaggcatcctgccagtcaaaatggagagtgcagaatgtctggaaatgacttacgtgcctaatattgacagaataagccctgaaaagaagggcgagaaggagaatggaacatctatggaaaagcaggaacttaaacaggaaatcatgaatgaaacatttgagtatggcagcctgttccttggcagcgcctccaagaccacgaccactagcggaagaaacatcagtaaacctgattcttgcgggctgcggcagatcgctgcccctaaggccaaggtcggaccacccgtgagctgtctgcgtaggaatagtgataatcgaaatccttctgctgatagagctgtgtccccacagaggatccgtcgcgtgagctcgtccgggaaaccgactagccttaagacagcccaaagctcatgggtcaatcttcctaggccgctgcctaagtccaaagctagcctcaagtctcctgcccttcgtcgcaccggctccacgcctagtatagcctctacccatagtgaattaagcacttattccaataatagcgggaacgccgctgtcataaagtacgaagaaaagcctccaaaaccagccttccagaatggatcctccggcagcttctatcttaagccgctcgtaagtcgggcgcacgtacatttaatgaagacaccaccaaagggtccatcaagaaaaaatctcttcactgccttgaatgccgtggagaagagccgtcagaaaaacccaagatccctttgcatccagcctcagacagctcctgacgctcttccgcccgagaagacactcgaactgacccagtacaagacgaagtgcgaaaatcagtccgggtttatcctgcagctgaaacagctgctcgcctgcggcaatacgaagttcgaagcactgaccgtagtcattcagcacctgttatctgaaagggaggaggcactcaagcaacataaaaccctgtctcaggagctggtcaacctgcgaggagagctggtgacagctagcacaacatgtgaaaaattggagaaggcgcggaacgaactgcaaactgtgtacgaagcctttgtgcagcaacatcaggccgagaaaaccgagagagagaatcggctgaaggagttttataccagagaatacgagaaactgagagacacttatatagaggaggccgagaagtataagatgcagctacaggagcagttcgataatctcaatgcggcccatgagacatctaagctcgaaatcgaggctagtcactcagagaaattagagctgctcaaaaaagcatacgaagccagcttgtccgagataaaaaaggggcatgagatagagaagaagtcactggaagatcttctttccgaaaaacaagagtctctagagaaacaaatcaacgacctgaaaagcgaaaacgatgccttaaacgagaagttaaaatctgaggaacagaaacggcgtgctagggagaaagccaacctgaaaaatcctcagatcatgtacctcgagcaggagttagagtcccttaaggccgtccttgaaatcaaaaacgagaagctgcatcagcaagatattaagctgatgaaaatggagaagctggtcgataataatactgccctggtggataagctgaaacgtttccagcaggagaacgaggaactgaaggcacgcatggacaaacacatggccatctcccggcagttgtcgacagagcaggccgtgctgcaggagtccctggagaaagaaagtaaagtgaataaaagactgagtatggaaaatgaagagttgctgtggaagctacacaacggtgacctctgtagtcctaagagaagtccaacctccagcgctatccccctccagtcccccagaaactctggatcgttcccctctccctccatatccccaaggtag

SEQ ID NO: 284728 - DNA, 3813 bp, Artificial Sequence
  derived and/or modified sequence
atgacagatgacaacagtgatgacaagattgaagatgagctgcagaccttcttcaccagtgacaaggatggcaacacccacgcctacaaccccaagagcccccccacccagaacagcagcgccagctctgtgaactggaacagcgccaacccagatgacatggtggtggactatgaaacagatcctgctgtggtgactggagagaacatcagcctgagcctgcagggcgtggaggtgtttggccacgagaagagcagcagtgacttcatcagcaagcaggtgctggacatgcacaaggacagcatctgccagtgcccagccctggtgggcacagagaagcccaagtacctgcagcacagctgccacagcctggaggccgtggagggccagagcgtggagcccagcctgccctttgtgtggaagcccaatgacaacctgaactgtgccggctactgtgatgccctggagctgaaccagacctttgacatgacagtggacaaggtgaactgcaccttcatcagccaccacgccatcggcaagagccagagcttccacacagctggcagcctgcccccaactggaagaagaagtggcagcaccagcagcctgagctacagcacctggaccagcagccacagcgacaagacccacgcccgggagaccacctatgaccgggagagctttgagaacccccaggtgacccccagcgaggcccaggacatgacctacacagccttcagtgatgtggtgatgcagagcgaggtgtttgtgtctgacatcggcaaccagtgtgcctgcagcagcggcaaggtgaccagcgagtacacagatggcagccagcagaggctggtgggggagaaggagacccaggccctgacccctgtgtctgatggcatggaggtgcccaatgattctgccctgcaggagttcttctgcctgagccatgatgagagcaacagcgagccccacagccagagcagctaccgccacaaggagatgggccagaacctgcgggagaccgtgtcctactgcctgattgatgatgaatgtcccctgatggtgcctgcctttgacaagtctgaggcccaggtgctgaaccctgagcacaaggtgacagaaacagaggacacccagatggtgtccaagggcaaggacctgggcacccagaaccacaccagcgagctgatcctgagcagccccccaggccagaaggtgggcagcagctttggcctgacctgggatgccaatgacatggtgatcagcacagacaagaccatgtgcatgagcacccctgtgctggagcccaccaaggtgaccttctctgtgagccccatcgaggccacagagaagtgcaagaaggtggagaagggcaacagaggcctgaagaacatcccagacagcaaggaggcccctgtgaacctgtgcaagcccagcctgggcaagagcaccatcaagaccaacacccccatcggctgcaaggtgaggaagacagagatcatctcctacccccggcccaacttcaagaatgtgaaggccaaggtgatgagcagagctgtgctgcagcccaaggatgctgccctgagcaaggtgaccccccggccccagcagaccagcgccagcagccccagctctgtgaacagccggcagcagacagtgctgagcaggacccccaggagtgacctgaatgctgacaagaaggccgagatcctgatcaacaagacccacaagcagcagttcaacaagctgatcaccagccaggccgtgcacgtgaccacccacagcaagaatgccagccaccgggtgcccaggaccaccagcgctgtgaagagcaaccaggaggatgtggacaaggccagcagcagcaacagcgcctgtgaaacaggctctgtgtctgccctcttccagaagatcaagggcatcctgcctgtgaagatggagagcgcagaatgtctggagatgacctacgtgcccaacatcgaccgcatcagccctgagaagaagggggagaaggaaaatggcacctccatggagaagcaggagctgaagcaggagatcatgaatgagacctttgaatatggcagcctcttcctgggcagcgccagcaagaccaccaccaccagcggcaggaacatcagcaagccagacagctgtggcctgcggcagattgctgcccccaaggccaaggtgggcccccctgtgtcctgcctgcggaggaacagcgacaacagaaaccccagcgctgacagagctgtgagcccccagaggatcagaagagtgagcagcagcggcaagcccaccagcctgaagacagcccagagctcctgggtgaacctgccccggcccctgcccaagagcaaggccagcctgaagagccctgccctgcggaggacaggcagcacccccagcatcgccagcacccacagcgagctgagcacctacagcaacaacagcggaaatgctgctgtgatcaagtatgaggagaagccacccaagccagccttccagaatggcagcagcggcagcttctacctgaagcccctggtgtcccgggcccacgtgcacctgatgaagaccccacccaagggccccagcaggaagaacctcttcaccgccctgaatgctgtggagaagagccggcagaagaaccccaggagcctgtgcatccagccccagacagccccagatgccctgcccccagagaagaccctggagctgacccagtacaagaccaagtgtgagaaccagagcggcttcatcctgcagctgaagcagctgctggcctgtggcaacaccaagtttgaggccctgactgtggtgatccagcacctgctgtctgagcgggaggaggccctgaagcagcacaagaccctgagccaggagctggtgaacctgcggggggagctggtgacagccagcaccacctgtgagaagctggagaaggccagaaatgagctgcagacagtgtatgaggcctttgtgcagcagcaccaggccgagaagacagagcgggagaaccggctgaaggagttctacacccgggagtatgagaagctgcgggacacctacatcgaggaggccgagaagtacaagatgcagctgcaggagcagtttgacaacctgaatgctgcccacgagaccagcaagctggagattgaggccagccacagcgagaagctggagctgctgaagaaggcctatgaggccagcctgtctgagatcaagaagggccatgaaattgagaagaagagcctggaggacctgctgtctgagaagcaggagagcctggagaagcagatcaatgacctgaagtcagaaaatgatgccctgaatgagaagctgaagtctgaggagcagaagaggcgggcccgggagaaggccaacctgaagaacccccagatcatgtacctggagcaggagctggagagcctgaaggctgtgctggagatcaagaatgagaagctgcaccagcaggacatcaagctgatgaagatggagaagctggtggacaacaacacagccctggtggacaagctgaagcgcttccagcaggagaatgaggagctgaaggccaggatggacaagcacatggccatcagccggcagctgagcacagagcaggccgtgctgcaggagagcctggagaaggagagcaaggtgaacaagaggctgtccatggagaatgaggagctgctgtggaagctgcacaacggggacctgtgcagccccaagaggagccccaccagcagcgccatccccctgcagagccccagaaattctggcagcttccccagccccagcatcagccccaggtag

SEQ ID NO: 284729 - DNA, 6160 bp, Artificial Sequence
  derived and/or modified sequence
gtggcgcctcgctactttctgcagcttgtttgcactttttcacgctctagaaaaatctcatcttaattaagggaacaacaaatcatttaatcttcagagcatcttagactgaaaacctttcaactgtgctgaaaaacctagaagacagaccattttgcccaccctctcatttaaaaggaattgaagaagaaataaaatggcagaggtttaaggttactattcaggatgactgatgataattcagatgataaaatagaagatgaattgcaaaccttctttaccagtgataaagatggaaatacacatgcatacaacccgaaatcaccacctacacaaaactcttcagccagcagtgtgaactggaattctgccaacccagatgacatggtggttgattatgaaactgaccctgctgtagttactggtgaaaatatttctttaagccttcagggtgttgaagtatttggtcatgaaaagtcttctagtgatttcattagtaagcaggtgttagatatgcataaagattctatttgtcagtgtcctgcacttgtaggtactgagaagcccaaatatctgcaacacagttgtcattccctagaagcagttgagggccagagtgttgagccatctttgccttttgtgtggaagcctaatgacaatttgaactgtgcaggctactgtgatgccttggagctaaaccaaacatttgacatgacagtggataaagttaactgcacctttatatcacatcatgccatcggaaagagtcagtccttccatactgctggaagcctgccaccaactggtaggagaagtggaagtacatcttctttatcctattccacttggacatcttcccattctgataagacgcatgcaagagaaactacttatgatagagaaagctttgaaaaccctcaagtcacaccatcagaagcccaagacatgacttacacagcattttctgatgtggtgatgcaaagtgaggtttttgtttcagatattggaaatcagtgtgcatgttcttcaggaaaggtcaccagtgagtacacagatggatcacaacaaagactagttggagaaaaggagacacaagcactaacaccagtttctgatggcatggaagtccccaatgattctgcattacaagagttcttttgtttatcccatgatgaatccaatagcgaaccacattcacagagctcatacaggcacaaggaaatgggccaaaatctgagagagacagtgtcctattgtcttattgatgatgaatgccctttaatggtgccagcttttgataagagcgaagctcaagtgctgaacccagagcataaagtcactgagactgaagacacacaaatggtctccaaaggaaaggatttgggaacccaaaatcatacctcagaattgattctaagtagcccgccaggacaaaaggtgggctcgtcatttggactgacttgggatgcaaatgatatggtcattagcacagacaaaacgatgtgcatgtcaacaccagtcctagaacccacaaaagtaaccttttctgtttcaccgattgaagcgacggagaaatgtaagaaagtggagaagggtaatcgagggcttaaaaacataccagactcgaaggaggcacctgtgaacctgtgtaaacccagtttaggaaaatcaacaatcaaaacgaataccccaataggctgcaaagttagaaaaactgaaattataagttacccaagaccaaacttcaagaatgtcaaagcaaaagttatgtctagagcagtgttgcagcccaaagatgctgctttatcaaaggtcacgcccagacctcagcagaccagtgcctcatcaccctcatcagtgaattcaagacaacaaacagtcttgagcagaacaccgagatctgacttgaatgcagacaaaaaagcagaaattctaattaacaagacacataagcagcagtttaataaactcattactagccaggctgtgcatgttacaactcattctaaaaatgcttcacacagggttccaagaacaacatctgccgtgaaatcgaatcaggaagatgttgacaaagccagttcttctaactcagcatgcgagaccgggtccgtttctgcgttgtttcagaagatcaaaggcatactccctgttaaaatggaaagtgcagaatgtttggaaatgacctatgttcccaacattgataggattagccctgaaaagaagggtgaaaaagaaaatgggacatctatggaaaaacaagagctgaaacaagagattatgaatgagacttttgaatatggttctctgtttttgggctctgcttcaaaaacaacgaccacctcaggtaggaatatatccaagcctgactcctgcggtttgaggcaaatagctgctccaaaagccaaagtggggccccctgtttcctgtttgaggcggaacagtgacaatagaaatcccagtgctgatcgagccgtatctcctcagaggatcaggcgtgtgtccagttctggaaagcctacatccttgaaaactgcacagtcgtcatgggtgaatttgcctagaccacttcctaaatccaaagcatctttgaaaagtcctgcgctgcggaggacaggaagcaccccctcaatagccagcacccacagtgagctgagcacttacagcaacaattctggtaatgccgctgtcatcaaatatgaggagaaacctccaaaaccagcatttcagaatggttcctcaggatccttttatttgaagcctttggtatccagggctcatgttcacttgatgaaaactcctccaaaaggtccttcgagaaaaaatttatttacagctcttaatgcagttgaaaagagcaggcaaaagaatcctcgaagcttatgtatccagccacagacagctcccgatgcgctgccccctgagaaaacacttgaattgacgcaatataaaacaaaatgtgaaaaccaaagtggatttatcctgcagctcaagcagcttcttgcctgtggtaataccaagtttgaggcattgacagttgtgattcagcacctgctgtctgagcgggaggaagcactgaaacaacacaaaaccctatctcaagaacttgttaacctccggggagagctagtcactgcttcaaccacctgtgagaaattagaaaaagccaggaatgagttacaaacagtgtatgaagcattcgtccagcagcaccaggctgaaaaaacagaacgagagaatcggcttaaagagttttacaccagggagtatgaaaagcttcgggacacttacattgaagaagcagagaagtacaaaatgcaattgcaagagcagtttgacaacttaaatgctgcgcatgaaacctctaagttggaaattgaagctagccactcagagaaacttgaattgctaaagaaggcctatgaagcctccctttcagaaattaagaaaggccatgaaatagaaaagaaatcgcttgaagatttactttctgagaagcaggaatcgctagagaagcaaatcaatgatctgaagagtgaaaatgatgctttaaatgaaaaattgaaatcagaagaacaaaaaagaagagcaagagaaaaagcaaatttgaaaaatcctcagatcatgtatctagaacaggagttagaaagcctgaaagctgtgttagagatcaagaatgagaaactgcatcaacaggacatcaagttaatgaaaatggagaaactggtggacaacaacacagcattggttgacaaattgaagcgtttccagcaggagaatgaagaattgaaagctcggatggacaagcacatggcaatctcaaggcagctttccacggagcaggctgttctgcaagagtcgctggagaaggagtcgaaagtcaacaagcgactctctatggaaaacgaggagcttctgtggaaactgcacaatggggacctgtgtagccccaagagatcccccacatcctccgccatccctttgcagtcaccaaggaattcgggctccttccctagccccagcatttcacccagatgacacctccccaaagtccacagactctctgaaagcattttgatgcaggtctgcaggactgaccccaaggaggaacgtgggcacaagaggtatatcagcacacgtgtgatcaccgtagggtaactggagcgtcaccaccggcggaatcgcagcttctgagactggaactctggaggaagacttttgcctccgtccaaaagattcctccaaaaaaagatttaaaaaaagatttcggcatcgacacggacgttgttgcacaaagcacttaaagaacgagagcatcttgttcattgcctttttcacctaagcatagggggaaaaactctcagggccctattaagatttataacctttgtaatgttcttcaccacagacaccttcttgtgagttttcagtctgactgtgggggtggggggtgtgaatgaaatggatgtcacagagtgtcatgtgtctgatgcagcctcctctgctgtgtattaaatgtcaaaatctgaatatatctggatatgtactaatcaaataataatcaatcaatcagcatatacatttcagccaaagccatagaagaaaaagcaatagttgcttgaattatgatcatctaccaccaactctgctcagccctgtaacagggtagggagagggtataacaggaagagctttgacttgtccctgtctatacattctctgtatcttttgggggtaacttcttggcagtttttcagtgttcagccatgtcagttgaaactagatttttctgtagattttttacttacccatgtgagcctaacactatcctgtaattcattttctcaggctatgtgtaaatgtagaaccctaatttttctataaaaaaacaaactaactaactaactgtgtaaagaaagaaaaagggaagtaccaatgggtttttccaccttatttttacctttgatctacccttgcagatttaacctgtcttcttccctcccattattctcattttccttttacctttctccaccatccagagccacaaaagcaaaccttctacctcctacctacttttctctgggacaaggataaaggaatatgattttccagagccccagagccagctcatcttccaggtgctgaaaccactttccaaataaactaaagcctggatttgatattacaaattttgggaaatcttagaataaagaacgagaacaaggaagtcattggctagtataattaagaaaggtaggattcagtgcttaccgatgatgcagtacttgatagaagaaaacagtctgggaggatagcgctcatttttcagttaccctttaaggagtccctttgtctttgggaaagtagcagaatggtccgcttctttcccatgagtggaaaatgtggcttgtccaactctcctccaggttgcatttcagtttctttccaaaacttattacctcccctaatcctgagactttggaaaaggtggaaggaagaactgttgctttatctccccctccctgcatgtgtcaacattgtgatgtcagtatttactaatctacattcagtggctgtacaaataacagctgtagtaagaagagattcaggatgctagaggtgaatatttgggtcatttacatgtacactacatagcaagttgatactcatgttgcatgttcttttaaattagtgattttgtgtcttaagtctttaacttccaatacttcatcatgtatgtaaccttccatgtttgcttctgataaatggaaatgtaggttcactgccacttcatgagatatctctgctcacgcttccaagttgttctcaatgacattagccaaagttgggtttgccattcatcccctaggcatggtaaatcttgtgttgttccctgctgtcctccgtattacgtgaccggcaaataaatctcatagcagttaatataaaacatctttggaggatgggagagaacaggagggaagatgggaaacaaaatagagaattcttaagattttgtttaaaccaaatgtttcatgtagaatgcaaaatgttggcacgtcaaaaatatgaatgtgtagacaactgtagttgtgctcagtttgtagtgatgggaagtgtattttactctgatcaaataaataatgctggaatactc

SEQ ID NO: 284730 - DNA, 3813 bp, Artificial Sequence
  derived and/or modified sequence
atgaccgacgacaacagcgacgacaagatcgaggacgagctgcagacattttttacatccgacaaagacggcaatacgcacgcctataatcccaaatcgccccccacacagaattcctcagccagcagtgtaaactggaattcagccaatccggacgacatggtcgtggattatgagacggatcctgccgtggtgaccggtgaaaacatcagcctgagcctccagggagttgaagtatttggacacgagaagtcttcatccgacttcatcagcaaacaagtgctggatatgcataaggacagcatctgccagtgtcccgccctcgtcggcaccgaaaagcctaagtatctgcagcactcttgccactcactcgaagccgtggagggacaatctgtggagccttctctgccatttgtctggaagcctaatgataatctgaactgcgccggttattgtgatgccctcgaattgaatcagacatttgacatgactgtcgataaggtgaactgtacgttcatttctcaccatgcaattggaaaaagccaaagctttcacacagccgggtccctccccccaacaggtagaaggagtggctcgactagcagccttagctattcaacctggacttcatctcactccgacaaaacacacgccagggagaccacctacgatcgtgagtcctttgaaaacccgcaagtcaccccctctgaggcacaagacatgacatataccgccttctccgacgtggtgatgcaatcagaggtgtttgtgtccgatataggaaatcaatgcgcctgtagttccggcaaggtgaccagtgaatacactgacggctctcagcagagactggttggcgaaaaggagacccaagcacttacccccgtgagtgacggcatggaagttcctaatgactcggccctgcaggagtttttctgcctctcacatgatgagtccaattcggaaccccattcgcagtccagctatcggcataaagagatgggacagaatctgagggaaaccgtgtcttactgcctgatcgacgatgagtgccccctgatggtgcccgcatttgataaatctgaggcacaggtgttaaacccagagcacaaagtgactgagactgaggacacccaaatggtgtctaagggcaaagacttgggtacacagaatcacacttccgagcttatactttcatcaccgccaggacagaaagtgggctcctcattcggactcacctgggacgctaacgacatggtgataagcactgacaaaacaatgtgcatgagcactcccgtgctcgaaccgactaaagtaacatttagtgtttctcctatagaggccacagagaagtgcaaaaaggtagagaagggtaaccgcggcctgaaaaacattcccgatagcaaggaggcgccagtcaatctgtgcaagccctcacttgggaaatctacaataaaaacaaacacacccatcggctgtaaagttagaaaaaccgagatcatcagctacccacgtcccaacttcaagaacgtcaaagcaaaggtaatgtcccgtgcggtattgcagcctaaagatgccgcactctccaaagtaacaccaaggcctcaacagacaagcgctagctctcccagctctgtaaactcacgccaacagaccgttctgtcacgcactccaaggtcagacctaaatgcagacaagaaggctgagatcctcataaataagacgcataaacagcagttcaataaactgataacctcccaggcagttcacgtgacaactcattcaaagaatgcctcccacagagtcccacgtaccacatctgccgtgaaatcaaaccaggaagacgtggacaaggcatcttcaagcaattcggcgtgtgagacaggctcagtgtcagccctgttccagaagataaaaggcatactcccagtaaaaatggagtccgccgagtgtctggagatgacatacgttccaaacatcgatagaatcagtcctgaaaagaagggagagaaggaaaacggcacatccatggaaaagcaagaacttaaacaggagatcatgaacgagacattcgaatatggcagcctcttcctaggatccgcttctaagacaactacaacgtctggaagaaatatctcaaagcctgacagttgtggtctgcgacagatagcagcccccaaagcaaaggtaggaccccccgttagttgcctccgtaggaatagtgacaaccgaaatccttctgctgatagagctgtctcacctcaaaggattcggcgggtgagttcttccggaaaacctactagcctgaaaacagcccagtcttcttgggttaatctcccccgccccctgccaaaaagcaaagcctccttaaagtctcccgccctgcggagaacaggttctaccccctctatcgcttcaacacattccgagctctctacatacagtaataattccggcaacgcggctgtgatcaagtacgaagagaagcctcccaaacctgcttttcagaatggctcatccgggtcattttatttaaagccactagtcagtagggcacacgttcacttgatgaaaacaccaccaaaaggtccttctcggaagaacctgtttacggctctgaatgctgtcgagaaaagtcggcagaaaaacccccggtcattatgtatccagccccagaccgcgcccgacgccctgccccccgagaagaccttggaacttacccagtataaaaccaaatgcgaaaatcaatctggtttcattcttcagttaaagcagctgctggcctgcggaaacacaaaattcgaggccctgactgtggtcattcagcatcttctaagtgagagggaggaggccctgaagcagcataagaccctttctcaggaacttgtgaatcttaggggcgagctggttacagctagtaccacatgcgagaagctggaaaaagccagaaatgagctgcagacagtgtacgaggctttcgtgcagcagcatcaggcggagaagaccgagcgcgaaaatagactcaaggaattctacacccgggagtacgagaaattacgggatacatacatcgaggaggcggaaaaatataagatgcaactccaagaacagttcgacaatttgaacgctgcccacgagacatccaaactggagatcgaggcttcgcattcagagaaactggagctgctaaaaaaggcctatgaagcatcattgtcagaaatcaaaaaaggccacgagatcgagaagaagtcacttgaggacctgctgtcagagaagcaggaaagtctggagaaacagattaatgacctcaaaagcgaaaacgacgccctcaatgaaaagctgaaatctgaggaacaaaaacgccgtgcgcgcgagaaagccaatctcaaaaatcctcaaatcatgtatttggaacaagagttggagtcacttaaggccgtgcttgaaatcaaaaatgaaaaactccaccagcaggacattaagctgatgaagatggagaagctagtggacaacaacactgccctcgtggacaagctgaagagatttcagcaggagaatgaggagcttaaagctcgcatggacaaacatatggcaatatcacggcagctttctaccgagcaggccgtgttgcaggagtctctggagaaggaatctaaagtgaataagcggttgagcatggagaacgaggaactgctgtggaagctgcacaacggggacctctgttcccctaaacgctccccaacatctagcgctattcccctgcagagtccaaggaacagtgggagctttccaagccccagcatctctcctaggtag

SEQ ID NO: 284731 - DNA, 3813 bp, Artificial Sequence
  derived and/or modified sequence
atgaccgatgacaattcggatgacaagatcgaagacgagctccaaacattcttcacatccgacaaggacggtaacacacacgcttacaacccgaagagtccacctacgcagaactcctccgctagtagcgtaaactggaattcagccaatcccgacgacatggtggtcgattacgagacggatccagccgtagtcacaggcgagaatatctctctttcgctgcagggcgttgaggtgttcggccacgaaaaatcttccagcgattttatttctaaacaggtcctggatatgcataaagactctatatgccagtgccctgcactcgttggcacggagaagcccaaatatcttcaacactcctgtcattcccttgaagcagtagaggggcagtctgtcgagccctcactccccttcgtgtggaagcccaatgacaacctgaactgcgcaggatattgtgatgccctcgaactgaaccaaactttcgacatgacagtggacaaggtcaactgtaccttcataagtcaccatgctattggaaagagtcagagctttcacactgccggtagtttgcccccaacaggcagacgtagcggcagtactagctctctgtcctacagcacgtggacgagctcacacagcgacaagactcacgccagggagacaacttacgatagggaaagcttcgagaatcctcaggtcaccccaagcgaggcccaggacatgacatatacagcctttagtgatgtggtgatgcagagcgaggtgttcgtatctgacatcggcaatcagtgcgcatgctcaagcggtaaggtgacctccgaatatacagatggtagtcagcagaggttggtgggggaaaaggaaacccaggcactgacccctgtaagcgatggcatggaggtgccaaacgatagtgcgctccaagagtttttctgccttagtcatgacgagagcaactccgagcctcactcccagagttcgtatcggcacaaagagatgggccagaacctccgggagactgtgagctattgcctgatcgacgatgagtgccctcttatggttccagcattcgacaagtcggaagctcaggtattgaatccagagcacaaagtgaccgaaactgaggacacacagatggtatccaaaggcaaggatttggggactcagaaccataccagcgagctgatcctttcttcaccccctggacagaaagttggctcatcatttggcctgacttgggacgccaacgatatggtaatctccacagataagactatgtgcatgtccacccccgtgctagagcctactaaagtgacattcagtgtgagtcctatcgaggccacggaaaaatgtaagaaggtcgaaaagggtaacagagggcttaagaatattcctgatagcaaagaggctcctgtcaacttgtgtaagccctctctggggaaaagtacaatcaaaacaaatacgcctatcgggtgcaaagtccgaaagactgagatcatcagctatcctagacctaactttaagaatgtcaaagctaaggttatgtcacgggcagtgctacagcctaaagacgcggcattaagtaaggttactcctaggccacagcagacttcagcatcttctccatcctctgtgaacagtagacaacagaccgtattgtcccgcacccccaggagtgatctgaatgctgacaagaaggccgagatcctcatcaataagacgcacaaacagcagtttaataagttgatcacgagccaagctgtgcacgtgacgactcactccaaaaacgctagccatcgggtgccgcgaaccactagcgctgtgaaatctaaccaggaggatgtggacaaagcttcctcatcaaacagtgcctgcgagactgggtccgtgagcgccctgttccagaagatcaagggcattctgcccgtcaaaatggaaagtgccgagtgcctggagatgacttatgtccccaacattgacagaatcagtcctgaaaagaaaggcgagaaagagaatggcacctcaatggaaaaacaggaactgaaacaggagatcatgaacgaaacttttgagtacgggagtctcttccttggttccgcttctaagaccaccacaacgagtgggcgtaacattagtaagcccgattcgtgtggactcaggcagatcgcagcaccaaaagcgaaagtcggacccccagtctcatgtctgagaaggaattctgacaaccgcaatccttcagccgatcgggctgtgtctccccagcgcattagacgcgtttctagctccggcaaacctacttctctcaagacggcccagagttcatgggtgaatctgcccaggccgctcccaaagagcaaagcaagcctgaagtcccccgcacttcgcaggacaggttcaacaccaagcattgcttccacacactccgagctgtccacatactctaacaattctggcaatgctgcggtgattaagtacgaagaaaaaccgcctaagcccgcattccagaacggcagctcaggcagtttctatctaaaacctctagtcagcagagcgcatgtgcacctgatgaagactccacctaaggggccaagccgaaaaaatttattcaccgccctcaacgcagtggaaaagtctaggcaaaagaacccacggtcactgtgcatccagccacaaaccgctcccgacgcgctcccccctgaaaaaaccctggaactgacccagtataagaccaagtgcgagaaccagtcgggcttcatcctgcagcttaagcagctgctcgcatgcggaaacactaaattcgaggctctgactgtagtgattcagcaccttctgagtgagagggaagaggcactgaagcaacacaagacattgtcccaggaactggtgaatctgaggggggagctggtgactgcttccactacgtgcgagaaacttgagaaagcccgtaatgaactgcagactgtctacgaggcctttgttcagcaacatcaagccgagaaaactgaacgtgagaatcgcctgaaggagttctacacacgagaatatgagaagctcagggatacttacattgaggaggccgaaaaatacaaaatgcagcttcaggagcagtttgacaacctgaacgctgctcatgaaacctccaaactcgagattgaagctagtcacagcgagaaactggaacttctcaagaaggcgtacgaggcatctctctcagagatcaagaagggtcacgagatcgagaagaaaagtttggaagatctattatcagagaagcaggagtccctcgaaaaacaaattaacgatctgaaatcggaaaatgatgccttgaatgagaagctcaaaagtgaagaacagaagcggagggccagagagaaggctaacctgaagaacccgcagatcatgtatctggaacaggaactcgagagccttaaggcagttctggagataaagaacgagaaattgcatcagcaagatattaagctgatgaaaatggaaaaactagtcgataacaatactgccctcgtggataaactcaagcgattccaacaggagaacgaggagctcaaagccaggatggataagcatatggctatttctaggcagctctcaacagagcaggcggtccttcaggagtcattggaaaaggagagcaaggtcaacaagagactgtctatggagaacgaggaactcctttggaagctgcacaacggggatctctgcagccccaagaggtctcctaccagcagcgcgataccactgcaatctcctcggaattccggctcattccctagcccgtcgataagcccacgctag

SEQ ID NO: 284732 - protein, 1216 aa, Artificial Sequence
  derived and/or modified sequence
MTDDNSDDKIEDELQTFFTSDKDGNTHAYNPKSPPTQNSSASSVNWNSANPDDMVVDYETDPAVVTGENISLSLQGVEVFGHEKSSSDFISKQVLDMHKDSICQCPALVGTEKPKYLQHSCHSLEAVEGQSVEPSLPFVWKPNDNLNCAGYCDALELNQTFDMTVDKVNCTFISHHAIGKSQSFHTAGSLPPTGRRSGSTSSLSYSTWTSSHSDKTHARETTYDRESFENPQVTPSEAQDMTYTAFSDVVMQSEVFVSDIGNQCACSSGKVTSEYTDGSQQRLVGEKETQALTPVSDGMEVPNDSALQEFFCLSHDESNSEPHSQSSYRHKEMGQNLRETVSYCLIDDECPLMVPAFDKSEAQVLNPEHKVTETEDTQMVSKGKDLGTQNHTSELILSSPPGQKVGSSFGLTWDANDMVISTDKTMCMSTPVLEPTKVTFSVSPIEATEKCKKVEKGNRGLKNIPDSKEAPVNLCKPSLGKSTIKTNTPIGCKVRKTEIISYPRPNFKNVKAKVMSRAVLQPKDAALSKVTPRPQQTSASSPSSVNSRQQTVLSRTPRSDLNADKKAEILINKTHKQQFNKLITSQAVHVTTHSKNASHRVPRTTSAVKSNQEDVDKASSSNSACETGSVSALFQKIKGILPVKMESAECLEMTYVPNIDRISPEKKGEKENGTSMEKQELKQEIMNETFEYGSLFLGSASKTTTTSGRNISKPDSCGLRQIAAPKAKVGPPVSCLRRNSDNRNPSADRAVSPQRIRRVSSSAGNAAVIKYEEKPPKPAFQNGSSGSFYLKPLVSRAHVHLMKTPPKGPSRKNLFTALNAVEKSRQKNPRSLCIQPQTAPDALPPEKTLELTQYKTKCENQSGFILQLKQLLACGNTKFEALTVVIQHLLSEREEALKQHKTLSQELVNLRGELVTASTTCEKLEKARNELQTVYEAFVQQHQAEKTERENRLKEFYTREYEKLRDTYIEEAEKYKMQLQEQFDNLNAAHETSKLEIEASHSEKLELLKKAYEASLSEIKKGHEIEKKSLEDLLSEKQESLEKQINDLKSENDALNEKLKSEEQKRRAREKANLKNPQIMYLEQELESLKAVLEIKNEKLHQQDIKLMKMEKLVDNNTALVDKLKRFQQENEELKARMDKHMAISRQLSTEQAVLQESLEKESKVNKRLSMENEELLWKLHNGDLCSPKRSPTSSAIPLQSPRNSGSFPSPSISPR

SEQ ID NO: 284733 - DNA, 3651 bp, Artificial Sequence
  derived and/or modified sequence
atgaccgacgacaacagcgacgacaagatcgaggacgagctgcagaccttcttcaccagcgacaaggacggcaacacccacgcctacaaccccaagagcccccccacccagaacagcagcgccagcagcgtgaactggaacagcgccaaccccgacgacatggtggtggactacgagaccgaccccgccgtggtgaccggcgagaacatcagcctgagcctgcagggcgtggaggtgttcggccacgagaagagcagcagcgacttcatcagcaagcaggtgctggacatgcacaaggacagcatctgccagtgccccgccctggtgggcaccgagaagcccaagtacctgcagcacagctgccacagcctggaggccgtggagggccagagcgtggagcccagcctgcccttcgtgtggaagcccaacgacaacctgaactgcgccggctactgcgacgccctggagctgaaccagaccttcgacatgaccgtggacaaggtgaactgcaccttcatcagccaccacgccatcggcaagagccagagcttccacaccgccggcagcctgccccccaccggcagaagaagcggcagcaccagcagcctgagctacagcacctggaccagcagccacagcgacaagacccacgccagagagaccacctacgacagagagagcttcgagaacccccaggtgacccccagcgaggcccaggacatgacctacaccgccttcagcgacgtggtgatgcagagcgaggtgttcgtgagcgacatcggcaaccagtgcgcctgcagcagcggcaaggtgaccagcgagtacaccgacggcagccagcagagactggtgggcgagaaggagacccaggccctgacccccgtgagcgacggcatggaggtgcccaacgacagcgccctgcaggagttcttctgcctgagccacgacgagagcaacagcgagccccacagccagagcagctacagacacaaggagatgggccagaacctgagagagaccgtgagctactgcctgatcgacgacgagtgccccctgatggtgcccgccttcgacaagagcgaggcccaggtgctgaaccccgagcacaaggtgaccgagaccgaggacacccagatggtgagcaagggcaaggacctgggcacccagaaccacaccagcgagctgatcctgagcagcccccccggccagaaggtgggcagcagcttcggcctgacctgggacgccaacgacatggtgatcagcaccgacaagaccatgtgcatgagcacccccgtgctggagcccaccaaggtgaccttcagcgtgagccccatcgaggccaccgagaagtgcaagaaggtggagaagggcaacagaggcctgaagaacatccccgacagcaaggaggcccccgtgaacctgtgcaagcccagcctgggcaagagcaccatcaagaccaacacccccatcggctgcaaggtgagaaagaccgagatcatcagctaccccagacccaacttcaagaacgtgaaggccaaggtgatgagcagagccgtgctgcagcccaaggacgccgccctgagcaaggtgacccccagaccccagcagaccagcgccagcagccccagcagcgtgaacagcagacagcagaccgtgctgagcagaacccccagaagcgacctgaacgccgacaagaaggccgagatcctgatcaacaagacccacaagcagcagttcaacaagctgatcaccagccaggccgtgcacgtgaccacccacagcaagaacgccagccacagagtgcccagaaccaccagcgccgtgaagagcaaccaggaggacgtggacaaggccagcagcagcaacagcgcctgcgagaccggcagcgtgagcgccctgttccagaagatcaagggcatcctgcccgtgaagatggagagcgccgagtgcctggagatgacctacgtgcccaacatcgacagaatcagccccgagaagaagggcgagaaggagaacggcaccagcatggagaagcaggagctgaagcaggagatcatgaacgagaccttcgagtacggcagcctgttcctgggcagcgccagcaagaccaccaccaccagcggcagaaacatcagcaagcccgacagctgcggcctgagacagatcgccgcccccaaggccaaggtgggcccccccgtgagctgcctgagaagaaacagcgacaacagaaaccccagcgccgacagagccgtgagcccccagagaatcagaagagtgagcagcagcgccggcaacgccgccgtgatcaagtacgaggagaagccccccaagcccgccttccagaacggcagcagcggcagcttctacctgaagcccctggtgagcagagcccacgtgcacctgatgaagaccccccccaagggccccagcagaaagaacctgttcaccgccctgaacgccgtggagaagagcagacagaagaaccccagaagcctgtgcatccagccccagaccgcccccgacgccctgccccccgagaagaccctggagctgacccagtacaagaccaagtgcgagaaccagagcggcttcatcctgcagctgaagcagctgctggcctgcggcaacaccaagttcgaggccctgaccgtggtgatccagcacctgctgagcgagagagaggaggccctgaagcagcacaagaccctgagccaggagctggtgaacctgagaggcgagctggtgaccgccagcaccacctgcgagaagctggagaaggccagaaacgagctgcagaccgtgtacgaggccttcgtgcagcagcaccaggccgagaagaccgagagagagaacagactgaaggagttctacaccagagagtacgagaagctgagagacacctacatcgaggaggccgagaagtacaagatgcagctgcaggagcagttcgacaacctgaacgccgcccacgagaccagcaagctggagatcgaggccagccacagcgagaagctggagctgctgaagaaggcctacgaggccagcctgagcgagatcaagaagggccacgagatcgagaagaagagcctggaggacctgctgagcgagaagcaggagagcctggagaagcagatcaacgacctgaagagcgagaacgacgccctgaacgagaagctgaagagcgaggagcagaagagaagagccagagagaaggccaacctgaagaacccccagatcatgtacctggagcaggagctggagagcctgaaggccgtgctggagatcaagaacgagaagctgcaccagcaggacatcaagctgatgaagatggagaagctggtggacaacaacaccgccctggtggacaagctgaagagattccagcaggagaacgaggagctgaaggccagaatggacaagcacatggccatcagcagacagctgagcaccgagcaggccgtgctgcaggagagcctggagaaggagagcaaggtgaacaagagactgagcatggagaacgaggagctgctgtggaagctgcacaacggcgacctgtgcagccccaagagaagccccaccagcagcgccatccccctgcagagccccagaaacagcggcagcttccccagccccagcatcagccccagatag

SEQ ID NO: 284734 - DNA, 3651 bp, Artificial Sequence
  derived and/or modified sequence
atgacagacgacaattccgacgataaaattgaggatgagctacaaactttcttcacatctgacaaggacggcaacactcacgcctataatcctaaatctccccccacacaaaactcctcagcttcctcagttaactggaattccgccaaccctgacgacatggtcgtggactatgaaaccgaccctgcagtagtgaccggagagaacataagcttgtccctccagggcgtggaagtgttcggacatgagaagtcatctagtgattttatcagcaaacaggtgctggacatgcataaggacagcatctgccagtgtccagcactcgtcggtaccgaaaagcctaagtaccttcagcactcttgtcattcactggaggcagtggaggggcaaagtgtggaaccctccctgcctttcgtgtggaagcctaatgataacttaaattgtgccggatattgtgatgcccttgaactaaatcaaaccttcgacatgactgtcgataaagtgaactgcacctttatctctcaccacgcaatcgggaagagtcaaagctttcacaccgccgggagcttgccgccaaccggtagacgctcggggagtaccagctcactctcttacagtacgtggacgagttcacatagcgataagacacatgctcgcgagactacttacgacagggagtctttcgagaacccccaggtcactccttcggaagcccaagacatgacttacaccgctttctctgatgttgtgatgcagagtgaggtgtttgtctctgacattggcaaccaatgcgcctgtagctccgggaaggttacctcagaatacaccgatggatctcagcagcgcctcgtaggtgaaaaggaaacccaagccctgactccagtatccgacggtatggaagtcccaaacgactcggctttgcaggaatttttctgcctctcccatgatgaatccaactctgaacctcattcccaatccagctaccgccacaaagaaatgggacaaaatctgcgagagaccgtgagttattgcctcattgatgacgagtgccccctcatggtccctgcgttcgacaaatctgaggcgcaggttttgaatcccgagcacaaggtgaccgagactgaggacacccagatggtgtccaaaggaaaagatctcggaacccaaaaccacactagcgaattgatcttgtctagtccccctggccagaaagtgggttcctcttttggcttaacgtgggatgcgaatgatatggttatttcgaccgacaaaacgatgtgcatgtccaccccagtgctcgagccgaccaaggtgaccttttcagtgagtcctattgaggccacggagaaatgcaaaaaggtggaaaagggcaaccgaggactgaaaaacatcccagacagcaaagaagctcctgtaaatctctgcaaaccttccctcgggaagagtactattaagacaaatactcccataggctgtaaggtgcgcaagacagagatcatctcttatcccagaccaaatttcaaaaatgtaaaggccaaagtcatgtctcgtgccgtgttgcagccgaaagatgccgccctctctaaagtgacaccacgcccacaacagacttcagcctcttcccctagctctgtgaatagccgtcagcagaccgtgctctcaaggacacctaggagcgatctcaacgcggacaagaaggccgagattctgattaacaagactcacaagcaacagttcaacaagctcattaccagccaggcggtgcatgtgaccacgcactcaaagaacgcatcgcatcgggtccccagaactacgtctgctgtcaagtctaatcaagaggatgttgataaagcgtcctctagtaattccgcatgtgaaaccgggagcgtgtcagctctgtttcaaaagattaaagggattctcccagtgaagatggagtccgctgagtgccttgaaatgacatatgtaccaaacatcgatcggatttctcctgagaagaagggcgagaaggaaaatggcacatccatggagaagcaagaacttaaacaggagatcatgaacgaaacattcgaatacggttctctgtttcttggaagcgcctcgaaaaccacaactacaagcggccggaacatttcaaaacctgattcatgtggtctgcgtcagatcgccgccccaaaggccaaagtgggtccccccgtgagttgcctccggaggaacagcgataaccgcaacccctcagctgacagggctgtgtcaccgcagaggattaggagagtttctagcagtgcaggcaacgctgcagtcatcaaatacgaggagaagccacccaagcctgcgttccagaatggctcttccgggtctttttatctgaagccactggtgtccagggcccacgttcacctcatgaagactccacctaaggggcccagccggaaaaacctcttcaccgctctgaacgctgttgagaagagccgccagaaaaatcctcgcagtctgtgtatacagcctcagacagcccctgatgctctgcctccggagaagacacttgaattgacccagtataagactaagtgtgagaaccagagtggctttattctgcagctgaagcagctgctggcttgcggtaataccaagttcgaggccctgaccgtagtgatccagcacctgttatccgaacgggaggaggcattaaaacagcacaagacactcagccaggaattggtaaacttgcggggagaactcgtgacggcatcaaccacatgtgaaaagctggagaaagccaggaatgagctccagacagtgtacgaggcgttcgtccagcaacatcaagctgagaagacagaacgggaaaacagactgaaggaattctatactcgtgaatatgagaaactgcgtgacacctacattgaggaggccgaaaagtacaagatgcagctccaggagcaattcgacaatcttaacgctgcacacgagacctccaaactcgagattgaagctagccacagcgaaaagcttgaactgctcaaaaaggcctatgaggcatcactctctgagatcaagaagggacacgagattgagaaaaaaagccttgaagacctgctgtccgagaagcaggagtcactggaaaaacagataaacgacctaaaatctgagaacgacgcactgaacgagaagctgaaatccgaggagcaaaaaagaagagcccgcgagaaagcgaatttgaagaacccccagattatgtaccttgaacaggaattggagagtttgaaggccgttttggagataaagaatgaaaagttacaccagcaagatatcaagctgatgaaaatggagaagctagtggataacaacacagcactcgttgataagctgaagaggttccagcaggagaacgaggagttgaaagctaggatggacaagcatatggccatcagccgccagttaagcacagaacaagccgtgctgcaggagtcactagagaaggaatccaaggtcaacaagcgcctttccatggaaaacgaagaactcctttggaaattgcacaatggggatttatgtagccccaagaggtctcccacttcctcggcaatacctctgcagtccccccggaattcaggtagctttccttccccaagcatttccccccggtag

SEQ ID NO: 284735 - DNA, 3651 bp, Artificial Sequence
  derived and/or modified sequence
atgaccgacgataattcagacgataaaattgaggacgagttgcagaccttcttcaccagtgataaggacggcaatacccacgcatacaacccaaaatccccccccacacagaactcttctgcatcttcagtcaattggaatagtgccaatcccgatgacatggtcgttgactacgagacagatccagctgtagtcaccggcgaaaacatctcgttaagcttacagggcgtcgaagtgtttggccacgaaaaaagtagcagtgactttatctccaaacaggttttggatatgcataaagatagtatatgccagtgtccagctctggtgggcaccgagaagccgaagtacctccagcatagctgccactcgttggaagcggtggaggggcaaagtgtggaaccttccctgcctttcgtgtggaagcccaacgacaacctaaattgcgccggatattgcgatgcgttggagctaaatcagacatttgatatgacagtggacaaagtcaattgcactttcatatcccatcacgcaattggaaagagtcagagttttcacacagcaggcagccttccccccaccgggagacggagtggctctacctcaagccttagctacagtacatggacctctagccattcagataagacccacgcccgcgaaactacatacgatagggaatcattcgagaacccccaggttaccccatcggaggcccaggacatgacctacacagctttctcagacgtggtgatgcagtccgaggtgtttgtaagtgacatcgggaaccagtgtgcttgctcaagcgggaaagtgacttcagaatacactgatggttcacaacagcgtctggtcggcgaaaaggagacccaagccctgactccagtgtctgacgggatggaggtccctaatgattcagcgctccaggagtttttttgccttagtcacgacgagagcaattcagaaccccactcccagtcaagttacaggcacaaagagatggggcagaatcttagagagacagtgagctattgcctcatcgatgacgagtgcccactgatggtcccagcctttgacaagtccgaagcccaggtgctcaatccagagcataaggttactgaaacagaagatacccagatggtgagtaaagggaaggaccttggcactcagaatcacacgtctgagctgattctctcgtcaccccctggacagaaggtgggctcctccttcggactcacttgggacgctaatgacatggtcatttctaccgacaaaacaatgtgtatgagtacccctgttctagagccgactaaagtgacatttagcgtaagccctatagaggctaccgaaaagtgcaagaaagtggaaaagggtaaccgcggattaaaaaatattcctgattccaaagaggccccggtcaatctgtgtaaacccagtctgggaaaatctacaattaaaacaaacactccaattggttgcaaagtgcgcaagacggagatcatctcgtaccccagacctaatttcaagaacgttaaggccaaggtgatgtcacgtgccgtcctgcagccaaaggatgcggccctctctaaggtcacaccaagaccacagcaaacatcggcttctagcccatccagcgtcaacagccgccaacagacggttctgtcacggacaccgcgtagtgatttaaatgctgataagaaggccgagatactcatcaataaaacacacaagcaacagtttaacaaactgatcacatctcaggccgttcatgtaacaacacattctaagaatgcaagccatcgagttcccaggacgacaagcgcagtcaagagcaaccaggaggacgtggataaagccagctcttctaactccgcctgtgaaacggggtccgtgtctgccttgttccagaaaataaaggggatcttaccggtcaagatggaatccgccgagtgcctggagatgacttacgtgcctaacattgacaggatctcgccagaaaagaaaggagaaaaggagaacggtacgagcatggagaaacaggaattgaaacaagaaattatgaacgagacgttcgagtacggcagcctatttttagggagcgctagcaagacgaccactacgtccgggagaaacattagtaaaccagacagctgcgggcttagacagatcgctgctcctaaggccaaagtggggcctcctgtgagctgtctcaggcgaaatagcgataatagaaaccctagtgcagacagggcggtgtccccccagcgcattagacgggtgagtagctctgctggtaatgccgccgtgattaaatatgaggagaaaccgccgaagcctgcattccaaaacggatcttccggctcgttctaccttaaaccattggtctctcgcgcccacgttcatttaatgaagacccctcccaagggccccagtcggaaaaatctcttcaccgctctgaatgccgtggagaaatcaagacagaaaaatccgcgttcactttgcatccaaccccagacagctccagatgctctgccccctgaaaagactttggagcttacacagtacaaaactaaatgtgaaaatcaatcaggctttattctgcagttgaagcaactgttggcttgtggcaacacaaaattcgaggcactaactgtggtaatccagcatctcctcagcgagcgcgaggaagctctgaagcaacataaaaccctctctcaggaattggtaaatttacgcggcgagctcgttacggccagcaccacatgcgagaagctcgagaaggctcggaacgagctccagactgtgtatgaggctttcgtgcagcagcaccaagccgagaagacggagcgggaaaaccgactgaaggaattttatacacgggagtacgagaagctgcgagacacatatattgaggaagctgagaaatacaagatgcagctgcaggagcaattcgacaacctgaacgccgcgcacgagacttctaaacttgaaattgaggccagtcattcggagaaactcgaactgttgaaaaaagcttatgaagcttccctctccgaaattaagaaagggcatgagatcgagaagaagtctctggaggatttactgagcgaaaaacaagagagcctcgagaagcaaattaatgatctgaagagcgagaacgacgctttgaacgaaaaacttaagtccgaggaacaaaaacggagagccagggaaaaagcaaacctgaagaatcctcagatcatgtacctcgaacaagaacttgaatctcttaaggcagtccttgagattaagaatgagaagcttcaccaacaggacattaagctgatgaagatggaaaagttagtagacaacaataccgcactggtggataagttgaaaaggttccagcaagaaaacgaggaacttaaagcaaggatggataagcacatggccatctcccggcagctttcaactgagcaggctgttctacaggagagcctggagaaagaaagtaaagttaacaagaggctcagcatggaaaacgaagaattactctggaagctacataacggagacctgtgtagccccaaacggtccccaacatcaagtgcaattccacttcaaagccctcggaactccggctcattcccaagcccctcaatcagcccaaggtag

SEQ ID NO: 284736 - DNA, 3651 bp, Artificial Sequence
  derived and/or modified sequence
atgacagatgacaacagtgatgacaagattgaagatgagctgcagaccttcttcaccagtgacaaggatggcaacacccacgcctacaaccccaagagcccccccacccagaacagcagcgccagctctgtgaactggaacagcgccaacccagatgacatggtggtggactatgaaacagatcctgctgtggtgactggagagaacatcagcctgagcctgcagggcgtggaggtgtttggccacgagaagagcagcagtgacttcatcagcaagcaggtgctggacatgcacaaggacagcatctgccagtgcccagccctggtgggcacagagaagcccaagtacctgcagcacagctgccacagcctggaggccgtggagggccagagcgtggagcccagcctgccctttgtgtggaagcccaatgacaacctgaactgtgccggctactgtgatgccctggagctgaaccagacctttgacatgacagtggacaaggtgaactgcaccttcatcagccaccacgccatcggcaagagccagagcttccacacagctggcagcctgcccccaactggaagaagaagtggcagcaccagcagcctgagctacagcacctggaccagcagccacagcgacaagacccacgcccgggagaccacctatgaccgggagagctttgagaacccccaggtgacccccagcgaggcccaggacatgacctacacagccttcagtgatgtggtgatgcagagcgaggtgtttgtgtctgacatcggcaaccagtgtgcctgcagcagcggcaaggtgaccagcgagtacacagatggcagccagcagaggctggtgggggagaaggagacccaggccctgacccctgtgtctgatggcatggaggtgcccaatgattctgccctgcaggagttcttctgcctgagccatgatgagagcaacagcgagccccacagccagagcagctaccgccacaaggagatgggccagaacctgcgggagaccgtgtcctactgcctgattgatgatgaatgtcccctgatggtgcctgcctttgacaagtctgaggcccaggtgctgaaccctgagcacaaggtgacagaaacagaggacacccagatggtgtccaagggcaaggacctgggcacccagaaccacaccagcgagctgatcctgagcagccccccaggccagaaggtgggcagcagctttggcctgacctgggatgccaatgacatggtgatcagcacagacaagaccatgtgcatgagcacccctgtgctggagcccaccaaggtgaccttctctgtgagccccatcgaggccacagagaagtgcaagaaggtggagaagggcaacagaggcctgaagaacatcccagacagcaaggaggcccctgtgaacctgtgcaagcccagcctgggcaagagcaccatcaagaccaacacccccatcggctgcaaggtgaggaagacagagatcatctcctacccccggcccaacttcaagaatgtgaaggccaaggtgatgagcagagctgtgctgcagcccaaggatgctgccctgagcaaggtgaccccccggccccagcagaccagcgccagcagccccagctctgtgaacagccggcagcagacagtgctgagcaggacccccaggagtgacctgaatgctgacaagaaggccgagatcctgatcaacaagacccacaagcagcagttcaacaagctgatcaccagccaggccgtgcacgtgaccacccacagcaagaatgccagccaccgggtgcccaggaccaccagcgctgtgaagagcaaccaggaggatgtggacaaggccagcagcagcaacagcgcctgtgaaacaggctctgtgtctgccctcttccagaagatcaagggcatcctgcctgtgaagatggagagcgcagaatgtctggagatgacctacgtgcccaacatcgaccgcatcagccctgagaagaagggggagaaggaaaatggcacctccatggagaagcaggagctgaagcaggagatcatgaatgagacctttgaatatggcagcctcttcctgggcagcgccagcaagaccaccaccaccagcggcaggaacatcagcaagccagacagctgtggcctgcggcagattgctgcccccaaggccaaggtgggcccccctgtgtcctgcctgcggaggaacagcgacaacagaaaccccagcgctgacagagctgtgagcccccagaggatcagaagagtgagcagcagcgctggaaatgctgctgtgatcaagtatgaggagaagccacccaagccagccttccagaatggcagcagcggcagcttctacctgaagcccctggtgtcccgggcccacgtgcacctgatgaagaccccacccaagggccccagcaggaagaacctcttcaccgccctgaatgctgtggagaagagccggcagaagaaccccaggagcctgtgcatccagccccagacagccccagatgccctgcccccagagaagaccctggagctgacccagtacaagaccaagtgtgagaaccagagcggcttcatcctgcagctgaagcagctgctggcctgtggcaacaccaagtttgaggccctgactgtggtgatccagcacctgctgtctgagcgggaggaggccctgaagcagcacaagaccctgagccaggagctggtgaacctgcggggggagctggtgacagccagcaccacctgtgagaagctggagaaggccagaaatgagctgcagacagtgtatgaggcctttgtgcagcagcaccaggccgagaagacagagcgggagaaccggctgaaggagttctacacccgggagtatgagaagctgcgggacacctacatcgaggaggccgagaagtacaagatgcagctgcaggagcagtttgacaacctgaatgctgcccacgagaccagcaagctggagattgaggccagccacagcgagaagctggagctgctgaagaaggcctatgaggccagcctgtctgagatcaagaagggccatgaaattgagaagaagagcctggaggacctgctgtctgagaagcaggagagcctggagaagcagatcaatgacctgaagtcagaaaatgatgccctgaatgagaagctgaagtctgaggagcagaagaggcgggcccgggagaaggccaacctgaagaacccccagatcatgtacctggagcaggagctggagagcctgaaggctgtgctggagatcaagaatgagaagctgcaccagcaggacatcaagctgatgaagatggagaagctggtggacaacaacacagccctggtggacaagctgaagcgcttccagcaggagaatgaggagctgaaggccaggatggacaagcacatggccatcagccggcagctgagcacagagcaggccgtgctgcaggagagcctggagaaggagagcaaggtgaacaagaggctgtccatggagaatgaggagctgctgtggaagctgcacaacggggacctgtgcagccccaagaggagccccaccagcagcgccatccccctgcagagccccagaaattctggcagcttccccagccccagcatcagccccaggtag

SEQ ID NO: 284737 - DNA, 6256 bp, Artificial Sequence
  derived and/or modified sequence
aaagggggcggcagcgccggcggagcggaggcgggtctcacgtgggccagcgcagagcctgcggaagggacggatgcggatctcgtcgctgtcaccttgaaagtgaccgaggggcttgactgtggactccttacgccgcccacccgggcccggcggtcccagccttctcgcagggccccttctcagcagaagcaagcggggccgagaaagcgggtggaatagggttgctgcaggtcccaaagacccctcgtggcgcctcgctactttctgcagcttgtttgcactttttcacgctctagaaaaatctcatcttaattaagggaacaacaaatcatttaatcttcagagcatcttagactgaaaacctttcaactgtgctgaaaaacctagaagacagaccattttgcccaccctctcatttaaaaggaattgaagaagaaataaaatggcagaggtttaaggttactattcaggatgactgatgataattcagatgataaaatagaagatgaattgcaaaccttctttaccagtgataaagatggaaatacacatgcatacaacccgaaatcaccacctacacaaaactcttcagccagcagtgtgaactggaattctgccaacccagatgacatggtggttgattatgaaactgaccctgctgtagttactggtgaaaatatttctttaagccttcagggtgttgaagtatttggtcatgaaaagtcttctagtgatttcattagtaagcaggtgttagatatgcataaagattctatttgtcagtgtcctgcacttgtaggtactgagaagcccaaatatctgcaacacagttgtcattccctagaagcagttgagggccagagtgttgagccatctttgccttttgtgtggaagcctaatgacaatttgaactgtgcaggctactgtgatgccttggagctaaaccaaacatttgacatgacagtggataaagttaactgcacctttatatcacatcatgccatcggaaagagtcagtccttccatactgctggaagcctgccaccaactggtaggagaagtggaagtacatcttctttatcctattccacttggacatcttcccattctgataagacgcatgcaagagaaactacttatgatagagaaagctttgaaaaccctcaagtcacaccatcagaagcccaagacatgacttacacagcattttctgatgtggtgatgcaaagtgaggtttttgtttcagatattggaaatcagtgtgcatgttcttcaggaaaggtcaccagtgagtacacagatggatcacaacaaagactagttggagaaaaggagacacaagcactaacaccagtttctgatggcatggaagtccccaatgattctgcattacaagagttcttttgtttatcccatgatgaatccaatagcgaaccacattcacagagctcatacaggcacaaggaaatgggccaaaatctgagagagacagtgtcctattgtcttattgatgatgaatgccctttaatggtgccagcttttgataagagcgaagctcaagtgctgaacccagagcataaagtcactgagactgaagacacacaaatggtctccaaaggaaaggatttgggaacccaaaatcatacctcagaattgattctaagtagcccgccaggacaaaaggtgggctcgtcatttggactgacttgggatgcaaatgatatggtcattagcacagacaaaacgatgtgcatgtcaacaccagtcctagaacccacaaaagtaaccttttctgtttcaccgattgaagcgacggagaaatgtaagaaagtggagaagggtaatcgagggcttaaaaacataccagactcgaaggaggcacctgtgaacctgtgtaaacccagtttaggaaaatcaacaatcaaaacgaataccccaataggctgcaaagttagaaaaactgaaattataagttacccaagaccaaacttcaagaatgtcaaagcaaaagttatgtctagagcagtgttgcagcccaaagatgctgctttatcaaaggtcacgcccagacctcagcagaccagtgcctcatcaccctcatcagtgaattcaagacaacaaacagtcttgagcagaacaccgagatctgacttgaatgcagacaaaaaagcagaaattctaattaacaagacacataagcagcagtttaataaactcattactagccaggctgtgcatgttacaactcattctaaaaatgcttcacacagggttccaagaacaacatctgccgtgaaatcgaatcaggaagatgttgacaaagccagttcttctaactcagcatgcgagaccgggtccgtttctgcgttgtttcagaagatcaaaggcatactccctgttaaaatggaaagtgcagaatgtttggaaatgacctatgttcccaacattgataggattagccctgaaaagaagggtgaaaaagaaaatgggacatctatggaaaaacaagagctgaaacaagagattatgaatgagacttttgaatatggttctctgtttttgggctctgcttcaaaaacaacgaccacctcaggtaggaatatatccaagcctgactcctgcggtttgaggcaaatagctgctccaaaagccaaagtggggccccctgtttcctgtttgaggcggaacagtgacaatagaaatcccagtgctgatcgagccgtatctcctcagaggatcaggcgtgtgtccagttctgctggtaatgccgctgtcatcaaatatgaggagaaacctccaaaaccagcatttcagaatggttcctcaggatccttttatttgaagcctttggtatccagggctcatgttcacttgatgaaaactcctccaaaaggtccttcgagaaaaaatttatttacagctcttaatgcagttgaaaagagcaggcaaaagaatcctcgaagcttatgtatccagccacagacagctcccgatgcgctgccccctgagaaaacacttgaattgacgcaatataaaacaaaatgtgaaaaccaaagtggatttatcctgcagctcaagcagcttcttgcctgtggtaataccaagtttgaggcattgacagttgtgattcagcacctgctgtctgagcgggaggaagcactgaaacaacacaaaaccctatctcaagaacttgttaacctccggggagagctagtcactgcttcaaccacctgtgagaaattagaaaaagccaggaatgagttacaaacagtgtatgaagcattcgtccagcagcaccaggctgaaaaaacagaacgagagaatcggcttaaagagttttacaccagggagtatgaaaagcttcgggacacttacattgaagaagcagagaagtacaaaatgcaattgcaagagcagtttgacaacttaaatgctgcgcatgaaacctctaagttggaaattgaagctagccactcagagaaacttgaattgctaaagaaggcctatgaagcctccctttcagaaattaagaaaggccatgaaatagaaaagaaatcgcttgaagatttactttctgagaagcaggaatcgctagagaagcaaatcaatgatctgaagagtgaaaatgatgctttaaatgaaaaattgaaatcagaagaacaaaaaagaagagcaagagaaaaagcaaatttgaaaaatcctcagatcatgtatctagaacaggagttagaaagcctgaaagctgtgttagagatcaagaatgagaaactgcatcaacaggacatcaagttaatgaaaatggagaaactggtggacaacaacacagcattggttgacaaattgaagcgtttccagcaggagaatgaagaattgaaagctcggatggacaagcacatggcaatctcaaggcagctttccacggagcaggctgttctgcaagagtcgctggagaaggagtcgaaagtcaacaagcgactctctatggaaaacgaggagcttctgtggaaactgcacaatggggacctgtgtagccccaagagatcccccacatcctccgccatccctttgcagtcaccaaggaattcgggctccttccctagccccagcatttcacccagatgacacctccccaaagtccacagactctctgaaagcattttgatgcaggtctgcaggactgaccccaaggaggaacgtgggcacaagaggtatatcagcacacgtgtgatcaccgtagggtaactggagcgtcaccaccggcggaatcgcagcttctgagactggaactctggaggaagacttttgcctccgtccaaaagattcctccaaaaaaagatttaaaaaaagatttcggcatcgacacggacgttgttgcacaaagcacttaaagaacgagagcatcttgttcattgcctttttcacctaagcatagggggaaaaactctcagggccctattaagatttataacctttgtaatgttcttcaccacagacaccttcttgtgagttttcagtctgactgtgggggtggggggtgtgaatgaaatggatgtcacagagtgtcatgtgtctgatgcagcctcctctgctgtgtattaaatgtcaaaatctgaatatatctggatatgtactaatcaaataataatcaatcaatcagcatatacatttcagccaaagccatagaagaaaaagcaatagttgcttgaattatgatcatctaccaccaactctgctcagccctgtaacagggtagggagagggtataacaggaagagctttgacttgtccctgtctatacattctctgtatcttttgggggtaacttcttggcagtttttcagtgttcagccatgtcagttgaaactagatttttctgtagattttttacttacccatgtgagcctaacactatcctgtaattcattttctcaggctatgtgtaaatgtagaaccctaatttttctataaaaaaacaaactaactaactaactgtgtaaagaaagaaaaagggaagtaccaatgggtttttccaccttatttttacctttgatctacccttgcagatttaacctgtcttcttccctcccattattctcattttccttttacctttctccaccatccagagccacaaaagcaaaccttctacctcctacctacttttctctgggacaaggataaaggaatatgattttccagagccccagagccagctcatcttccaggtgctgaaaccactttccaaataaactaaagcctggatttgatattacaaattttgggaaatcttagaataaagaacgagaacaaggaagtcattggctagtataattaagaaaggtaggattcagtgcttaccgatgatgcagtacttgatagaagaaaacagtctgggaggatagcgctcatttttcagttaccctttaaggagtccctttgtctttgggaaagtagcagaatggtccgcttctttcccatgagtggaaaatgtggcttgtccaactctcctccaggttgcatttcagtttctttccaaaacttattacctcccctaatcctgagactttggaaaaggtggaaggaagaactgttgctttatctccccctccctgcatgtgtcaacattgtgatgtcagtatttactaatctacattcagtggctgtacaaataacagctgtagtaagaagagattcaggatgctagaggtgaatatttgggtcatttacatgtacactacatagcaagttgatactcatgttgcatgttcttttaaattagtgattttgtgtcttaagtctttaacttccaatacttcatcatgtatgtaaccttccatgtttgcttctgataaatggaaatgtaggttcactgccacttcatgagatatctctgctcacgcttccaagttgttctcaatgacattagccaaagttgggtttgccattcatcccctaggcatggtaaatcttgtgttgttccctgctgtcctccgtattacgtgaccggcaaataaatctcatagcagttaatataaaacatctttggaggatgggagagaacaggagggaagatgggaaacaaaatagagaattcttaagattttgtttaaaccaaatgtttcatgtagaatgcaaaatgttggcacgtcaaaaatatgaatgtgtagacaactgtagttgtgctcagtttgtagtgatgggaagtgtattttactctgatcaaataaataatgctggaatactcaagaattgc

SEQ ID NO: 284738 - DNA, 4089 bp, Artificial Sequence
  derived and/or modified sequence
aaacattttatttcttccagggaacaacaaatcatttaatcttcagagcatcttagactgaaaacctttcaactgtgctgaaaaacctagaagacagaccattttgcccaccctctcatttaaaaggaattgaagaagaaataaaatggcagaggtttaaggttactattcaggatgactgatgataattcagatgataaaatagaagatgaattgcaaaccttctttaccagtgataaagatggaaatacacatgcatacaacccgaaatcaccacctacacaaaactcttcagccagcagtgtgaactggaattctgccaacccagatgacatggtggttgattatgaaactgaccctgctgtagttactggtgaaaatatttctttaagccttcagggtgttgaagtatttggtcatgaaaagtcttctagtgatttcattagtaagcaggtgttagatatgcataaagattctatttgtcagtgtcctgcacttgtaggtactgagaagcccaaatatctgcaacacagttgtcattccctagaagcagttgagggccagagtgttgagccatctttgccttttgtgtggaagcctaatgacaatttgaactgtgcaggctactgtgatgccttggagctaaaccaaacatttgacatgacagtggataaagttaactgcacctttatatcacatcatgccatcggaaagagtcagtccttccatactgctggaagcctgccaccaactggtaggagaagtggaagtacatcttctttatcctattccacttggacatcttcccattctgataagacgcatgcaagagaaactacttatgatagagaaagctttgaaaaccctcaagtcacaccatcagaagcccaagacatgacttacacagcattttctgatgtggtgatgcaaagtgaggtttttgtttcagatattggaaatcagtgtgcatgttcttcaggaaaggtcaccagtgagtacacagatggatcacaacaaagactagttggagaaaaggagacacaagcactaacaccagtttctgatggcatggaagtccccaatgattctgcattacaagagttcttttgtttatcccatgatgaatccaatagcgaaccacattcacagagctcatacaggcacaaggaaatgggccaaaatctgagagagacagtgtcctattgtcttattgatgatgaatgccctttaatggtgccagcttttgataagagcgaagctcaagtgctgaacccagagcataaagtcactgagactgaagacacacaaatggtctccaaaggaaaggatttgggaacccaaaatcatacctcagaattgattctaagtagcccgccaggacaaaaggtgggctcgtcatttggactgacttgggatgcaaatgatatggtcattagcacagacaaaacgatgtgcatgtcaacaccagtcctagaacccacaaaagtaaccttttctgtttcaccgattgaagcgacggagaaatgtaagaaagtggagaagggtaatcgagggcttaaaaacataccagactcgaaggaggcacctgtgaacctgtgtaaacccagtttaggaaaatcaacaatcaaaacgaataccccaataggctgcaaagttagaaaaactgaaattataagttacccaagaccaaacttcaagaatgtcaaagcaaaagttatgtctagagcagtgttgcagcccaaagatgctgctttatcaaaggtcacgcccagacctcagcagaccagtgcctcatcaccctcatcagtgaattcaagacaacaaacagtcttgagcagaacaccgagatctgacttgaatgcagacaaaaaagcagaaattctaattaacaagacacataagcagcagtttaataaactcattactagccaggctgtgcatgttacaactcattctaaaaatgcttcacacagggttccaagaacaacatctgccgtgaaatcgaatcaggaagatgttgacaaagccagttcttctaactcagcatgcgagaccgggtccgtttctgcgttgtttcagaagatcaaaggcatactccctgttaaaatggaaagtgcagaatgtttggaaatgacctatgttcccaacattgataggattagccctgaaaagaagggtgaaaaagaaaatgggacatctatggaaaaacaagagctgaaacaagagattatgaatgagacttttgaatatggttctctgtttttgggctctgcttcaaaaacaacgaccacctcaggtaggaatatatccaagcctgactcctgcggtttgaggcaaatagctgctccaaaagccaaagtggggccccctgtttcctgtttgaggcggaacagtgacaatagaaatcccagtgctgatcgagccgtatctcctcagaggatcaggcgtgtgtccagttctgctggtaatgccgctgtcatcaaatatgaggagaaacctccaaaaccagcatttcagaatggttcctcaggatccttttatttgaagcctttggtatccagggctcatgttcacttgatgaaaactcctccaaaaggtccttcgagaaaaaatttatttacagctcttaatgcagttgaaaagagcaggcaaaagaatcctcgaagcttatgtatccagccacagacagctcccgatgcgctgccccctgagaaaacacttgaattgacgcaatataaaacaaaatgtgaaaaccaaagtggatttatcctgcagctcaagcagcttcttgcctgtggtaataccaagtttgaggcattgacagttgtgattcagcacctgctgtctgagcgggaggaagcactgaaacaacacaaaaccctatctcaagaacttgttaacctccggggagagctagtcactgcttcaaccacctgtgagaaattagaaaaagccaggaatgagttacaaacagtgtatgaagcattcgtccagcagcaccaggctgaaaaaacagaacgagagaatcggcttaaagagttttacaccagggagtatgaaaagcttcgggacacttacattgaagaagcagagaagtacaaaatgcaattgcaagagcagtttgacaacttaaatgctgcgcatgaaacctctaagttggaaattgaagctagccactcagagaaacttgaattgctaaagaaggcctatgaagcctccctttcagaaattaagaaaggccatgaaatagaaaagaaatcgcttgaagatttactttctgagaagcaggaatcgctagagaagcaaatcaatgatctgaagagtgaaaatgatgctttaaatgaaaaattgaaatcagaagaacaaaaaagaagagcaagagaaaaagcaaatttgaaaaatcctcagatcatgtatctagaacaggagttagaaagcctgaaagctgtgttagagatcaagaatgagaaactgcatcaacaggacatcaagttaatgaaaatggagaaactggtggacaacaacacagcattggttgacaaattgaagcgtttccagcaggagaatgaagaattgaaagctcggatggacaagcacatggcaatctcaaggcagctttccacggagcaggctgttctgcaagagtcgctggagaaggagtcgaaagtcaacaagcgactctctatggaaaacgaggagcttctgtggaaactgcacaatggggacctgtgtagccccaagagatcccccacatcctccgccatccctttgcagtcaccaaggaattcgggctccttccctagccccagcatttcacccagatgacacctccccaaagtccacagactctctgaaagcattttgatgcaggtctgcaggactgaccccaaggaggaacgtgggcacaagaggtatatcagcacacgtgtgatcaccgtagggtaactggagcgtcaccaccggcggaatcgcagcttctgagactggaactctggaggaagacttttgcctccgtccaaaagattcctccaaaaaaagatttaaaaaaagatttcggcatcgacacggacgttgttgcacaaagcactt

SEQ ID NO: 284739 - DNA, 3651 bp, Artificial Sequence
  derived and/or modified sequence
atgaccgacgacaacagcgacgacaagatcgaggacgagctgcagactttctttacaagcgacaaagatggcaatacccatgcctacaacccaaaaagccctccaactcagaacagcagcgccagctcagtgaattggaacagcgctaatccagacgacatggtagtcgactatgaaaccgatcctgccgtggtgaccggggagaatatttcacttagcctgcaaggagtggaggttttcgggcatgagaaatcctccagtgattttattagtaaacaggtgctggatatgcataaagactccatctgccagtgtcccgctcttgtggggacggagaaaccaaagtatttacagcactcttgtcactcacttgaggcggtggaagggcagtcagtggaacccagcctgccatttgtgtggaaacctaatgacaatttgaattgtgccgggtactgcgatgcattggaactgaatcagacatttgacatgacagtcgacaaggtgaactgcaccttcatcagccaccatgcaattggtaagagtcagtcctttcatacagccgggtccctgccaccaacggggcggcgctccggatctacttcaagcctgtcatacagcacgtggacttcatcgcactctgacaagactcacgcacgagaaacgacttacgacagggaaagcttcgagaaccctcaggtaacccccagtgaagcacaggacatgacttatactgccttttccgacgtcgtaatgcagagcgaggtcttcgtgagtgacattggaaaccagtgtgcatgctcaagcggtaaggtgacatctgagtatacggatggttctcagcaacgcctggtcggcgagaaagagacccaggctttaacacctgtcagcgatggaatggaggtgccaaacgattctgcccttcaggagtttttctgtctgtctcacgacgagagcaactctgagcctcacagccagagtagctaccgtcacaaggaaatgggccagaatctgagagagactgtaagttactgtcttatagatgatgagtgcccacttatggtcccagcattcgataaatctgaagcacaggtcctgaatcctgaacacaaggtgaccgagacagaagacacccaaatggtgtcaaaagggaaagacctcggtacgcagaatcacaccagcgaactaatcctgtccagtcctcctgggcagaaggtgggcagctcgtttgggctgacgtgggatgcgaacgatatggtcatctccacagataagactatgtgcatgtcgacacctgtgctggaacccacgaaggtgaccttctctgtttcgcctatcgaggctactgagaaatgtaagaaggtggagaaaggaaaccgcggcttgaaaaatattcctgacagtaaggaagctccagttaacctatgtaagccttctctggggaagtcgactatcaaaactaacacacctatcggttgcaaagtgaggaaaaccgagattatctcgtatcccagaccaaacttcaaaaatgtgaaagccaaggtgatgagcagggctgtcctgcagcctaaggatgctgctctgagtaaagtcactccacgcccgcagcagacatcagcatccagtccgagctcggtcaatagtcggcaacaaactgtattatcccggacaccccgctccgacttaaatgccgataaaaaagcggaaattctgatcaataagacccacaagcagcaatttaataagttgatcacctcacaggcagtgcatgtgacgacccatagtaagaatgcatcacacagagtacccaggaccaccagtgcggtgaagagcaatcaggaagacgtggacaaggccagctccagtaatagtgcttgcgaaaccggatccgtctccgccctgttccagaagatcaaaggcatactaccagtgaagatggaatccgctgaatgtttagagatgacctacgtccctaatattgaccgaatttctcctgagaagaaaggcgagaaggagaatggcacgtccatggaaaaacaagaacttaagcaggagattatgaatgaaaccttcgagtacggcagtctttttctgggatccgcatcgaagaccaccaccacttcagggagaaatataagcaagcccgacagttgcggcttacggcaaatagctgcaccaaaggcgaaagtcgggccccccgtctcttgtctgcgcaggaattcagacaaccgtaatccaagcgccgatcgcgctgtgtccccgcaaaggatcagaagggtttcttcctccgccggcaacgcagccgtgatcaaatatgaggagaagccgcctaagccagcatttcagaacgggagttctgggagtttctaccttaaacccctggtatccagggctcatgtgcatcttatgaagactccccctaaaggcccctctagaaagaatctcttcaccgcactcaacgcggtggagaagtcacggcagaagaacccacggagtctgtgcattcagccccagactgcccccgacgccttgccccccgaaaaaacattagagctgactcaatacaagacaaaatgcgagaatcagagtgggttcatattgcagttgaaacagctccttgcttgtggtaacacaaaattcgaagccctcaccgttgtaatccagcatctgctctccgagcgagaggaggcgttgaaacaacataaaactctgagtcaggaattggtcaatctgaggggagaactggtgaccgcctctactacctgtgaaaagctggaaaaagcaaggaacgagctgcagactgtatacgaagcttttgtacagcagcaccaggccgaaaaaacagagcgtgaaaaccggctgaaggaattttacacacgggagtatgaaaagctgcgggatacatatatagaagaagctgagaagtacaaaatgcagctccaggagcagttcgacaacctgaacgccgcccacgaaactagtaaactggagatagaagcatctcactctgagaaactggagctcctgaaaaaagcatacgaggctagcctctccgagataaagaaaggacacgagattgagaagaaatctctggaggacctgctatcagagaaacaagaatctctggagaaacagatcaatgacctgaaatccgagaacgatgcgctgaacgagaaactgaagtccgaggaacagaagcgtcgagctagagagaaagccaacctaaaaaatcctcagattatgtatttagaacaggaactggagagtttgaaggcggttttggagatcaaaaacgagaagctgcaccagcaggacattaagttgatgaagatggaaaagctcgtggataataatactgccctggtcgacaaattaaaacggtttcagcaggagaacgaggaactcaaggcacgcatggataagcacatggccatttccagacagcttagcaccgaacaagcagtactccaggaaagtctcgagaaggaatcaaaggttaataaaaggctcagtatggaaaacgaggaactgctctggaagctccacaacggcgatttgtgctcccccaaaagaagtcctacctcatcagccattcccctccagagcccccgcaatagtggctcatttccatcaccaagtatatccccacgctag

SEQ ID NO: 284740 - DNA, 3651 bp, Artificial Sequence
  derived and/or modified sequence
atgaccgacgacaacagcgacgacaagatcgaggacgagctgcagacattttttacctccgataaggatgggaatactcacgcctataaccctaaatctccccctacacaaaattcatccgccagctccgttaactggaattcggccaaccccgacgatatggtggtggactatgaaacagaccccgctgtcgttacaggcgagaacatcagcctgtccctacagggggtcgaggtgtttgggcacgaaaaatcatccagtgactttatatccaagcaggttctggacatgcacaaggatagtatttgtcagtgtcctgccctcgtgggcacagagaagcctaaatacctccagcactcttgccattctctggaggcagtggagggtcagagtgtggaaccaagcctgccgttcgtgtggaagcccaatgacaatctaaattgcgcgggctactgcgatgcccttgaactcaaccagacttttgatatgactgtcgacaaggtaaattgcacattcatttcccaccatgctattggcaagagccagtcattccacactgcaggctctttgccacctacgggcaggaggtccgggtccacatcaagcctgtcgtacagtacatggacttctagccacagtgacaagactcacgccagagagaccacatacgaccgtgagtcttttgagaacccacaagtcacaccaagcgaggctcaggatatgacctacaccgccttcagcgatgtggtgatgcagtctgaagtgttcgtcagcgacataggaaaccagtgtgcgtgcagctctggcaaagtgacatctgagtatacagatggttctcagcagcggcttgtgggagagaaagagacccaagcgctaactcctgtttctgatggcatggaagtcccaaatgactcagctctgcaggagttcttttgcttgtcacatgacgagagcaactcagaaccacactcccagtcttcgtatcgccacaaagaaatgggacaaaacctgagggagaccgtgtcttactgcctcattgatgacgagtgcccactgatggtccccgccttcgataaatctgaggcacaagtgctgaaccccgagcacaaagtgactgagacagaagatacccagatggtgtcaaagggtaaggacctgggaacgcagaatcataccagcgaacttatactgagttcccctcccggccagaaagtcggatctagcttcggcctgacctgggatgcaaacgatatggtcatctccacagacaagacaatgtgcatgagcactcccgtcctggagcctacgaaggtcacattcagcgtgagccccatcgaagctactgaaaagtgcaagaaagtcgaaaaagggaaccgggggttaaagaatattcctgacagtaaagaagcaccggtcaacctctgcaaaccgtccctgggcaaatctaccatcaagacaaatacccctattgggtgcaaagtcagaaagactgagatcatctcctaccccaggccaaatttcaagaacgtgaaggccaaggttatgagtcgggcagttttacagcccaaggacgcagccctgagcaaagtaactcctcggccacaacagacctctgccagttctccgtctagtgtaaatagccggcagcaaacagtgttgtctcgaactccaaggtccgatctaaacgccgataagaaagctgagattctgattaacaaaactcataagcagcagttcaacaagttgattacatcccaagcagtgcacgtcactactcacagtaagaatgcctcacaccgggtccctagaaccaccagtgccgtgaagtctaatcaagaagacgtggataaggcctcaagctcgaattccgcttgcgaaaccgggtcggtgtcagcattgtttcagaagatcaaaggcatcctccctgtcaaaatggagagcgctgaatgtttagagatgacgtatgttcccaatattgaccgaataagtcctgagaaaaagggagagaaagaaaacggcacaagcatggagaagcaggaactgaaacaggagatcatgaacgagactttcgagtatgggtcactgtttctgggaagtgcatcaaaaaccacaacaacctcagggaggaatatatcaaagccagacagctgtgggctgcggcagatcgctgctcctaaggcaaaggttgggccacctgtgtcatgtctgcgccggaactccgacaatcggaacccatccgctgacagagccgtgagtcctcagcggataagacgggtcagtagttctgcaggcaatgctgctgttattaagtacgaagagaaacctcctaaacctgcatttcagaatggatcatccggcagcttctatttgaaacctctcgtcagccgggctcacgtgcatttgatgaagacccccccaaaaggcccgtctagaaaaaacctctttacagctctgaatgcggtagaaaaatcacgacagaaaaatccacggtcactgtgcatccagccgcagactgccccagacgcactgcccccggaaaagacccttgagttaacccagtacaaaaccaaatgtgagaaccagagcggttttattctccaacttaaacaactccttgcctgcgggaacacaaagtttgaggcactgaccgttgtaattcaacatctgctgagcgagcgcgaagaggccctaaaacagcataagacactctcccaggagctggtgaaccttcgaggcgaactggtaactgcttcgaccacgtgcgaaaaactcgagaaagcccgaaatgaattgcagaccgtgtatgaggcattcgtacagcagcaccaggcggagaaaacagagcgagaaaaccgtttgaaggagttctacaccagagaatatgaaaagctacgcgacacttacatcgaggaagccgaaaagtacaagatgcaactgcaggaacagtttgataacctcaatgctgcacatgagaccagcaaactggaaattgaggctagccattctgaaaagcttgagctcctgaagaaagcctatgaagcctcactgagcgaaatcaagaaggggcatgaaattgagaagaagtccttagaggaccttttgtccgaaaagcaggaaagcttagagaaacagatcaacgacttgaagtccgagaatgacgccctcaacgagaagctgaaatctgaggaacagaagcgcagggcccgtgaaaaggccaatttgaaaaaccctcaaattatgtacctcgagcaggagctggaaagtctgaaggctgtgttagagataaagaacgagaaactccaccagcaggatatcaaactgatgaagatggagaagctagtggacaataatacggcgttagtcgataagctgaagaggttccagcaggaaaacgaggagcttaaagcaagaatggacaagcacatggctattagccgccaactgagtacggaacaggcagtgctgcaggaatctcttgagaaagagtcaaaagtgaacaagcgtctgagtatggaaaatgaggagctcctgtggaagctacataatggggatctgtgctcccctaaacgttcccctaccagctcagctatccccttacagagtccccggaactctggttcgtttcccagcccatcaatctccccacgctag

SEQ ID NO: 284741 - DNA, 3651 bp, Artificial Sequence
  derived and/or modified sequence
atgaccgatgataattcagacgacaagatagaggacgagctacagaccttctttacgtccgacaaggatggaaatactcatgcttataacccaaagagtcccccaacccaaaacagttccgcttcgtcagtgaactggaatagtgccaatcccgatgacatggtggtcgactacgaaactgaccccgcagttgtgacaggggagaatatttcactgtccctacagggggtcgaggtgtttggccacgaaaagtcgagttcagattttatctcaaagcaggtattggatatgcacaaagattctatttgtcagtgtcccgcactagtcggtactgaaaaacctaagtacctccagcactcatgccatagccttgaggcagtggaaggccagtccgtcgagccctcactgccattcgtgtggaagccaaacgataacctcaactgtgcgggttactgcgacgcactggagttgaatcagacttttgacatgactgtcgacaaagtgaactgcacatttatttcccatcatgccatcgggaagagccaatccttccacactgcaggatccctgcccccaaccggtaggaggagcggaagcacctcatcccttagctactctacctggacttcttctcactcggacaagacccacgcccgagaaacaacgtatgatcgagaatcctttgaaaacccacaggtcaccccttctgaggcccaggatatgacgtacaccgctttctccgatgtggtgatgcagtcggaggtgttcgtgtcagacatcggaaatcagtgtgcttgtagctccgggaaggtgacttcagagtatactgatgggagccagcagcgcttggtgggtgaaaaagaaacccaggctctgactcccgtttctgacggcatggaagtgcctaacgattcagccctgcaagagtttttttgtctcagccacgacgaatcaaactctgagccccactcgcagtcaagttacaggcacaaagaaatggggcagaatctgagagagactgtatcatattgtctcatcgatgatgagtgccccctgatggtccccgcattcgacaaaagtgaagcccaagtgctgaatccagaacacaaggtgacagaaacggaagatactcagatggtttctaagggtaaagatcttggtactcagaaccacacttcagagctgatcttgtcttctcctcccggtcagaaggtaggatcctcattcgggttgacatgggacgcaaatgacatggtcatatccacggacaaaacaatgtgtatgtccacacccgtattagaaccaacgaaagtgacatttagcgtgtctcctattgaagccaccgagaaatgcaagaaagtcgagaagggcaacagaggcttaaagaatatacccgattccaaagaggcgcctgttaacctctgcaaaccatcacttgggaaatccacaataaaaacaaacacaccgatcgggtgcaaggtgcgaaaaacagaaatcattagctatccaaggccaaattttaagaatgttaaagcgaaagtgatgtcacgggctgttctgcagccaaaagatgcggctctgagtaaggtgactccacgacctcaacagacaagcgcttcgagccccagcagcgtgaattccaggcagcagactgttctctcccgcacccctcggtccgacctgaacgcagataagaaggcagagatactaattaataagacacacaaacagcagtttaacaagctgatcacatcacaggcggtccacgtgacaacacatagtaaaaatgcatcacaccgggtgcctcggaccacctcagcagtcaagtctaatcaagaggacgtagataaagcatctagcagcaactctgcatgcgagaccgggagcgtatccgcactgtttcagaaaattaagggaattctgcctgtcaaaatggaatctgctgaatgcctggagatgacgtatgttccaaatatcgataggatttcacctgagaaaaaaggggagaaggagaacggcacatcaatggaaaagcaggagttaaaacaagagatcatgaacgagaccttcgagtatggcagcctgttcttgggatccgcctccaaaactactactacgtccgggagaaacatctctaaacccgactcatgcggcctgcgccagatcgctgccccaaaggctaaggttggccctcctgtgagctgcctcaggaggaacagcgataacaggaatccatctgccgacagggctgtgagccctcagcgcattcgtcgggtgagctcttcagccggaaacgcagccgtcataaagtacgaagagaagcccccaaagcctgcgtttcagaatggctcctcaggaagcttttatctgaaacccctcgtctcccgcgcacacgttcatttgatgaaaactcctcctaagggtcccagtcgaaagaacctcttcacagcgttaaatgcggtggagaagagccgccagaagaacccacgctcactctgcatccagccccagaccgcaccagatgctttgccccctgaaaaaacccttgaactcacacagtataaaacaaagtgcgaaaaccagtccggcttcatacttcagctcaaacagctcctcgcttgtggtaacactaaatttgaagctctaaccgtcgtcattcagcatcttctatccgagagagaggaagctctgaaacaacacaagaccctttctcaggagttggttaatctgaggggggaactagtgacagcaagcaccacttgcgaaaagctcgaaaaggccaggaatgagttgcaaaccgtgtatgaggcattcgtgcagcagcatcaagctgagaagaccgagcgcgagaaccggcttaaggaattctatactcgggaatatgagaaattaagagatacatacatagaggaggcagagaagtacaaaatgcagctccaggagcagtttgacaacctcaacgcagcccatgagacttccaaactggaaattgaagcatctcattctgaaaaactcgaactcctgaagaaagcctacgaggcatcgttgagcgaaattaaaaaaggacacgaaatcgagaaaaagtctcttgaggacctgctctcagaaaagcaggaatcgctagagaagcagattaatgatctgaaatctgagaatgacgcgctcaatgagaaactcaagtccgaagaacagaagaggcgggctagggagaaagccaacctgaagaacccgcagatcatgtatctcgagcaggagctggagtccctcaaggcagtcctggagataaaaaacgaaaaattacaccagcaagacatcaagttgatgaagatggaaaagcttgttgacaataatacagcgttggtcgataagctaaaacgttttcagcaggagaatgaagaacttaaagcccgaatggacaaacacatggcaatcagtaggcagctatctacagaacaggcagtgctgcaggaatctctggagaaagaaagtaaggttaataagagactgtctatggaaaacgaagaactgttgtggaaactgcacaacggggatttgtgttcgccaaagcgcagccccacctctagcgctatcccactgcagtcccccagaaactccggttcctttccttccccaagtatctctccgcgatag

SEQ ID NO: 284742 - DNA, 3651 bp, Artificial Sequence
  derived and/or modified sequence
atgaccgatgacaattccgatgacaagattgaagatgaactccagacgttcttcactagcgataaggacgggaatactcatgcctataatcctaaatcgccccctacccaaaactcaagtgcttcttctgttaattggaactccgctaacccagatgatatggtcgtggattatgagacagacccagcagtcgtcaccggagagaatatctccctttcactgcagggcgttgaagttttcggacatgaaaaatcaagttcagacttcattagtaaacaggtcctagacatgcacaaagactctatctgtcagtgcccagcattagtaggtactgaaaagcctaaatacctgcaacacagttgtcacagccttgaggccgtggaaggccagagcgttgaacctagcctgcctttcgtgtggaagccaaatgataatttgaattgtgctgggtactgcgacgctttggaacttaaccagaccttcgacatgacagtcgacaaagtcaattgcacttttattagccaccatgccataggcaaatcccagtcctttcacacagctggcagcctcccacccaccgggagaaggtcaggctcaacctccagtctaagctatagtacatggacctcaagtcacagcgataagactcacgcaagagagaccacttacgatagagagtcgtttgagaaccctcaggtgactcccagcgaagcccaagatatgacctatactgcattcagcgacgtcgttatgcagagtgaggtttttgttagtgacataggcaatcaatgcgcctgctcttccggaaaggtgacatccgagtataccgatggcagccagcaacggctagttggtgaaaaggagacacaagccctgacccctgtgtcagacggaatggaggtccctaacgattccgccctgcaagagttcttctgtctcagtcacgacgaatcaaatagcgaacctcacagccagagcagctaccggcataaggagatggggcagaaccttagagagactgtatcttactgtctgatcgacgacgagtgccctctgatggtgcccgcttttgacaaatctgaggctcaggtgcttaacccggagcataaggttaccgagacggaggacacccaaatggtttctaaaggcaaagatcttggaacccaaaaccatacctctgagctgattctgtctagtccgccaggccagaaggtcggatcatctttcggcctgacctgggatgcaaatgatatggtgatttccaccgacaagacgatgtgtatgtctacacctgttctggaacccaccaaagtgacattctcggtctcaccaattgaggctactgagaagtgtaagaaggtagaaaaaggtaatcggggactgaaaaacatccctgatagtaaggaagctcccgtcaacttgtgtaagccgagtttggggaaaagcaccatcaaaacaaatacaccaattgggtgcaaggtccggaagaccgagatcattagctatccacgtcctaatttcaagaacgtgaaagctaaggtcatgtcccgcgcagtgctgcagccaaaggacgcggcattgagtaaagtgactccccgtccacagcaaacttcagcatcttcacctagttctgtaaactccagacagcagaccgttttgtcccgtaccccacgaagtgacctgaacgcagacaagaaggctgagattctcatcaataagacccacaagcagcaattcaacaagctgatcacgtcacaggccgtgcatgtaaccacccactctaagaacgcatctcaccgggtgccccgaacaaccagcgctgtgaagtcaaatcaggaagacgtcgacaaggcatcgtcgtctaactcggcctgtgagaccggctccgtgtcggccctgttccagaaaatcaaaggtatactccccgtgaaaatggagtccgcggagtgtctggaaatgacatatgtgcctaatatcgatcgcatttccccggagaagaaaggggagaaagaaaatgggaccagcatggagaagcaggagttaaaacaggaaattatgaatgagaccttcgagtatggatcactctttctcggatctgccagcaagaccactacaacaagcgggaggaacatcagtaagcctgattcctgtgggttgcggcagatagcagcccctaaggcgaaggtcggaccgccagtgtcctgtttacgcaggaattcagacaaccggaacccttctgctgacagagctgtgagtcctcagcgtatccggagagtgtcctcatctgctggaaacgctgccgttataaaatatgaggagaagccgcctaaaccagcctttcagaatggaagcagtggaagtttctacctgaagcctctcgtgtcccgagctcacgtgcacttaatgaaaacaccgccaaaaggcccttctaggaagaacctgttcaccgcacttaacgctgtggagaagagcaggcagaagaacccccgatctctttgtatacaacctcagacagctcctgatgcactgcccccagagaagaccttggaactcacacagtataagacaaagtgcgagaaccagagtggcttcatcctgcaactgaaacagctgctggcatgcggtaacactaagttcgaagctttgaccgtcgtgatccagcacctgttgagcgaaagggaagaagcattgaaacagcacaagacactgtctcaggaactggtgaacctcaggggcgagctggttaccgcttccactacctgcgagaaactggaaaaggcacgcaatgagctccagactgtatatgaggcctttgttcaacagcaccaagcagagaaaacagagcgtgagaatcgcctgaaggaattttatacaagagagtatgaaaaactcagagatacgtatatcgaagaagcagagaagtacaaaatgcaacttcaggaacagtttgataatctcaacgctgcccatgagacatccaaactggagatcgaggccagccactccgagaagctggagcttttgaaaaaggcctacgaagcgtcactttctgagataaaaaagggccatgagatcgagaaaaagagtttggaagacctgctgagtgagaagcaggagtctttggagaagcagatcaatgacctcaagtccgaaaatgacgctctgaacgagaagcttaagagtgaggagcagaagcggcgagctcgcgagaaagctaacctgaagaacccccagatcatgtatctagagcaggagctggagagtctgaaagccgttttggagataaaaaacgagaagctgcaccagcaagatattaagctcatgaagatggagaagcttgtcgataataatactgcacttgttgacaaacttaagcggttccagcaggaaaacgaagagctcaaggccagaatggataagcacatggcaatcagccgccagctgtctaccgaacaagctgtactccaggaatcattagagaaggaatctaaggtcaacaaacgactctctatggaaaacgaggagttgttgtggaaactgcacaacggggatctgtgtagccctaaacgctcaccaacctcctccgcgatccctctgcagagtcctagaaactccgggagcttcccaagcccttccattagtccacgatag

SEQ ID NO: 284743 - DNA, 2313 bp, Artificial Sequence
  derived and/or modified sequence
atgaccgacgacaacagcgacgacaagatcgaggacgagctgcagaccttcttcaccagcgacaaggacggcaacacccacgcctacaaccccaagagcccccccacccagaacagcagcgccagcagcgtgaactggaacagcgccaaccccgacgacatggtggtggactacgagaccgaccccgccgtggtgaccggcgagaacatcagcctgagcctgcagggcgtggaggtgttcggccacgagaagagcagcagcgacttcatcagcaagcaggtgctggacatgcacaaggacagcatctgccagtgccccgccctggtgggcaccgagaagcccaagtacctgcagcacagctgccacagcctggaggccgtggagggccagagcgtggagcccagcctgcccttcgtgtggaagcccaacgacaacctgaactgcgccggctactgcgacgccctggagctgaaccagaccttcgacatgaccgtggacaaggtgaactgcaccttcatcagccaccacgccatcggcaagagccagagcttccacaccgccggcagcctgccccccaccggcagaagaagcggcagcaccagcagcctgagctacagcacctggaccagcagccacagcgacaagacccacgccagagagaccacctacgacagagagagcttcgagaacccccaggtgacccccagcgaggcccaggacatgacctacaccgccttcagcgacgtggtgatgcagagcgaggtgttcgtgagcgacatcggcaaccagtgcgcctgcagcagcggcaaggtgaccagcgagtacaccgacggcagccagcagagactggtgggcgagaaggagacccaggccctgacccccgtgagcgacggcatggaggtgcccaacgacagcgccctgcaggagttcttctgcctgagccacgacgagagcaacagcgagccccacagccagagcagctacagacacaaggagatgggccagaacctgagagagaccgtgagctactgcctgatcgacgacgagtgccccctgatggtgcccgccttcgacaagagcgaggcccaggtgctgaaccccgagcacaaggtgaccgagaccgaggacacccagatggtgagcaagggcaaggacctgggcacccagaaccacaccagcgagctgatcctgagcagcccccccggccagaaggtgggcagcagcttcggcctgacctgggacgccaacgacatggtgatcagcaccgacaagaccatgtgcatgagcacccccgtgctggagcccaccaaggtgaccttcagcgtgagccccatcgaggccaccgagaagtgcaagaaggtggagaagggcaacagaggcctgaagaacatccccgacagcaaggaggcccccgtgaacctgtgcaagcccagcctgggcaagagcaccatcaagaccaacacccccatcggctgcaaggtgagaaagaccgagatcatcagctaccccagacccaacttcaagaacgtgaaggccaaggtgatgagcagagccgtgctgcagcccaaggacgccgccctgagcaaggtgacccccagaccccagcagaccagcgccagcagccccagcagcgtgaacagcagacagcagaccgtgctgagcagaacccccagaagcgacctgaacgccgacaagaaggccgagatcctgatcaacaagacccacaagcagcagttcaacaagctgatcaccagccaggccgtgcacgtgaccacccacagcaagaacgccagccacagagtgcccagaaccaccagcgccgtgaagagcaaccaggaggacgtggacaaggccagcagcagcaacagcgcctgcgagaccggcagcgtgagcgccctgttccagaagatcaagggcatcctgcccgtgaagatggagagcgccgagtgcctggagatgacctacgtgcccaacatcgacagaatcagccccgagaagaagggcgagaaggagaacggcaccagcatggagaagcaggagctgaagcaggagatcatgaacgagaccttcgagtacggcagcctgttcctgggcagcgccagcaagaccaccaccaccagcggcagaaacatcagcaagcccgacagctgcggcctgagacagatcgccgcccccaaggccaaggtgggcccccccgtgagctgcctgagaagaaacagcgacaacagaaaccccagcgccgacagagccgtgagcccccagagaatcagaagagtgagcagcagcgtgctgcccaaggccgccttcagctag

SEQ ID NO: 284744 - DNA, 2313 bp, Artificial Sequence
  derived and/or modified sequence
atgaccgacgacaacagcgacgacaaaattgaggacgagttgcaaacgttctttactagtgacaaggatggtaatactcatgcatacaatcccaagagtccccctacccagaacagtagcgcttccagtgtcaactggaacagtgccaacccagacgacatggtcgtcgattacgaaaccgatcctgccgtggttaccggagagaatattagcctgtcattgcagggggtggaagtttttgggcacgagaagtccagttctgattttatttccaaacaggtgctggatatgcacaaggatagcatttgtcagtgccctgcactggtaggaaccgaaaaaccaaagtaccttcagcacagttgccactcactggaagcagtagagggccaatctgtggaaccatcattaccctttgtgtggaaacctaacgacaacctgaattgtgcaggctactgtgatgccctagagttgaaccagactttcgacatgacagtcgacaaggtcaactgcacattcatttcacaccacgccatcgggaagtcacagagctttcacaccgcaggaagcctcccacctaccgggcgacggagtggctccacctcaagtctgagctactccacgtggacttccagtcacagtgacaagactcacgcccgggagactacatacgatagggaatccttcgagaacccacaggtcacaccatcggaagcacaggacatgacgtatactgccttcagtgacgtggtgatgcaatccgaggtgttcgtatccgacattggcaatcaatgtgcctgcagctctggaaaggtcacatccgagtataccgacggaagccagcagcggctcgtaggggagaaggagacacaagccttgacaccagtctccgacggtatggaagtcccgaatgactccgccctgcaagagtttttttgtctctctcacgacgagtccaattctgagcctcactcacaatcctcttataggcataaggaaatggggcagaacctgcgagaaacggtatcttactgtctcatagatgatgaatgtccactaatggttccggccttcgataagtcagaagctcaggtgctaaatcctgagcacaaggtcacagaaaccgaagacacacaaatggtctcaaagggaaaggacctggggacacaaaatcatacgagcgagttgattttgtccagcccacccggccagaaggtggggtcaagcttcgggctaacttgggatgcaaacgacatggtgattagtacagacaaaacaatgtgcatgtccacaccagtgctcgaacccacgaaggtcacctttagcgtctctccaattgaggcaactgaaaagtgcaagaaagtggagaagggaaaccgcggcctgaagaacatcccggactctaaggaggctcccgttaacctgtgtaagcccagcctcgggaaaagtactataaagaccaacaccccaattggttgtaaagtgagaaaaactgagatcattagctaccccaggcccaattttaaaaacgttaaggctaaagtgatgtcaagggccgtgttacaacccaaggacgccgcattgtcgaaggtgacaccccgcccgcagcagacttctgcatcaagtcctagttcagtgaatagcagacagcagacagtgcttagtcgcacaccccggtccgacctgaacgctgataagaaggctgagattttgatcaacaaaactcacaaacagcagttcaacaaactcatcacaagccaggccgtacacgtgaccacacactctaaaaacgctagtcaccgggttcccagaactacttctgcggtgaagagcaaccaggaggatgtggataaagccagtagctccaattccgcatgcgagaccggatctgtttccgcgctgttccagaagataaaggggatcctgcctgtgaaaatggagtctgctgagtgcctcgagatgacatacgttccgaatatcgacagaatcagccctgagaagaagggggagaaagaaaacgggaccagcatggaaaaacaggagttaaagcaggagattatgaatgagaccttcgagtacggttccctatttttgggtagcgcatccaagactacaaccacgtcaggaagaaacatttctaaacccgattcctgcggcctgcggcagatcgccgcccctaaggccaaggttggacccccggtatcatgcttgcgcaggaattccgataaccggaacccttcagcagacagggcggtcagtccccagagaatccgtagggtgagtagctctgtactgccaaaggcagcattttcttag

SEQ ID NO: 284745 - DNA, 2313 bp, Artificial Sequence
  derived and/or modified sequence
atgacagatgacaacagtgatgacaagattgaagatgagctgcagaccttcttcaccagtgacaaggatggcaacacccacgcctacaaccccaagagcccccccacccagaacagcagcgccagctctgtgaactggaacagcgccaacccagatgacatggtggtggactatgaaacagatcctgctgtggtgactggagagaacatcagcctgagcctgcagggcgtggaggtgtttggccacgagaagagcagcagtgacttcatcagcaagcaggtgctggacatgcacaaggacagcatctgccagtgcccagccctggtgggcacagagaagcccaagtacctgcagcacagctgccacagcctggaggccgtggagggccagagcgtggagcccagcctgccctttgtgtggaagcccaatgacaacctgaactgtgccggctactgtgatgccctggagctgaaccagacctttgacatgacagtggacaaggtgaactgcaccttcatcagccaccacgccatcggcaagagccagagcttccacacagctggcagcctgcccccaactggaagaagaagtggcagcaccagcagcctgagctacagcacctggaccagcagccacagcgacaagacccacgcccgggagaccacctatgaccgggagagctttgagaacccccaggtgacccccagcgaggcccaggacatgacctacacagccttcagtgatgtggtgatgcagagcgaggtgtttgtgtctgacatcggcaaccagtgtgcctgcagcagcggcaaggtgaccagcgagtacacagatggcagccagcagaggctggtgggggagaaggagacccaggccctgacccctgtgtctgatggcatggaggtgcccaatgattctgccctgcaggagttcttctgcctgagccatgatgagagcaacagcgagccccacagccagagcagctaccgccacaaggagatgggccagaacctgcgggagaccgtgtcctactgcctgattgatgatgaatgtcccctgatggtgcctgcctttgacaagtctgaggcccaggtgctgaaccctgagcacaaggtgacagaaacagaggacacccagatggtgtccaagggcaaggacctgggcacccagaaccacaccagcgagctgatcctgagcagccccccaggccagaaggtgggcagcagctttggcctgacctgggatgccaatgacatggtgatcagcacagacaagaccatgtgcatgagcacccctgtgctggagcccaccaaggtgaccttctctgtgagccccatcgaggccacagagaagtgcaagaaggtggagaagggcaacagaggcctgaagaacatcccagacagcaaggaggcccctgtgaacctgtgcaagcccagcctgggcaagagcaccatcaagaccaacacccccatcggctgcaaggtgaggaagacagagatcatctcctacccccggcccaacttcaagaatgtgaaggccaaggtgatgagcagagctgtgctgcagcccaaggatgctgccctgagcaaggtgaccccccggccccagcagaccagcgccagcagccccagctctgtgaacagccggcagcagacagtgctgagcaggacccccaggagtgacctgaatgctgacaagaaggccgagatcctgatcaacaagacccacaagcagcagttcaacaagctgatcaccagccaggccgtgcacgtgaccacccacagcaagaatgccagccaccgggtgcccaggaccaccagcgctgtgaagagcaaccaggaggatgtggacaaggccagcagcagcaacagcgcctgtgaaacaggctctgtgtctgccctcttccagaagatcaagggcatcctgcctgtgaagatggagagcgcagaatgtctggagatgacctacgtgcccaacatcgaccgcatcagccctgagaagaagggggagaaggaaaatggcacctccatggagaagcaggagctgaagcaggagatcatgaatgagacctttgaatatggcagcctcttcctgggcagcgccagcaagaccaccaccaccagcggcaggaacatcagcaagccagacagctgtggcctgcggcagattgctgcccccaaggccaaggtgggcccccctgtgtcctgcctgcggaggaacagcgacaacagaaaccccagcgctgacagagctgtgagcccccagaggatcagaagagtgagcagctctgtgctgcccaaggccgccttctcctag

SEQ ID NO: 284746 - DNA, 2787 bp, Artificial Sequence
  derived and/or modified sequence
aaagggggcggcagcgccggcggagcggaggcgggtctcacgtgggccagcgcagagcctgcggaagggacggatgcggatctcgtcgctgtcaccttgaaagtgaccgaggggcttgactgtggactccttacgccgcccacccgggcccggcggtcccagccttctcgcagggccccttctcagcagaagcaagcggggccgagaaagcgggtggaatagggttgctgcaggtcccaaagacccctcgtggcgcctcgctactttctgcagcttgtttgcactttttcacgctctagaaaaatctcatcttaattaagggaacaacaaatcatttaatcttcagagcatcttagactgaaaacctttcaactgtgctgaaaaacctagaagacagaccattttgcccaccctctcatttaaaaggaattgaagaagaaataaaatggcagaggtttaaggttactattcaggatgactgatgataattcagatgataaaatagaagatgaattgcaaaccttctttaccagtgataaagatggaaatacacatgcatacaacccgaaatcaccacctacacaaaactcttcagccagcagtgtgaactggaattctgccaacccagatgacatggtggttgattatgaaactgaccctgctgtagttactggtgaaaatatttctttaagccttcagggtgttgaagtatttggtcatgaaaagtcttctagtgatttcattagtaagcaggtgttagatatgcataaagattctatttgtcagtgtcctgcacttgtaggtactgagaagcccaaatatctgcaacacagttgtcattccctagaagcagttgagggccagagtgttgagccatctttgccttttgtgtggaagcctaatgacaatttgaactgtgcaggctactgtgatgccttggagctaaaccaaacatttgacatgacagtggataaagttaactgcacctttatatcacatcatgccatcggaaagagtcagtccttccatactgctggaagcctgccaccaactggtaggagaagtggaagtacatcttctttatcctattccacttggacatcttcccattctgataagacgcatgcaagagaaactacttatgatagagaaagctttgaaaaccctcaagtcacaccatcagaagcccaagacatgacttacacagcattttctgatgtggtgatgcaaagtgaggtttttgtttcagatattggaaatcagtgtgcatgttcttcaggaaaggtcaccagtgagtacacagatggatcacaacaaagactagttggagaaaaggagacacaagcactaacaccagtttctgatggcatggaagtccccaatgattctgcattacaagagttcttttgtttatcccatgatgaatccaatagcgaaccacattcacagagctcatacaggcacaaggaaatgggccaaaatctgagagagacagtgtcctattgtcttattgatgatgaatgccctttaatggtgccagcttttgataagagcgaagctcaagtgctgaacccagagcataaagtcactgagactgaagacacacaaatggtctccaaaggaaaggatttgggaacccaaaatcatacctcagaattgattctaagtagcccgccaggacaaaaggtgggctcgtcatttggactgacttgggatgcaaatgatatggtcattagcacagacaaaacgatgtgcatgtcaacaccagtcctagaacccacaaaagtaaccttttctgtttcaccgattgaagcgacggagaaatgtaagaaagtggagaagggtaatcgagggcttaaaaacataccagactcgaaggaggcacctgtgaacctgtgtaaacccagtttaggaaaatcaacaatcaaaacgaataccccaataggctgcaaagttagaaaaactgaaattataagttacccaagaccaaacttcaagaatgtcaaagcaaaagttatgtctagagcagtgttgcagcccaaagatgctgctttatcaaaggtcacgcccagacctcagcagaccagtgcctcatcaccctcatcagtgaattcaagacaacaaacagtcttgagcagaacaccgagatctgacttgaatgcagacaaaaaagcagaaattctaattaacaagacacataagcagcagtttaataaactcattactagccaggctgtgcatgttacaactcattctaaaaatgcttcacacagggttccaagaacaacatctgccgtgaaatcgaatcaggaagatgttgacaaagccagttcttctaactcagcatgcgagaccgggtccgtttctgcgttgtttcagaagatcaaaggcatactccctgttaaaatggaaagtgcagaatgtttggaaatgacctatgttcccaacattgataggattagccctgaaaagaagggtgaaaaagaaaatgggacatctatggaaaaacaagagctgaaacaagagattatgaatgagacttttgaatatggttctctgtttttgggctctgcttcaaaaacaacgaccacctcaggtaggaatatatccaagcctgactcctgcggtttgaggcaaatagctgctccaaaagccaaagtggggccccctgtttcctgtttgaggcggaacagtgacaatagaaatcccagtgctgatcgagccgtatctcctcagaggatcaggcgtgtgtccagttctgttttgccaaaagctgctttctcatga

SEQ ID NO: 284747 - DNA, 2313 bp, Artificial Sequence
  derived and/or modified sequence
atgaccgacgacaacagcgacgacaagatcgaggacgagctgcagacatttttcacgagtgacaaggacgggaacactcatgcctataatccaaagtcgcctcctacccaaaattcgtcagcctcatctgtcaactggaactcagccaatcccgatgatatggtggtcgactacgagactgatccagccgtagtcaccggcgaaaatatatctctgtctttgcagggagtcgaggtgttcggacatgaaaaatcatcgagtgatttcatctctaaacaggtccttgacatgcataaggactctatttgccaatgtcccgctctagtggggacggagaagcccaaatatttgcagcattcctgccattcattggaagcagtggagggccaatctgtcgagccatccttaccctttgtctggaagccgaacgataatctgaattgcgccgggtattgtgatgcattggagctgaatcagacatttgacatgaccgtagataaggttaactgtacctttatcagccaccatgccatcggtaagtcacaatcttttcatacagcagggtctcttccccccactgggagacgttcgggttcaacgtccagcttgtcctattcaacctggacgtcttctcactccgataaaactcacgcccgcgagacaacttacgatcgggagtcattcgagaatcctcaagtcacccccagtgaagcccaggatatgacgtacacagccttcagcgacgtggtgatgcagtccgaagtctttgtttcagatataggaaatcagtgtgcttgctcgtccgggaaggtcacaagcgagtatactgacggaagtcagcagcgcctggtgggggagaaagagactcaggcattaactcccgtatcggatggcatggaagttcctaatgattctgcattgcaagaattcttttgtctgtctcacgacgagagtaactccgagcctcactcccaatccagttataggcacaaggaaatgggccagaatctgcgcgagaccgtgagttactgcttgattgacgacgagtgccctcttatggtgccagcgtttgataagtcagaggctcaagtcttgaatccagagcacaaagtgacggagactgaggacactcagatggtttcaaaaggtaaagatctcggcacacaaaaccacacaagtgagcttatcctgagctctccccctggtcagaaggtagggagcagcttcggtcttacctgggatgccaacgatatggtgatcagcacagataagaccatgtgcatgtctacaccagttctggagcctaccaaggtgacattttcagtctcacccatcgaggctacagagaaatgtaagaaggtagagaagggaaatcgggggttgaagaatatccccgattctaaggaagctcccgttaacctctgcaaacctagtctaggcaagtcgaccattaagactaatacaccgatcgggtgcaaggttaggaaaaccgaaataatcagctacccgcgcccgaacttcaagaacgttaaagctaaggtgatgtcccgcgctgtgctgcagccaaaggatgccgccctgtcaaaggtcacaccccgcccccagcaaacctcagcctcatctccgagctctgtgaattcgaggcagcagaccgtgctttcaaggacccctcggtcagacctgaacgctgataagaaagctgagatcttgatcaataaaacgcacaaacagcagtttaacaagttgatcacatcgcaggccgtccacgtgactactcacagtaagaatgcatctcatagggtgcccagaacaacgtcggccgtgaagtcgaaccaggaagacgttgacaaggcatcgagctcaaatagcgcatgtgagactggtagtgtctcggcgctgttccaaaaaataaagggcattctcccggtgaagatggaaagcgcagagtgtctggaaatgacttacgtcccaaatatcgaccggatttcgcccgaaaaaaagggagagaaggagaacggcacaagcatggaaaagcaggagctgaagcaagagattatgaatgaaaccttcgagtatgggagcctgttcttggggagtgcatccaaaacgacaactacctccgggcgcaacatttcaaaacccgacagctgtggactgcggcagatcgctgcccctaaagcaaaagtcgggccaccagtgtcttgtctcaggagaaatagtgataacagaaacccaagcgcggaccgcgcagtgagcccccagagaattcgaagggtgtcttcctccgtactgcccaaagcggctttctcttag

SEQ ID NO: 284748 - DNA, 2313 bp, Artificial Sequence
  derived and/or modified sequence
atgaccgacgataattcggatgataaaattgaggatgaactgcagacattcttcaccagtgataaggacggcaacacacacgcttataatcccaagtccccccctacacaaaatagctccgccagtagcgtcaactggaacagtgccaatccagatgacatggttgtggattacgaaaccgacccagctgtggtcactggggagaacatcagtttgtccctccagggagtggaagtatttggccacgagaagtcaagtagcgattttatcagtaaacaggttctcgacatgcacaaagactcaatctgtcagtgcccagcgctcgtgggcacagagaaacctaagtacttacaacattcctgccacagcctagaggctgttgaggggcagtcagtcgaaccttctttacccttcgtgtggaaacctaacgacaatttgaattgcgctggatattgtgacgccctggagctcaatcagacatttgacatgacagtggataaagtgaactgcaccttcatctcacaccacgctatagggaagagccaaagctttcacacagcaggcagcctcccacctacaggtagacggtccggctccactagcagcctgtcatattcaacctggacctcctctcatagcgacaagactcacgcccgagagaccacttatgatagagaaagcttcgagaatccccaggtgacaccgtcagaagcacaagacatgacttacacagcctttagcgacgtggtcatgcaaagtgaggttttcgtgagtgacattggaaatcagtgtgcctgctcctcgggaaaagtgacttctgagtataccgacgggtctcaacagaggttggtaggagaaaaagaaactcaggctctgaccccagtgagtgatgggatggaggttccaaatgacagcgccctgcaagagtttttctgtctgtcccatgatgagtctaattcggagcctcatagccagagctcctacagacacaaggaaatgggtcagaatttgagggaaaccgtgagttactgtctaatcgatgatgaatgccccctgatggtgcctgctttcgataagtctgaggcacaggttcttaatccggagcataaggtcacagaaaccgaagacactcagatggtcagtaagggcaaggacttgggaactcagaatcacacaagtgaactaatcttgtcatccccgccagggcagaaggtgggctcctccttcggcctgacctgggacgcgaatgatatggtaattagtaccgataaaaccatgtgcatgtcgacacctgttctggagccgactaaggtgaccttctctgtcagccctatcgaagccacagagaagtgtaagaaggtcgagaaaggaaacagaggactcaaaaacattcccgactcgaaggaagctccagtgaacctgtgcaagccttcattgggcaagtctaccatcaaaacaaacaccccaatcggctgtaaagtgaggaaaaccgaaatcatttcttaccctcggcctaacttcaaaaatgtgaaggcaaaagtaatgagtcgcgctgtgctacagccaaaagacgcagcattaagcaaggtgacccccaggccgcaacagacaagcgcctcctccccatcctctgtgaattctcgccagcagaccgtgttgagtaggacaccaaggtccgatcttaacgcagataagaaagcagagatcctgattaacaaaacgcataaacagcaattcaacaaactaatcacctctcaggccgttcacgtgacaacccactctaagaatgcatcacaccgcgtgccccgtacaacttccgcagttaagtctaaccaggaggacgtggacaaggcttcgtcctctaacagtgcctgcgaaacaggaagtgtgtcggcgttgtttcagaaaataaaaggaattctgcctgtgaagatggagagcgccgagtgcctggagatgacgtatgtaccgaacattgatcggatttcgccggagaaaaagggggagaaagaaaacggcacttccatggaaaagcaagagctcaaacaggaaatcatgaatgaaacctttgagtatggtagcctgttcctagggagtgcttccaagactaccaccacttctgggaggaacatttccaagcctgacagctgtggactgaggcagatagcggcaccaaaagccaaggttggcccacccgtgtcctgcctccgcagaaactcagataaccggaatccctccgcggatcgggcagtcagtccacagcggattagacgcgtgtctagcagtgtcctccctaaggcagccttctcgtag

SEQ ID NO: 284749 - protein, 196 aa, Artificial Sequence
  derived and/or modified sequence
MDHEAAQLEKQHVHNVYESTAPYFSDLQSKAWPRVRQFLQEQKPGSLIADIGCGTGKYLKVNSQVHTVGCDYCGPLVEIARNRGCEAMGLEHPWIWYPRASWNQPPTDIEGPQYFYPPCHPIPDLQKQTIICHFKGPTLNEQQKSSPTHHRLHACFQHCREEESRPWLMALSSWDQVAMEGHVSASLTSCIVRLLL

SEQ ID NO: 284750 - protein, 454 aa, Artificial Sequence
  derived and/or modified sequence
MDHEAAQLEKQHVHNVYESTAPYFSDLQSKAWPRVRQFLQEQKPGSLIADIGCGTGKYLKVNSQVHTVGCDYCGPLVEIARNRGCEAMVCDNLNLPFRDEGFDAIISIGVIHHFSTKQRRIRAIKEMARVLVPGGQLMIYVWAMEQKNRHFEKQDVLVPWNRALCSQLFSESSQSGRKRQCGYPERGHPYHPPCSECSCSVCFKEQCGSKRSHSVGYEPAMARTCFANISKEGEEEYGFYSTLGKSFRSWFFSRSLDESTLRKQIERVRPLKNTEVWASSTVTVQPSRHSSLDFDHQEPFSTKGQSLDEEVFVESSSGKHLEWLRAPGTLKHLNGDHQGEMRRNGGGNFLDSTNTGVNCVDAGNIEDDNPSASKILRRISAVDSTDFNPDDTMSVEDPQTDVLDSTAFMRYYHVFREGELCSLLKENVSELRILSSGNDHGNWCIIAEKKRGCD

SEQ ID NO: 284751 - protein, 367 aa, Artificial Sequence
  derived and/or modified sequence
MVCDNLNLPFRDEGFDAIISIGVIHHFSTKQRRIRAIKEMARVLVPGGQLMIYVWAMEQKNRHFEKQDVLVPWNRALCSQLFSESSQSGRKRQCGYPERGHPYHPPCSECSCSVCFKEQCGSKRSHSVGYEPAMARTCFANISKEGEEEYGFYSTLGKSFRSWFFSRSLDESTLRKQIERVRPLKNTEVWASSTVTVQPSRHSSLDFDHQEPFSTKGQSLDEEVFVESSSGKHLEWLRAPGTLKHLNGDHQGEMRRNGGGNFLDSTNTGVNCVDAGNIEDDNPSASKILRRISAVDSTDFNPDDTMSVEDPQTDVLDSTAFMRYYHVFREGELCSLLKENVSELRILSSGNDHGNWCIIAEKKRGCD

SEQ ID NO: 284752 - DNA, 983 bp, Artificial Sequence
  derived and/or modified sequence
agtatttgagggaacatccgggctctggactagactttcaggatctaaggctgaatcctacacagtcctccctctgggaaagtgatgaaacctgtgagctctcctagcaactctgcagtcttccttcaagggcctgtgcttccttcagagactcacacaagaggtttatcatgagaaggaccgcactatttcatttcactcctacaagttttcatttacgttacacattgagaaagttatgagaagcaactgtcactctctggaggtggagactgccgtgattcacaaagacaagaggtaattttcctgtaatcacaggatgactcaggatggatcatgaagccgcccagctggagaagcagcatgtgcacaatgtgtacgagagcacagccccttacttcagcgacctgcagagcaaagcctggcctcgtgtccgccagttcctgcaagagcagaagccaggcagcctcatcgctgacataggttgtgggactggaaaatatcttaaagtgaacagccaggtacataccgtgggctgtgactactgtgggccactggtagagattgcccggaatagaggatgtgaagccatgggacttgagcatccatggatttggtatccgagggcgtcctggaaccaaccccccacggatattgagggaccacagtatttttatcctccatgtcaccccatccctgacctccagaaacaaacaatcatttgccattttaaaggacctacactaaatgagcaacagaagagctctcccacccaccaccgactccatgcctgttttcagcattgtagggaggaagagtcccggccctggctgatggctctcagctcctgggatcaggtggcaatggagggtcatgtctcggcttcattgacttcttgcatcgtaaggctcctcttatgagacaacctttcctctcaggcccttaggtccaagtcccctctctcagctttctctgagacctca

SEQ ID NO: 284753 - DNA, 1958 bp, Artificial Sequence
  derived and/or modified sequence
aaagccaagcgtcgtcgtcacccaaggtcaaggggtggaagttacacctggtgcagccctcggctctgatgcaaaagcagcttttgcccctggctgcgggacagcgctgtgactactcgcaacgggagagctgctgccagtcgccacaccgtgcggaaagcgccggcgaccggagcactgacaatggtctgcataggggagcggagagaagcttctgttgcgccctagatccgctgcctcggcgcccgcccgcagggaggagggggcgcgacaggtcgtctagcgcgtgccccggagcccgcgcccgggtctggccgcctggggcctgtgcttccttcagagactcacacaagaggtttatcatgagaaggaccgcactatttcatttcactcctacaagttttcatttacgttacacattgagaaagttatgagaagcaactgtcactctctggaggtggagactgccgtgattcacaaagacaagaggatggatcatgaagccgcccagctggagaagcagcatgtgcacaatgtgtacgagagcacagccccttacttcagcgacctgcagagcaaagcctggcctcgtgtccgccagttcctgcaagagcagaagccaggcagcctcatcgctgacataggtaaccaggcagcctcatcgctgacataggtaaccaggcagcctcatcgctgacataggtaaccaggcagcctcatcgctgacataggtaaccaggcagcctcattgctgtcataggtaacccagcactgggccgtgtagcatgaaataccttccattgagcctttgcttttcacattgatttttcatttttgttctaataggaatcctgaaattgcacccttggcatgccagtacctagaatattcattttacagcagaaactcgagacagtcaagtcagcagcaagtaaaaaactttctcaaacttttattttatttttattcttttgagatggagtttcactcttgtcaaccagattggagtgcagtggtgcaatctcagcttgctgcaaactccgcctcccaggttcaactgattctcctgcctcagactcccaaatagctatgattacaggcacccgccaccacgcccagctaatttttgtatttttagtagaaacggggttttgccatgttggccagactggtctcaaactcctgacctcagatgatccatctgtctcggcttcccaaagtgctgggattacaggcttgagccaccgtgcctggcctcaaactttacctttagacagtggctcttcagggcctttgtgtacatcctccaccaaaacggacctgacattgattgactaaatcaggatggaaatgatggcttgtgaaactaaccgttgtaaatttaaagatattcacatttgccaaatgtgttctcctctggtggctcactttgagtggctcacatgccttctatagaattgtgggattatggaagaggtccagtaatatcttatgaatctcatgggtcctttcctttaattattctataggtgtttcattataggagcgcatctttaattagacagtattttaataataacttatttgtctggaggacgttggttcagtatcttcgtaaatcaagaactggtaaaccacagcttagtagatctaggactaagacttaaaatgtggttggaatctcactcaaggcctacccacctaaaactgcgttctagcaattgcatgctgactgcacctatgagtcgtaagtctgtagttgcaaagtgtgtctagtttgatattctttctaaatactggtaagagaaacagacataccagaacttgtggcttgctgaagatggtatgagtaatgtggaatctggggaaggggtgcatgtcacatggaaattgggagtctttgaaaaatatctctatcctgtaaattaaaaaataataaatctagtttcggagtgtgc

SEQ ID NO: 284754 - DNA, 591 bp, Artificial Sequence
  derived and/or modified sequence
atggaccacgaggccgcccagctggagaagcagcacgtgcacaacgtgtacgagagcaccgccccctacttcagcgacctgcagagcaaggcctggcccagagtgagacagttcctgcaggagcagaagcccggcagcctgatcgccgacatcggctgcggcaccggcaagtacctgaaggtgaacagccaggtgcacaccgtgggctgcgactactgcggccccctggtggagatcgccagaaacagaggctgcgaggccatgggcctggagcacccctggatctggtaccccagagccagctggaaccagccccccaccgacatcgagggcccccagtacttctaccccccctgccaccccatccccgacctgcagaagcagaccatcatctgccacttcaagggccccaccctgaacgagcagcagaagagcagccccacccaccacagactgcacgcctgcttccagcactgcagagaggaggagagcagaccctggctgatggccctgagcagctgggaccaggtggccatggagggccacgtgagcgccagcctgaccagctgcatcgtgagactgctgctgtag

SEQ ID NO: 284755 - DNA, 1365 bp, Artificial Sequence
  derived and/or modified sequence
atggaccacgaggccgcccagctggagaagcagcacgtgcacaacgtgtacgagagcaccgccccctacttcagcgacctgcagagcaaggcctggcccagagtgagacagttcctgcaggagcagaagcccggcagcctgatcgccgacatcggctgcggcaccggcaagtacctgaaggtgaacagccaggtgcacaccgtgggctgcgactactgcggccccctggtggagatcgccagaaacagaggctgcgaggccatggtgtgcgacaacctgaacctgcccttcagagacgagggcttcgacgccatcatcagcatcggcgtgatccaccacttcagcaccaagcagagaagaatcagagccatcaaggagatggccagagtgctggtgcccggcggccagctgatgatctacgtgtgggccatggagcagaagaacagacacttcgagaagcaggacgtgctggtgccctggaacagagccctgtgcagccagctgttcagcgagagcagccagagcggcagaaagagacagtgcggctaccccgagagaggccacccctaccaccccccctgcagcgagtgcagctgcagcgtgtgcttcaaggagcagtgcggcagcaagagaagccacagcgtgggctacgagcccgccatggccagaacctgcttcgccaacatcagcaaggagggcgaggaggagtacggcttctacagcaccctgggcaagagcttcagaagctggttcttcagcagaagcctggacgagagcaccctgagaaagcagatcgagagagtgagacccctgaagaacaccgaggtgtgggccagcagcaccgtgaccgtgcagcccagcagacacagcagcctggacttcgaccaccaggagcccttcagcaccaagggccagagcctggacgaggaggtgttcgtggagagcagcagcggcaagcacctggagtggctgagagcccccggcaccctgaagcacctgaacggcgaccaccagggcgagatgagaagaaacggcggcggcaacttcctggacagcaccaacaccggcgtgaactgcgtggacgccggcaacatcgaggacgacaaccccagcgccagcaagatcctgagaagaatcagcgccgtggacagcaccgacttcaaccccgacgacaccatgagcgtggaggacccccagaccgacgtgctggacagcaccgccttcatgagatactaccacgtgttcagagagggcgagctgtgcagcctgctgaaggagaacgtgagcgagctgagaatcctgagcagcggcaacgaccacggcaactggtgcatcatcgccgagaagaagagaggctgcgactag

SEQ ID NO: 284756 - DNA, 591 bp, Artificial Sequence
  derived and/or modified sequence
atggatcacgaggctgcccagctggagaaacagcacgttcataatgtttacgagtcaactgcaccctatttttccgatctccagtctaaggcctggccacgagtccggcagtttctccaggagcaaaagccgggatccctgattgcagatatcgggtgtggaaccggtaagtacctcaaggttaattcacaagtacacaccgtgggttgtgattattgtggtcccctggtggagattgcacgcaataggggttgtgaagcgatggggttagagcacccctggatctggtatccccgcgcctcctggaaccagccgccgaccgacattgagggtccgcagtatttttaccccccgtgccaccctatcccagatctccagaagcaaacgataatctgccacttcaaaggaccaactttgaatgagcaacagaaaagctcgccaactcaccatcgtctccatgcttgcttccagcattgccgcgaggaggaatcaagaccctggttgatggctctctctagctgggaccaggtagccatggaggggcatgtttctgcgtcgttgacaagctgcattgttaggctgctgctatag

SEQ ID NO: 284757 - DNA, 1365 bp, Artificial Sequence
  derived and/or modified sequence
atggaccacgaggcggctcagctagaaaaacagcatgttcacaacgtgtatgagtcaactgccccttacttcagcgacctacagtcaaaggcgtggcccagggtgcgccaattcttgcaggagcagaagcccggcagcttaattgccgatatcggctgcgggaccgggaaatatctcaaggtgaatagccaagtgcacacagtgggatgcgactactgtggccccctggtggagattgcccgcaataggggatgtgaggcaatggtctgtgataatttaaacctgccttttcgagacgaaggctttgatgcaatcatatcaatcggagtgatccatcacttcagcaccaagcaaagacggattcgcgccattaaagagatggctagggtgctggtgccagggggccagctcatgatttatgtctgggctatggagcagaagaatcgtcactttgaaaaacaggacgttctggtgccctggaaccgcgcactctgctcacagttgttctcggaaagcagccaaagcgggagaaaaaggcagtgcggctacccagagagggggcacccatatcaccctccctgttcagaatgttcctgtagcgtatgcttcaaggagcagtgtggcagcaaaaggtcacattcggtgggttacgagcctgccatggctaggacctgcttcgccaatatttctaaagaaggggaggaggagtacggattttacagtaccctcggtaagagttttcgatcttggttcttttcacggagcttagacgaatccacactgcggaagcaaatagaacgggtgaggccgcttaagaacactgaggtgtgggcatctagtaccgtgaccgtacagcctagcagacatagtagtcttgatttcgatcatcaggagcccttttccacaaaaggtcagtccctcgacgaggaggtttttgtggagtcctcgtccggtaaacacctggaatggctgcgagccccagggaccctcaaacaccttaacggcgatcaccagggagagatgagacgaaatggaggcggcaattttctggatagcacgaacactggagtcaactgtgtcgatgccggcaacatcgaagacgacaatcccagtgccagtaagattctgaggcgcattagtgctgtggatagtacggattttaatccagacgatactatgagcgttgaagaccctcagactgatgtattggattcgacagcctttatgaggtattatcacgtatttcgggagggagagttgtgctctctcctgaaggaaaacgtgtcggagctccgaatactgtcgtctggtaacgatcacgggaactggtgtatcattgccgaaaagaagcggggttgtgactag

SEQ ID NO: 284758 - DNA, 591 bp, Artificial Sequence
  derived and/or modified sequence
atggaccatgaagctgcccagctggagaagcagcacgtgcacaacgtgtatgagagcacagccccctacttcagtgacctgcagagcaaggcctggccccgggtgcggcagttcctgcaggagcagaagccaggcagcctgattgctgacatcggctgcggcaccgggaagtacctgaaggtgaacagccaggtgcacacagtgggctgtgactactgcggccccctggtggagatcgccaggaacagaggctgtgaggccatgggcctggagcacccctggatctggtacccccgggcctcctggaaccagcccccaacagacatcgagggcccccagtacttctacccaccctgccaccccatcccagacctgcagaagcagaccatcatctgccacttcaagggccccaccctgaatgagcagcagaagagcagccccacccaccaccggctgcacgcctgcttccagcactgccgggaggaggagagccggccctggctgatggccctgagctcctgggaccaggtggccatggagggccacgtgtctgccagcctgaccagctgcatcgtgcggctgctgctgtag

SEQ ID NO: 284759 - DNA, 1365 bp, Artificial Sequence
  derived and/or modified sequence
atggaccatgaagctgcccagctggagaagcagcacgtgcacaacgtgtatgagagcacagccccctacttcagtgacctgcagagcaaggcctggccccgggtgcggcagttcctgcaggagcagaagccaggcagcctgattgctgacatcggctgcggcaccgggaagtacctgaaggtgaacagccaggtgcacacagtgggctgtgactactgcggccccctggtggagatcgccaggaacagaggctgtgaggccatggtgtgtgacaacctgaacctgcccttcagagatgagggctttgatgccatcatcagcattggagtcatccaccacttcagcaccaagcagaggcgcatccgggccatcaaggagatggcccgggtgctggtgcctgggggccagctgatgatctacgtgtgggccatggagcagaagaacagacactttgagaagcaggatgtgctggtgccctggaacagagccctgtgcagccagctgttcagcgagagcagccagagcggcaggaagaggcagtgtggctacccagagcggggccacccctaccaccccccctgcagcgagtgcagctgcagcgtgtgcttcaaggagcagtgtggcagcaagaggagccacagcgtgggctatgagcccgccatggcccggacctgctttgccaacatcagcaaggagggggaggaggagtatggcttctacagcaccctgggcaagagcttccgctcctggttcttcagccgcagcctggatgagagcaccctgaggaagcagatcgagcgggtgcggcccctgaagaacacagaggtgtgggccagcagcacagtgacagtgcagcccagccgccacagcagcctggactttgaccaccaggagcccttcagcaccaagggccagagcctggatgaggaggtgtttgtggagagcagcagcggcaagcacctggagtggctgcgggcccctggcaccctgaagcacctgaatggagaccaccagggcgagatgagaagaaatggaggcggcaacttcctggacagcaccaacacaggagtgaactgtgtggatgctggcaacattgaagatgacaaccccagcgccagcaagatcctgcggcgcatctctgctgtggacagcacagacttcaacccagatgacaccatgtctgtggaggacccccagacagatgtgctggacagcacagccttcatgagatactaccacgtgttccgggagggggagctgtgcagcctgctgaaggaaaatgtgtctgagctgcgcatcctgagcagtggaaatgaccacggcaactggtgcatcatcgccgagaagaagaggggctgtgactag

SEQ ID NO: 284760 - DNA, 591 bp, Artificial Sequence
  derived and/or modified sequence
atggaccacgaggccgcccagctggagaagcagcacgtgcacaacgtatatgaaagtaccgctccctacttctctgatctacagtcaaaggcatggccgagagtccggcagtttttgcaggaacagaagccaggctcactcattgcagacatcggctgcgggacaggcaaatatttgaaggtgaatagccaggttcataccgttggctgcgactattgcggtcccctggtagaaatcgcaaggaatcgcgggtgcgaggccatgggacttgagcatccatggatatggtatccacgcgcctcctggaatcagccaccaaccgacatagagggccctcagtatttttaccccccatgtcacccaatcccagatctgcaaaaacaaacaataatttgtcacttcaaaggacccactctcaatgagcagcagaagagtagcccaacccaccaccgtcttcatgcatgctttcaacactgtagagaggaagagtcgcgaccctggctgatggctctgtcgagctgggatcaagtggcgatggaaggccacgtgagtgcgagtctcacaagctgtatcgtgagacttttgttgtag

SEQ ID NO: 284761 - DNA, 1365 bp, Artificial Sequence
  derived and/or modified sequence
atggaccacgaggccgcccagctggagaagcagcacgtgcacaacgtctacgagtctactgctccgtacttcagtgacctccagtccaaagcgtggccaagagtgcgtcaatttttacaggagcagaaacctggtagcctgatcgccgatattgggtgcggcacgggaaaataccttaaggttaacagccaggtacacactgttgggtgtgactattgcggaccactggtggagatcgccagaaaccgtgggtgcgaagcgatggtctgcgacaacctgaacttaccgtttcgcgatgaggggttcgacgctatcatctcgataggcgtcatccatcacttcagcacaaagcaaagacgcattcgagccattaaagagatggctcgggtcttggtacccgggggccagctcatgatttatgtctgggcaatggagcagaaaaataggcatttcgagaagcaagatgtcctagtaccttggaaccgcgcactgtgtagtcagctattttcggaaagcagccagagcggcaggaagcgccagtgcggctaccctgaaagaggccatccctaccaccccccatgtagcgagtgttcctgctcagtgtgtttcaaagaacagtgtgggagcaagagatctcatagcgttggctacgagcccgctatggccaggacttgttttgccaatattagcaaggagggcgaggaggaatatggtttttactcaacgctcggcaaatcctttagatcatggttttttagtcgatctctagacgaatccaccctgagaaagcagatcgagcgagttcgtcctctgaaaaatacagaggtgtgggcgtcatccactgtaactgtccagcccagtcggcattccagccttgacttcgatcatcaagaacccttttctacgaaaggccagtccctggacgaggaagttttcgtggaaagctcttcaggaaagcacctggagtggctgagggcaccagggacccttaagcacttaaacggtgatcatcagggtgagatgcgaaggaacggcggcgggaatttcctagactccacgaacaccggggtcaactgcgtagacgcaggtaatatcgaggacgataacccctctgccagcaagattctgcggagaataagtgccgtcgattctaccgatttcaacccagatgataccatgtctgtcgaggatcctcaaaccgacgtcctggatagcactgccttcatgcggtattaccacgtctttagggaaggggaactttgcagtttactgaaagagaatgtttccgaactcaggatcctgagctctggtaacgaccacggtaattggtgtattatcgccgaaaagaaacgcggatgtgactag

SEQ ID NO: 284762 - DNA, 591 bp, Artificial Sequence
  derived and/or modified sequence
atggatcatgaggctgcgcaactggaaaagcagcacgtgcacaatgtgtacgagagcaccgctccttacttcagcgacctccagtcaaaggcctggccacgcgtgcgtcaatttctccaagagcaaaagcccggttccctgatagcagacatcggctgcggcactgggaaatacctgaaagtcaacagccaggtgcacactgtcggctgtgactattgcggacctctagtcgaaattgccagaaaccggggatgtgaagccatgggactggaacacccttggatctggtacccaagagcatcgtggaatcagccacccacggacatcgagggccctcagtacttttatccaccgtgccatccaatacctgatcttcaaaaacagacgattatctgccatttcaaaggtcctacacttaatgaacaacaaaagtcctctccaactcaccacaggctccacgcttgttttcagcactgtagagaagaggaatctagaccgtggcttatggctctgagttcttgggaccaggttgccatggaaggccacgtcagcgcatccctgacaagttgcatcgtgagacttctgctgtag

SEQ ID NO: 284763 - DNA, 1365 bp, Artificial Sequence
  derived and/or modified sequence
atggatcatgaagctgcacagctggagaagcagcacgtgcacaacgtgtatgagtcgacagcaccctacttttcggatctccagagcaaggcctggccacgagtgaggcagtttctgcaggaacagaaacctggctcccttatcgcggatatcggctgcggaacaggtaagtacctcaaggtgaactcccaggtgcatacagtcggatgcgattactgcggacccctcgtggaaatcgccagaaatcggggttgcgaggccatggtgtgcgataatctgaatctgccattccgggacgaggggttcgacgcgatcatatcaattggcgtgatccatcacttcagcactaaacagcgtcgcatcagagcgatcaaggagatggccagggtattggtaccgggagggcagttgatgatctacgtctgggcaatggagcagaaaaatcggcacttcgaaaagcaggatgtgctagtcccttggaaccgggctctgtgtagtcagctgttcagcgagagttcccagtcaggtagaaaacgccagtgtggctatcccgaaagaggccatccttaccatccaccatgctccgaatgctcctgttctgtatgcttcaaagagcagtgcggttcaaagcgaagccactctgtggggtacgagcctgcaatggctcggacgtgcttcgccaatatatccaaagaaggagaagaagagtacggtttctacagcaccctgggcaagagtttccgatcctggttctttagtcgctcactggacgagtccaccctcaggaaacaaattgaaagagtccgacctctgaagaatacagaggtgtgggcttccagtactgtcactgtccagccatctaggcactcttctctggactttgatcatcaagagccattcagcaccaaaggtcagagcctggacgaggaggtatttgtggagtcatctagcgggaagcacctggagtggctccgggctcctggcactctcaaacacttgaacggggaccatcagggggaaatgcgccgaaacggcggtggcaatttccttgattctacaaataccggagtgaattgtgtcgacgccggaaacattgaagatgataacccctctgcatctaaaatcttgcgcagaatttccgccgtggacagcacggactttaacccagatgatacaatgagtgtcgaggacccccaaacggatgtgctggacagtactgcatttatgcggtactaccacgtgtttcgcgaaggtgagctgtgtagcctgctcaaagaaaacgtgtctgagctgagaatactgtcatcagggaacgaccacggcaattggtgcatcattgctgagaaaaagcggggatgtgactag

SEQ ID NO: 284764 - DNA, 6003 bp, Artificial Sequence
  derived and/or modified sequence
atgaaatatgaatgtgagcttagaggctacacgtggtctctcggatactagaactatctttcttgccttggaccagctaacgtgccttggttgcgccagtgtactgagccctgtggacatcacctcattaaatattcaataaatgttatttttttcctattgcctttctctcttctatatgagaatctgtaagtattcgccgaaggcttttcttttgcttttgtgaataccttcacaccatgttgtattctgtcttggttagttaaaaaaaaaaaaaaagttggccaggcacagtggcttgcacctgtaatcccagcactttgggaggccgaggcaggcggatcacctgaggttgggagttcgagaccaacctgaccaacatggagaaacccgtctctactaaaaatacaaaattatccggtcatggtggcacgcgcctatgatcccacctactcgggaggctaaggcaagagaattgcttgaacccgtgaggcagaggttgcagtgaaccgagattgcgccactgcactccagcctgggtgactgagggagactctgtctcaaaataaataaataaataaaaggttaattatatttcttgttatgagacaaatgaagtatttcacattttccattgaggatagcatgtaacgcaggtttttctcttataggttgtgggactggaaaatatcttaaagtgaacagccaggtacataccgtgggctgtgactactgtgggccactggtagagattgcccggaatagaggatgtgaagccatggtatgtgacaaccttaatctcccctttagggatgagggcttcgatgccatcatctccataggagtcatacatcatttttctacaaaacaaagaagaatcagagcaataaaagaaatggccagggtcttagttcccggaggccaactgatgatttacgtttgggcaatggaacaaaagaaccgtcactttgagaagcaagacgtgcttgttccatggaacagggctctgtgttcccagctcttctcagagtccagccagtctgggaggaagaggcagtgtggatacccagaaagaggccatccctaccatcctccttgctctgagtgtagctgttctgtttgttttaaagagcagtgtggttcaaaacggtcccacagcgtgggctatgaacctgctatggcaagaacctgttttgcaaatatttctaaggaaggcgaggaagaatatggattttacagcacattaggaaaatcgtttcgttcctggtttttctccagatctttggatgaatcgactctgaggaagcaaattgaaagagtaagacccttgaaaaacacagaagtttgggccagtagcactgtaacagtccagccttccagacactctagtttagactttgatcaccaagagccattttcaacaaaagggcaaagtttagatgaggaagtgtttgtggaatcttcttctggaaaacacttggagtggctgagagcaccaggcactctgaaacatttaaatggagaccatcaaggggaaatgaggagaaatggagggggaaattttctggatagcactaatactggtgtgaattgtgtggatgcaggcaacatagaagatgataatccttctgctagtaaaatattgagaaggatttctgcagttgattccacagatttcaacccagatgatacaatgtctgtcgaagatccacagactgatgttttggactccacagcctttatgcgctactaccatgtgtttcgagaaggggagctctgcagtctgctcaaggagaatgtgtcagagctccgtatcctgagttctgggaatgatcatggtaactggtgtatcattgcagagaaaaagagaggttgtgattgattggatccttttagacaactcctccaaaagatgaaccacattctttcctcttggtttgatatggttacctgaatttgcattcagtgttatttgttaatccatttacgctttggtctgcagagactattaattatttggttgttttgttttcatttttgaataagcacagattctggcattgaaagcacttgacaaagggtatttgtgcttaaatgttaatatacaagatctgaagaagcaacagaaagtacccttcagtacacctcagacttttttttaaccccagagagataaaatacatgtatagtgtttttcagtattacacattgatttaaaaagattatgctgttaaataatcttttaaaacggtatttttataaagtgaggggataatttctggttctcaggttataactgagagcagtgtgcaagataataggtaaatttgatccattgcacagatatactttgaaccatgtgatgagttatcttgttgccaaggccttgcttctacttaaagttttcagaaaactgagtgacagtggagagaaacaagaagttttacaaggactttactaaattataagcaaacttgcttcaaaataagttgacatgtgataataaggttttcaatgtagcccaggaggtttttaaaggcactgttaggctgagcatggtggctcatgcctgtaatcccagcactttgggaggccaaggcagaaggatcacttgaacccaggagttcaagaatagcctgggcaacatagcaagaccccatctctataaaaattagcaagatgtggtggtgcatgcctgtcatccaagctactcaagagactgaggcaggaggatcacgtgagcccaggaattcaaggctgcagtgaactatgattgcatcactgcactgcagcctgggcaacatagcaagactctgtctcaaaataataataataataataataaaggcgttgttagcttgtaaggagtggagtatgtaggtagtaggagttatatgcaagtacccaagtggtattcttccaatcttattagaagcatgaatattcaagattgatattactattgcttattagcaagattgttatcaatcatgcttattagaaggatgaatatccaagaccaagattgactaatgatgagtctgcatcaagaactaggcatttcttctgagttgacggactctttaggaaaggagaatctaagtgaagcactgattttagctctgagaacaaacaaattaaggtacagcatagttagccttggtagaggtatgacttggatttgctgtatcctttaaaatagtatctgggcatttattttattgaaggtgactacattttattagttatattaggaatttaggtagaatcaacttctactgattacaggttgaatttctgtcactttgtagagaaacgaatagactggacactgtgtggtcactgtttagatttgcccatgggtctctttaaatctatgtcatggatcctgagacacaaatataattaagacaggtctagagacaggagaagcagaaataagttgacccaggagtacagtctcaagtagttcattaatgagaaaattgacatctgacaagagtctttttactttatgctggatgaaaatccaaatcttgttttattttttccactaaaagtgactaaaataataacgaatttcatttgttcttgggttcttttttcctttaatgattgtgctataacttaaaataatgatgttacttttgaacaaacttaaagaaatatttttaaagcgtatctgaaaacgattgatgtttataactctcttttggcttcaaaataagattgtgttatcaccattttggtagatgaggttgtctggtgaaaatgatgcatatgagttgtactgttcagtgtacatcctgcagtagtggatgattgaaaacatatataagtggagtataaattaaaaattaatttggtttcttctatttcttttttttttttttttttttgagacagagtctcgctctgtcgcccaggctggagtgcactggcgcgatctcggctcactgtaagctccgcctcccgggttcacgccatcctcctgcctcagcctcccaagtagctgggactactggcacccaccacgacgcccggctgtttttttgtatttttaggagagacggggtttcaccgtgttagccaggatggtctcgatctcctgacgtcgtgatccacccgcctcggccccccacagtgctgggattacaggcgtgagccaccgcgcccggcctgttccttttatttcttaattcaggacactaaaccatgactgcaagggatttccttggtaaaaagaaaagattctcagagtcaaaatggtcttacaactcgggcttgacggcctttgaattatgaatggattgttcctctctctgaagcctattgtcacatgggtttttaatcctggccttgctgctagaaatctgtgcttgaagtcctctctttctgctgctagcctaccagttaaaagtcaagacttggtggaactcagtttaccagactctttagcctttgagctaaactgtctgagcaacctcttagatgtgcacacaccactttgtatgaaagggttctctagaacggttctttggagagaaatattttcatgtacgtttgacaggggtgtaaataaagcatgctgactaataagtcttttactcttcatctaatgaacataagaatctatgcatccagatattattttgtatacaaatatttaatttggtgattgataatctctctttggggtagtcacatggaaagctcttttaaatttaacttccgcctttggattttttttaaaaagccattgaagagcaaaactaatgtaaacgtcttgatcatttaaaaagcttgcttgtcctcgaaaggaaacacaggtcatcagtgagtataaacgtagacagttgatttgtgaatgctgtcggcctcaacttgcttgatgatagattctactgacctagctggagtaatctgatcacttacttccttattaatactagatcacacagtgtctttcttattccttcttctttacttactggcatcagcacagagtcccactatctgaaatagaagggagagtttgggggtttattggaggagtcttaaaaacttggttggcagctgggtacgatgactcacacctgtactcccagcacttcaggaagctgaggtgggtggatcagctgaggtcaggagtttgagaccagcctgaccaacatggtgaaaccccgtctttattaaatacaaaaaattagccaggttggtggcgcatgcctgtaatcccagctacttgggaggctgaggcaggagaatcgcttgaacctgggaggcggaggttgcagtgagccgagattgtgccattgcactccaacctgggcaacaagagtgaaactccatctccaacaaaacaaaactttgctggcttcctgatgcctcactgtctatttgaggaattccacagaatcttcaaaggatttgggggaaagcgcattaacatggacaaaggatggaatcaaaataatgttatagtgagaatcattcaagcacctatttaaattttttccaattgccagtatagtgatgatatgacaccagcatatcaaagtaactaacaaactagctacacaaacgtcttggagtttggtttcgttctcttttctcatcatagatctccgtgcagaatagtgctaattcttatttctcgtttgcctttctatttccttccaaattctacatgccagtaattcctctgtcttttaagtgaccatcaattcaataggcaaaaatttggagtaatccagagaaaaaaccatccaaatataaaccagctaggaacatgaatgcccctgattattaatggccaaaaaaaaagcactggtggattttaaattaaattaatacatatatacgagtttggaggagaacagaagttctaactcagtacttgaacttggtgggggagggcacaggttaaatatgagctgtgagcccccagttttggaggaaggaggaaatgggaaccaaccaccagacaagcagctgcagtct

SEQ ID NO: 284765 - protein, 658 aa, Artificial Sequence
  derived and/or modified sequence
MIPCRAALTFARCLIRRKIVTLDSLEDTKLCRCLSTMDLIALGVGSTLGAGVYVLAGEVAKADSGPSIVVSFLIAALASVMAGLCYAEFGARVPKTGSAYLYTYVTVGELWAFITGWNLILSYVIGTSSVARAWSGTFDELLSKQIGQFLRTYFRMNYTGLAEYPDFFAVCLILLLAGLLSFGVKESAWVNKVFTAVNILVLLFVMVAGFVKGNVANWKISEEFLKNISASAREPPSENGTSIYGAGGFMPYGFTGTLAGAATCFYAFVGFDCIATTGEEVRNPQKAIPIGIVTSLLVCFMAYFGVSAALTLMMPYYLLDEKSPLPVAFEYVGWGPAKYVVAAGSLCALSTSLLGSIFPMPRVIYAMAEDGLLFKCLAQINSKTKTPIIATLSSGAVAALMAFLFDLKALVDMMSIGTLMAYSLVAACVLILRYQPGLSYDQPKCSPEKDGLGSSPRVTSKSESQVTMLQRQGFSMRTLFCPSLLPTQQSASLVSFLVGFLAFLVLGLSVLTTYGVHAITRLEAWSLALLALFLVLFVAIVLTIWRQPQNQQKVAFMVPFLPFLPAFSILVNIYLMVQLSADTWVRFSIWMAIGFLIYFSYGIRHSLEGHLRDENNEEDAYPDNVHAAAEEKSAIQANDHHPRNLSSPFIFHEKTSEF

SEQ ID NO: 284766 - DNA, 1977 bp, Artificial Sequence
  derived and/or modified sequence
atgatcccctgcagagccgccctgaccttcgccagatgcctgatcagaagaaagatcgtgaccctggacagcctggaggacaccaagctgtgcagatgcctgagcaccatggacctgatcgccctgggcgtgggcagcaccctgggcgccggcgtgtacgtgctggccggcgaggtggccaaggccgacagcggccccagcatcgtggtgagcttcctgatcgccgccctggccagcgtgatggccggcctgtgctacgccgagttcggcgccagagtgcccaagaccggcagcgcctacctgtacacctacgtgaccgtgggcgagctgtgggccttcatcaccggctggaacctgatcctgagctacgtgatcggcaccagcagcgtggccagagcctggagcggcaccttcgacgagctgctgagcaagcagatcggccagttcctgagaacctacttcagaatgaactacaccggcctggccgagtaccccgacttcttcgccgtgtgcctgatcctgctgctggccggcctgctgagcttcggcgtgaaggagagcgcctgggtgaacaaggtgttcaccgccgtgaacatcctggtgctgctgttcgtgatggtggccggcttcgtgaagggcaacgtggccaactggaagatcagcgaggagttcctgaagaacatcagcgccagcgccagagagccccccagcgagaacggcaccagcatctacggcgccggcggcttcatgccctacggcttcaccggcaccctggccggcgccgccacctgcttctacgccttcgtgggcttcgactgcatcgccaccaccggcgaggaggtgagaaacccccagaaggccatccccatcggcatcgtgaccagcctgctggtgtgcttcatggcctacttcggcgtgagcgccgccctgaccctgatgatgccctactacctgctggacgagaagagccccctgcccgtggccttcgagtacgtgggctggggccccgccaagtacgtggtggccgccggcagcctgtgcgccctgagcaccagcctgctgggcagcatcttccccatgcccagagtgatctacgccatggccgaggacggcctgctgttcaagtgcctggcccagatcaacagcaagaccaagacccccatcatcgccaccctgagcagcggcgccgtggccgccctgatggccttcctgttcgacctgaaggccctggtggacatgatgagcatcggcaccctgatggcctacagcctggtggccgcctgcgtgctgatcctgagataccagcccggcctgagctacgaccagcccaagtgcagccccgagaaggacggcctgggcagcagccccagagtgaccagcaagagcgagagccaggtgaccatgctgcagagacagggcttcagcatgagaaccctgttctgccccagcctgctgcccacccagcagagcgccagcctggtgagcttcctggtgggcttcctggccttcctggtgctgggcctgagcgtgctgaccacctacggcgtgcacgccatcaccagactggaggcctggagcctggccctgctggccctgttcctggtgctgttcgtggccatcgtgctgaccatctggagacagccccagaaccagcagaaggtggccttcatggtgcccttcctgcccttcctgcccgccttcagcatcctggtgaacatctacctgatggtgcagctgagcgccgacacctgggtgagattcagcatctggatggccatcggcttcctgatctacttcagctacggcatcagacacagcctggagggccacctgagagacgagaacaacgaggaggacgcctaccccgacaacgtgcacgccgccgccgaggagaagagcgccatccaggccaacgaccaccaccccagaaacctgagcagccccttcatcttccacgagaagaccagcgagttctag

SEQ ID NO: 284767 - DNA, 1977 bp, Artificial Sequence
  derived and/or modified sequence
atgattccatgcagggccgccctgacatttgccagatgtctcatccgccggaaaatcgtaacacttgattcattggaagacaccaaactgtgtcgatgccttagcaccatggacctgatcgcactgggcgttgggtctactttaggcgctggtgtgtatgtgctcgccggtgaggtggctaaagcagacagcggtcccagcatcgtcgtgagctttctgattgctgcgttggctagcgtgatggctggtctgtgttacgctgagtttggagcacgcgttccaaaaaccggcagtgcctacctatatacttatgtgacggtaggggaactgtgggcgttcattacagggtggaacctcattcttagctacgttataggtacctcttctgttgctagagcttggtcagggacctttgacgagcttctgagcaaacaaataggacagttcctgcggacgtactttcggatgaattatacagggctggccgagtacccagacttctttgctgtatgtctcatcctactcctggcgggcctcctgtccttcggggtaaaagaaagcgcctgggtgaataaggtgttcaccgccgtgaacatcttggtcctcctctttgttatggtcgcagggtttgtcaaagggaatgtggccaattggaaaatctcagaagagtttctgaagaatatctctgcttctgccagagagccaccctctgaaaacggtactagcatctacggggcaggcggattcatgccctatggttttactggtacccttgccggagccgcaacctgcttctatgcctttgttggcttcgattgcattgctaccacaggcgaggaggttcgaaatcctcagaaagctatcccaatcggaattgttacctccctactggtttgttttatggcctatttcggggtttcagccgcattaacactaatgatgccatattatctgctagacgaaaagagtcccctccccgtcgcctttgagtacgttggttggggccccgctaagtacgtggtagctgcagggagcctctgtgcactgagcacctctctactggggtctatatttcctatgccacgggtgatctacgccatggccgaggacggactgctgttcaagtgcctggcccaaatcaatagcaagacaaaaactccaataatagcaacattaagtagcggagccgtggccgccttgatggcattcctgttcgatctgaaggcgctggtcgacatgatgagcatcgggactctgatggcatatagcctcgtggctgcttgcgttttaatcctgcggtatcagccaggcctgagttacgaccagcccaagtgttcaccagaaaaggatggattaggatcatcccccagggtgacatccaagagtgaaagccaggtcactatgctacaaaggcaggggttctccatgcggaccctcttttgtccatctctgctgccaacacagcagagcgcgtctctggtttctttccttgtggggtttcttgcatttctggtactgggactgagtgtgctgacgacatacggagtccacgccatcacacgactggaggcctggtcccttgctctgctcgccctttttcttgttctgtttgtggccattgtcctgacaatttggcgtcaaccacaaaaccagcagaaagttgcttttatggtgccttttttaccattcctgcctgcatttagtattctggtgaacatctatttgatggtgcagctctcagctgacacgtgggttaggtttagtatttggatggcaatcggctttctgatttatttctcctacggaatcaggcactctttggagggccacttgcgagacgaaaacaatgaagaggatgcatacccagataatgttcacgcagcggccgaagagaagagcgctattcaggcaaatgaccatcatcctaggaatctcagttccccattcatcttccatgagaagacatccgaattctag

SEQ ID NO: 284768 - DNA, 1977 bp, Artificial Sequence
  derived and/or modified sequence
atgatcccatgccgagctgccctgaccttcgccaggtgcctcatcaggagaaagatcgtgacgttggactctctcgaggataccaagttgtgtcgttgtttaagtactatggacctcatcgcactcggcgtcgggtctacactgggcgcaggagtttatgtactggccggggaggttgccaaggccgattctggcccctccatagtcgttagcttcttgatagccgctcttgcgtctgtcatggctggactctgttatgcggagtttggggcacgtgtgccaaaaaccgggtcggcctatctctacacatatgtgacagtaggggaactatgggccttcatcacaggctggaaccttatcctgtcatatgttattggcacaagctctgtcgcgagggcctggagcgggacatttgatgagttactgtctaagcaaataggccagtttcttcgcacctatttccgcatgaactacacgggccttgcagagtatccagacttttttgctgtctgcttgattcttttgctggccgggctgttgagcttcggggtgaaagagagcgcctgggttaacaaggtgttcactgcggtgaacatcctagtcctgctgtttgttatggtagccggcttcgtaaagggtaatgtagccaattggaaaatcagcgaggagtttctgaaaaatattagtgcgagcgcaagggagcctccatctgagaacggcaccagcatatacggagcaggcggctttatgccgtacggttttaccggtactttagccggcgccgctacctgtttctatgccttcgtaggctttgactgtatagctacaaccggggaggaggtcaggaatcctcagaaagccattcctataggaatcgtgacaagcctcctcgtttgtttcatggcatatttcggggttagcgcagccctcacgctgatgatgccctactacctgttggacgaaaagagtccacttcccgtggcgttcgagtatgttggttggggccctgctaagtacgtggtggccgctggcagcctgtgtgcattgtctacgtccctgctgggatccatctttcccatgccaagggtgatctacgctatggctgaggacggcctcctttttaagtgcttagcccagattaactcaaagacaaagactccaatcatagccacgttatcaagcggcgctgtagccgcactcatggcctttttgttcgatctgaaggccctggtggacatgatgagtataggcactctaatggcatacagtcttgtcgctgcctgcgtactgatcttgcggtatcagccaggattgtcttatgaccagccgaaatgttctcctgagaaagatggtcttggctcaagtccacgggttacatcgaagtctgaatctcaagtcacgatgctgcaacggcaggggttctctatgaggaccctgttctgcccctctttgctccctacgcagcagagcgcctccctggtcagttttttagttggctttctggctttcttggttttagggctcagcgtgttgacaacctatggggtccatgcaattacgcgccttgaggcgtggagtttagccctgttggcattgtttctcgtgctctttgtagctatcgtgctgacaatttggcgtcagccgcaaaatcaacagaaagtggcttttatggttccattccttccctttttgccagcattctctatactggtaaacatctatttgatggtgcaactaagcgctgacacctgggtccggttttcaatttggatggccatcggatttctaatctacttctcttatgggattagacacagcttggagggtcatctaagggatgagaataacgaggaggatgcttacccagacaacgtgcacgccgccgctgaagagaaatccgctattcaggctaacgatcaccacccgaggaacctatctagtccctttatcttccatgaaaagactagtgagttctag

SEQ ID NO: 284769 - DNA, 1977 bp, Artificial Sequence
  derived and/or modified sequence
atgatcccctgccgggccgccctgacctttgcccgctgcctgatccggaggaagatcgtgaccctggacagcctggaggacaccaagctgtgccgctgcctgagcaccatggacctgattgccctgggcgtgggcagcaccctgggcgctggggtgtatgtgctggccggggaggtggccaaggctgacagcggccccagcatcgtggtgtccttcctgattgctgccctggcctctgtgatggccggcctgtgctacgccgagtttggagcccgggtgcccaagacaggcagcgcctacctgtacacctacgtgacagtgggggagctgtgggccttcatcaccggctggaacctgatcctgtcctatgtgattggcaccagctctgtggcccgggcctggagcggcacctttgatgagctgctgagcaagcagatcggccagttcctgcggacctacttcaggatgaactacacaggcctggccgagtacccagacttctttgctgtgtgcctgatcctgctgctggccggcctgctgagctttggagtgaaggagagcgcctgggtgaacaaggtgttcaccgctgtgaacatcctggtgctgctgtttgtgatggtggccggctttgtgaagggaaatgtggccaactggaagatcagcgaggagttcctgaagaacatcagcgccagcgcccgggagcccccatctgaaaatggcaccagcatctacggggccggcggcttcatgccctacggcttcaccggcaccctggccggggccgccacctgcttctacgcctttgtgggctttgactgcatcgccaccactggagaggaggtgaggaacccccagaaggccatccccatcggcatcgtgaccagcctgctggtgtgcttcatggcctactttggagtgtctgctgccctgaccctgatgatgccctactacctgctggatgagaagagccccctgcctgtggcctttgaatatgtgggctggggccctgccaagtatgtggtggccgccggcagcctgtgtgccctgagcaccagcctgctgggcagcatcttccccatgcccagggtcatctatgccatggctgaagatggcctgctcttcaagtgcctggcccagatcaacagcaagaccaagacccccatcatcgccaccctgagcagcggggctgtggccgccctgatggccttcctgtttgacctgaaggccctggtggacatgatgagcatcggcaccctgatggcctacagcctggtggccgcctgtgtgctgatcctgcgctaccagcccggcctgtcctatgaccagcccaagtgcagccctgagaaggatggcctgggcagcagcccccgggtgaccagcaagtctgagagccaggtgaccatgctgcagaggcagggcttctccatgaggaccctcttctgccccagcctgctgcccacccagcagagcgccagcctggtgtccttcctggtgggcttcctggccttcctggtgctgggcctgtctgtgctgaccacctacggcgtgcacgccatcacccggctggaggcctggagcctggccctgctggccctcttcctggtgctgtttgtggccatcgtgctgaccatctggaggcagccccagaaccagcagaaggtggccttcatggtgcccttcctgcccttcctgcctgccttcagcatcctggtgaacatctacctgatggtgcagctgtctgctgacacctgggtgcgcttcagcatctggatggccatcggcttcctgatctacttctcctatggcatccgccacagcctggagggccacctgagagatgagaacaatgaggaggatgcctacccagacaacgtgcatgctgctgctgaggagaagagcgccatccaggccaatgaccaccaccccaggaacctgagcagccccttcatcttccacgagaagaccagcgagttctag

SEQ ID NO: 284770 - DNA, 1977 bp, Artificial Sequence
  derived and/or modified sequence
atgatcccctgccgggccgccctgaccttcgcccggtgcctgatccggcgtaaaatcgtcacgctcgattccttggaagacaccaaattgtgccggtgccttagtaccatggacctgattgcactgggtgtggggtctacccttggcgcaggggtctacgttttagctggcgaggtggcgaaggccgactccgggcctagtatcgttgtctcattcttaatcgctgccctcgccagtgtgatggccggactgtgctacgccgagttcggtgcccgtgtaccaaaaactggatctgcctacctgtacacatacgttactgtgggtgaactgtgggcctttataaccggatggaacctcatcctcagttatgtgattggcaccagcagcgtcgcccgagcctggagtggaacttttgatgagctcctaagtaaacagatcggacagttcctgcggacatactttagaatgaattacactggcctggctgagtatcctgatttctttgcggtctgtctcatcctcttgctcgctgggctcctgtcatttggagtcaaagaatcagcttgggttaacaaggtgttcaccgccgttaatatcctggtgttgcttttcgtgatggtggcaggctttgtgaagggcaacgtggccaattggaagatatcagaggaatttctgaaaaatataagcgcctcagccagggaacctccctctgagaacggcactagcatttatggcgccgggggcttcatgccgtacggtttcactgggaccttggcgggtgccgctacttgcttttacgcctttgtcggcttcgactgcattgctacaaccggggaggaagtaaggaacccacagaaagctatcccaatcggcatcgttaccagcctgctagtttgctttatggcctattttggcgtatcggccgccctcaccctaatgatgccctattatctcctggacgagaaaagtccccttcctgtggccttcgagtatgtcggctgggggcccgcaaagtatgttgtcgcagctggtagtctgtgtgctctcagcactagcttacttgggagtatcttcccgatgcctagagtgatctatgccatggccgaggatggtttactgttcaaatgcctggcccagattaactctaaaaccaagactcctataatagccaccctttcctctggggcggtagctgccctcatggcttttctgttcgatctgaaggcgctcgtcgacatgatgtctatcgggactcttatggcctattcccttgtggccgcctgtgttctgattctgcgttatcagccaggactcagttacgatcagcccaaatgttcaccagagaaggacggcctcggaagttctcccagggttacctccaagagcgagagccaggttactatgctccagcgccagggcttctcaatgagaacactgttttgtccttccttgctccctacccagcaatcagcgtcattagtttcctttctcgtgggctttctggctttcttagttttggggttatccgtattgacaacatatggcgtgcacgccattacccgactcgaggcctggtcccttgctctgctggccctgttcctggtgctgtttgtcgctatcgttttgacaatatggagacagccccagaatcaacaaaaggtagctttcatggttccatttctaccctttctgccggcctttagtatcctagtaaatatctacctgatggttcagctttccgcagacacgtgggtacggttttctatctggatggccattggatttctcatttacttttcctacggcattaggcattccctggagggccacctgcgggacgaaaataacgaggaagatgcttacccggataacgttcatgccgcggccgaggagaaatcagctatccaggctaacgatcaccaccctagaaacctgagtagccccttcatctttcacgaaaagacctccgagttctag

SEQ ID NO: 284771 - DNA, 1977 bp, Artificial Sequence
  derived and/or modified sequence
atgatcccctgccgggccgccctgaccttcgcccggtgcctgatcagaaggaaaatagtgaccttggatagtctcgaggacaccaagctgtgtcggtgtctcagtacgatggacctgatcgccctgggcgttggttcgaccttgggcgcaggcgtgtatgtactggctggagaggtggcaaaagccgacagcggccctagcattgtggtgtccttcttgatcgcagctctggcctccgtgatggcgggactgtgttatgccgaatttggagcccgggtgcccaagaccggttcagcatacttgtacacctatgtgaccgtgggcgaactttgggcatttattacagggtggaacttgattctctcatatgtcatcggcacatcaagcgtcgctcgcgcatggagcggtactttcgacgagctgctctccaagcagattggccagtttttgaggacctattttagaatgaattacacggggctggcagaataccccgactttttcgctgtgtgcctgatcctgctgctcgctgggctgctcagcttcggtgtcaaagaatccgcttgggtcaataaggtgttcacagccgttaatattcttgttcttctcttcgttatggtggctgggtttgtcaaaggcaatgtggctaactggaaaatctcggaggaattcctgaaaaacattagcgctagcgcccgtgagccgccctctgagaacggcacgagcatctatggagcaggcgggttcatgccttacggcttcacaggcaccctggccggagcagccacatgcttctacgcattcgtgggatttgactgtatcgcaaccactggcgaggaagttagaaatccgcagaaggccatcccaattgggattgtgacgagtttgctcgtgtgtttcatggcttactttggagtgtccgcagctttaactctaatgatgccatactacctacttgatgaaaagtccccactccccgtcgctttcgaatacgtggggtgggggcccgcaaagtacgtggtggcggcgggcagcttgtgcgccctcagcaccagtcttcttgggtccatcttccctatgccgagggtgatatacgcgatggcagaggacggtctcctgttcaagtgtttggcccagatcaactctaaaactaaaacccccattattgctaccttatcatctggcgctgtagcagcactaatggcttttctgttcgatctgaaggcccttgttgacatgatgagtatcggcacactgatggcgtatagtcttgttgccgcttgcgtgctgattctgcgatatcagcctggcctgagttatgatcaacccaaatgttctccggagaaagatggcctgggtagctctcccagggtaacctccaaaagcgaaagccaagttacaatgctgcaacgccagggattttccatgcggaccttgttctgcccctctctgctccctacacagcagagcgcttccctggtctcatttttggtcggctttttagcttttttggttcttggattgtctgtgttaaccacttacggtgtacacgccatcacaagactggaagcttggagccttgctctgctcgctctgttccttgtactgtttgtggccattgtccttactatttggcgccagcctcagaaccagcaaaaggttgcttttatggtaccattcctcccctttctgccggccttctcgatactcgttaatatatatttgatggtgcagctttccgcagatacttgggttaggttttcgatttggatggccataggcttcttaatctatttctcttacggcatacgtcatagtctggagggccatctgagagatgagaacaacgaggaggatgcctacccagacaatgtgcacgccgccgcagaggagaaatcagctatccaggccaatgaccaccatccacgcaacctcagcagtccatttatcttccacgaaaaaaccagtgagttctag

SEQ ID NO: 284772 - DNA, 1977 bp, Artificial Sequence
  derived and/or modified sequence
atgattccgtgcagggcggctttgacattcgctagatgtttgataagaaggaaaatcgttacactggacagcctcgaggataccaagctttgtcggtgcctgagcacgatggacctgattgccctcggtgttggcagcacactgggggctggcgtgtacgtcttggcaggtgaggttgctaaagcagactcaggaccatctatcgtcgtatccttcctcatcgctgctctcgcatctgttatggcgggattgtgttacgcggaattcggcgcaagagtaccaaaaactggctccgcatatctgtacacttacgtgaccgtaggagagttgtgggctttcataaccggatggaatctcatcctgagttacgtcattggcacatcatctgttgccagagcatggtctggcacatttgatgagctgttaagcaaacagatcggccaattcctgagaacttacttccgcatgaactacacgggtttagccgagtaccccgactttttcgccgtatgcctcatcctgctcctagccggactgttgtcatttggggttaaagaatctgcctgggtgaataaagtgtttaccgctgtgaatatcttggtgcttctcttcgtcatggtggctggctttgtcaaagggaatgttgccaactggaaaatctccgaggaatttctgaaaaacatctccgcttcagcgcgtgaacctccctcagagaatggaacttctatctacggggcaggaggctttatgccatacgggtttactgggactctggcaggcgcagctacatgcttctacgcattcgtagggttcgattgcatcgcaacaaccggagaggaggtccgaaatcctcagaaagccataccaattggtattgtaacatctctgctggtgtgcttcatggcttacttcggcgtttctgcagcacttactctgatgatgccgtattacctgctggacgagaaaagtcccctgccagtggcatttgagtacgtgggctggggcccagctaaatacgtggtagctgccggatcactttgcgctttgtctaccagcctgcttggaagtatctttcccatgccacgagtgatctacgctatggccgaggacgggttactctttaagtgccttgctcagattaattccaagacaaagacgcctataattgccaccttatccagtggagcagtcgcagctctgatggcttttctattcgacctgaaggcactggtggacatgatgtccatagggaccctgatggcttactctctggttgccgcttgtgttcttattcttaggtaccaacccggactatcctacgatcagcctaagtgttcgcccgagaaagacgggctcggctcttctccaagggtgacctcaaagtccgagagtcaagtgacaatgcttcagcggcaaggcttcagcatgagaacactgttctgtccgagcctattacctacccagcaatcagccagcctggtgtccttcctggttgggtttttggcttttctagtcctgggcctgagtgtcctgaccacctacggagtacacgcaattacgcggctggaagcgtggagcttagcgctactcgccttgtttttagtacttttcgtggcaattgtgctgaccatctggaggcagccccagaaccagcaaaaagttgctttcatggttcccttcctcccctttctgcccgctttttctattctggtcaacatctatctgatggtgcagttatccgctgatacctgggtaaggttcagcatctggatggccatcggctttcttatctatttttcttatggaattcgccatagcctcgaaggacacctgcgagacgaaaataacgaagaggacgcctatcccgataatgttcacgcagccgcagaggagaagtccgccatccaagccaacgaccatcaccctcgcaatctctcgtccccatttatatttcacgaaaagacgagtgagttttag

SEQ ID NO: 284773 - DNA, 1977 bp, Artificial Sequence
  derived and/or modified sequence
atgattccatgcagagcggctctgactttcgctagatgtcttatccgaaggaaaatagtgaccctggattccctggaagatactaaactgtgccggtgtctcagtacaatggatctgatcgccttgggggttggtagcactctgggcgcaggcgtctacgtgctagcgggagaggtagcaaaggctgacagtggcccttccatcgtggtgtcctttttgatagcagccctcgcaagcgtgatggccggattatgctatgccgaatttggagctcgggtccctaagactgggagcgcctacttatatacatatgtcactgttggcgagttatgggcattcatcaccggctggaaccttatcctgagttatgtaatcgggacctcttctgttgcgagggcatggagcggcaccttcgacgaactcctgtcaaagcaaattggccagttcctacgcacctactttaggatgaattacactggactagctgaataccccgatttcttcgccgtttgtctgatcctgttgctggccggtctcctttcctttggtgtgaaggagagtgcgtgggtgaataaggtttttactgcggtgaacatactcgttctgctgtttgtcatggtggccggattcgtgaaagggaatgttgctaattggaagatcagcgaagagttcctgaagaatatttccgcctcagcacgagaaccaccgtcagagaacgggacgtcaatatacggagcagggggattcatgccttacgggttcactggcacactggccggtgcagcaacctgcttctacgccttcgtgggattcgactgcattgccacaactggcgaggaggtgaggaacccccagaaggctatcccgattgggatcgtaacctcattgctggtttgtttcatggcctacttcggagtatctgctgccctgactcttatgatgccatactatctcctcgacgaaaaaagccccctcccagtcgcttttgaatatgtcggctgggggccagcaaagtatgtcgtggccgctggcagtctttgtgctctttccacctccctgctgggaagcatttttcctatgcctagagtgatatatgcaatggccgaggacggactgcttttcaagtgtctggctcagattaattccaagaccaagacccccattatcgcgaccttgtcctccggcgcagtggccgctcttatggccttcctatttgatcttaaagcgctggtcgacatgatgtcaatcggcactcttatggcctatagcctcgtggccgcatgcgtgcttatcttaagataccagcctggactgtcttacgaccagcctaagtgttcgcctgagaaagacggactaggaagcagtcctagagtgactagtaagagcgagagtcaagtcacgatgttgcaaagacagggctttagcatgaggacccttttttgcccaagtctccttccgactcagcagtctgctagcctggtctcctttttggtgggcttcctcgccttcctagtcctgggtctgtccgtgcttactacttatggtgtccacgccataacccggctcgaggcgtggtccctggcgctgctggccctgttcctcgtgcttttcgttgcaattgttttgacgatctggagacagccccagaatcagcagaaggtcgcatttatggtgccctttctgccgttcttgccagccttttcaattctggtgaatatctacctcatggtgcagttgagcgctgacacatgggtcaggttctctatttggatggccatcggcttcctcatttatttctcatacggtataaggcatagtctggaaggccacctacgggacgagaataacgaggaggatgcatatcctgacaatgtgcacgcagctgctgaagaaaagtctgccatccaggcgaatgaccatcaccccaggaatctgtctagtccattcatcttccacgaaaagacctccgagttttag

SEQ ID NO: 284774 - protein, 652 aa, Artificial Sequence
  derived and/or modified sequence
MAMDEYLWMVILGFIIAFILAFSVGANDVANSFGTAVGSGVVTLRQACILASIFETTGSVLLGAKVGETIRKGIIDVNLYNETVETLMAGEVSAMVGSAVWQLIASFLRLPISGTHCIVGSTIGFSLVAIGTKGVQWMELVKIVASWFISPLLSGFMSGLLFVLIRIFILKKEDPVPNGLRALPVFYAATIAINVFSIMYTGAPVLGLVLPMWAIALISFGVALLFAFFVWLFVCPWMRRKITGKLQKEGALSRVSDESLSKVQEAESPVFKELPGAKANDDSTIPLTGAAGETLGTSEGTSAGSHPRAAYGRALSMTHGSVKSPISNGTFGFDGHTRSDGHVYHTVHKDSGLYKDLLHKIHIDRGPEEKPAQESNYRLLRRNNSYTCYTAAICGLPVHATFRAADSSAPEDSEKLVGDTVSYSKKRLRYDSYSSYCNAVAEAEIEAEEGGVEMKLASELADPDQPREDPAEEEKEEKDAPEVHLLFHFLQVLTACFGSFAHGGNDVSNAIGPLVALWLIYKQGGVTQEAATPVWLLFYGGVGICTGLWVWGRRVIQTMGKDLTPITPSSGFTIELASAFTVVIASNIGLPVSTTHCKVGSVVAVGWIRSRKAVDWRLFRNIFVAWFVTVPVAGLFSAAVMALLMYGILPYV

SEQ ID NO: 284775 - DNA, 1959 bp, Artificial Sequence
  derived and/or modified sequence
atggcaatggatgaatatttatggatggttattcttggatttattatagctttcatcctggctttctcggtaggggctaacgatgtggctaactcattcggcaccgcagtggggagcggcgtcgtcacacttcgtcaggcctgtatactggcctctatatttgaaacgaccggcagcgtgttgcttggagctaaggtcggagagacaatcagaaagggtattatcgatgtcaatctctataatgagaccgtagaaaccctgatggcaggcgaagtttctgcgatggtggggtcagccgtgtggcagcttattgcgagctttttgcgattgccaatcagtgggactcattgtatcgtgggcagtaccatcggattttctttggtggcgattgggacaaaaggcgttcagtggatggagctggtcaagatcgtcgcatcctggtttatctcgccacttctgtccggctttatgagcggcctcctttttgtcctgatccggatattcatcctgaaaaaggaggaccctgtgcctaacggcttgagagccctacccgtgttctatgccgcaacaatcgcaattaacgtattctctatcatgtataccggggcccctgtgttaggtctggttctgcccatgtgggctatcgccctaatttcctttggggtggccctgctgtttgccttcttcgtatggttgttcgtatgtccatggatgaggcggaaaataacaggaaagctacagaaagagggagccctttcccgggtgtctgacgagtccctgtccaaggtccaagaggctgagagccctgtgtttaaggaattgccaggagccaaggcaaacgacgactcaactataccactgactggcgccgcgggcgaaactcttggaacctcagagggaactagcgctggctctcaccctcgggccgcctatgggcgggccctgtctatgacacacggctccgtcaagtctccaataagtaatggcacattcggattcgacgggcacacacgatccgatgggcacgtttatcataccgtccacaaggacagtgggctgtacaaggatttgctgcataagatccatatcgatcgcgggccagaagagaaacctgcacaagagtcaaattatagactgcttcggagaaataacagctatacatgctacacagcagccatttgtggactgccagtgcatgccaccttcagagccgcagactcgagtgccccggaggatagtgagaaattggtaggggatacagtgtcatactccaagaaacgactgcgttacgacagctacagttcctattgtaacgccgtcgccgaggccgagatcgaggctgaggagggcggggtcgagatgaagctcgcttccgagttagcagaccccgatcagccacgggaagacccggcggaggaggagaaagaagagaaagacgcccctgaggtgcatttgctgtttcacttcctccaggtcctgactgcctgcttcgggagcttcgcccatggcggtaatgatgtgagcaatgctatcgggccactggtggcattgtggctgatttacaagcagggcggcgtgactcaggaggcagccacaccggtttggctcctgttttatggaggtgtggggatctgtactggcctatgggtgtggggcagacgggttattcagactatgggaaaggacctcacccccatcaccccttcatctggcttcaccatcgaattagcatccgcattcacagtggtaatagccagcaatatcggacttccggtgagcaccacccattgtaaagtgggaagtgtggtggcagtaggatggatccgaagccggaaagcagtcgactggcgactctttagaaatatattcgtcgcatggttcgtgaccgttcccgtcgctggcttgttttccgctgccgttatggccctgcttatgtacggaatcttgccttacgtatag

SEQ ID NO: 284776 - DNA, 87 bp, Artificial Sequence
  derived and/or modified sequence
atggccatggacgaatacctgtggatggtcatacttgggttcatcatcgcgttcatccttgccttctctgtgggcgctaatgattag

SEQ ID NO: 284777 - DNA, 1959 bp, Artificial Sequence
  derived and/or modified sequence
atggccatggatgaatatttgtggatggtgatcctgggcttcattatcgcattcatcctggccttctccgttggcgctaacgacgtggccaatagcttcggcactgcggtgggctcaggtgtggtgaccctgcgacaagcttgtatactggcttccattttcgaaacgactggctcagtgttgcttggtgcaaaagtgggggagacaatccgcaagggaatcatcgacgtaaacttatataacgaaacagtagagacgttgatggccggcgaggtgtccgccatggttggcagcgccgtttggcagttgattgcttcatttctgcgcctgcctatctccgggacccattgtattgtcggaagtactattggattctcattggttgctatagggactaaaggcgtgcagtggatggaactggttaaaattgtcgcatcttggttcatctctcccctcctcagtggcttcatgtccgggttgctctttgtgctgatacggatcttcatcctgaagaaggaggaccccgttccaaacggcctaagagcgctacccgtcttctacgccgctactatagccataaatgtctttagcataatgtacaccggggccccggtgctcggccttgtattgcctatgtgggctatcgcgttgattagctttggagtggccttgctgttcgcgttcttcgtgtggctatttgtatgcccttggatgaggaggaaaatcacagggaaacttcagaaagagggggccctgagccgggtgagtgatgaaagcttatcaaaagtgcaggaggctgagagccctgtctttaaggaactccctggcgcaaaggcgaatgacgatagtacaattcctctcacaggggcagcgggtgaaacattggggacctctgaaggtacctccgcgggttcacatccccgagctgcctatggcagggcactctcaatgacacacggctctgtcaagtctcctatcagcaacgggacctttggatttgatggacacacacgaagcgacggacatgtttatcatacggttcacaaggatagcgggctgtacaaggatctgctgcacaagattcacatcgaccgcggaccagaagagaaacccgcccaggaaagtaactaccgcctcctgcgcaggaacaactcgtacacctgttacaccgccgcgatttgcggactgcccgtccacgctaccttccgggcagctgattctagcgcccctgaagactcagagaaactggtaggcgataccgtatcctactccaaaaaacgcctccgctatgattcctatagctcttattgcaatgcggttgctgaagccgagatagaagccgaagaggggggagtggagatgaaactagctagcgagcttgccgatcccgaccaaccaagggaggatcccgccgaggaggaaaaggaggagaaagatgctcccgaggtccacctgctgtttcactttctgcaggtgctcaccgcctgcttcggttcatttgctcatggtggcaacgacgtttctaatgctatcggccctctagtagcgctatggctcatttataagcagggcggggtgacccaggaggccgctacgccagtttggttgctgttttatgggggtgtcgggatctgtacgggactttgggtgtggggtagaagggtgatccagactatgggcaaggacctgactcctattacaccctctagcgggttcactatcgagctggccagtgcttttaccgtggttatcgcatctaacattggcctcccggtttcaacaacacactgtaaggtaggcagtgtcgtggccgtgggctggatcaggagtcgcaaggctgtagactggcggttgtttcggaatattttcgtcgcatggttcgtgacagtacccgtagctggtctgtttagtgcggctgtgatggctttattgatgtatggcatactgccctatgtctag

SEQ ID NO: 284778 - DNA, 1959 bp, Artificial Sequence
  derived and/or modified sequence
atggctatggacgagtatctgtggatggttatcctaggcttcattatcgcattcattctcgcctttagtgtaggcgcaaacgacgtggccaactccttcgggacagctgtgggttctggcgtagtaacgctccggcaggcttgtatcctggcgagtattttcgagaccaccggcagcgtgctgctcggggccaaggtgggcgagacaatcaggaagggcatcatcgatgtcaatttgtataatgaaaccgtggaaaccctgatggctggcgaggtttctgccatggtcgggagtgcagtatggcaactcattgcctcattccttagacttccgatctccggcacccattgtatcgtcggatccaccatcggtttcagcctggtggcaattggaacaaagggggttcaatggatggagctggttaagattgttgcaagctggttcatctcgccactgctctccggattcatgtctggactcctgttcgtcctcattagaatttttattttgaaaaaggaagaccccgtccccaatggccttcgcgctctgcctgtattttacgccgcaacaatcgctatcaacgtgttctcaattatgtataccggcgctccagttctgggcctggtccttcccatgtgggccatcgccttaatcagttttggcgtcgccttgctcttcgccttcttcgtgtggctgttcgtctgcccttggatgcgcagaaagataactgggaagctccagaaggaaggcgctctgtcacgagtaagcgacgaaagtctatccaaagtccaagaggctgaaagccccgtcttcaaagagctgcctggagccaaagccaatgatgatagcactatacccttgacaggcgcagcgggcgagaccctggggacgagcgaagggacgagcgctgggtcccacccgagggcagcttatggtagggcgttgagtatgacccatggcagcgtgaagagccctatctcaaatggcactttcggattcgacgggcatactcgcagcgacggccacgtgtatcataccgtacataaggactctggactgtacaaagacctactccacaagattcatatagaccgtggacctgaggagaaaccagcgcaggagtcaaactacagattgctgagaagaaacaattcttatacctgttataccgcagcaatctgcggactgcccgtgcatgccacattccgagctgccgatagctccgccccagaggattccgaaaaacttgtgggggacaccgtctcctacagcaagaaaaggctgcgttacgacagttacagcagctattgcaatgctgtagccgaggctgagattgaggctgaagagggaggagtggagatgaagctggccagtgagctcgctgacccggatcagcctcgggaggatcctgcggaagaagagaaggaggaaaaggacgctcccgaagttcacttattgtttcatttcctccaagtgctcacagcttgcttcgggtccttcgctcatggaggaaacgacgtgagtaatgccatcgggcccttagtcgcactgtggctgatttataagcagggtggagtgacccaggaagcagctacacctgtgtggctcctcttctatggcggcgttggaatctgcacgggcttgtgggtttggggccgtagggtcatacagactatgggcaaggacttaacccccatcacgccctcgagtggcttcacaattgaacttgctagtgctttcacagttgtgatagcatcaaatatcggtctcccagtctcaacgacccattgtaaggttgggtctgtggtggctgtaggctggatccgatcccggaaggcagttgactggcgacttttcagaaacattttcgtggcctggttcgtcacggttcctgtggccgggcttttttccgctgccgtgatggccctgctcatgtacggcatcctgccatatgtttag

SEQ ID NO: 284779 - DNA, 144 bp, Artificial Sequence
  derived and/or modified sequence
atggctatggacgagtatctgtggatggtcatattgggattcataattgcatttattctcgcatttagcgtgggagcaaatgatgtggctaacagctttggcactgctgtaggatccggagtggtcacgctgaggcaggcctag

SEQ ID NO: 284780 - DNA, 1959 bp, Artificial Sequence
  derived and/or modified sequence
atggccatggatgagtacctgtggatggtgatcctgggcttcatcatcgccttcatcctggccttctctgtgggcgccaatgatgtggccaacagctttggaacagctgtgggcagcggcgtggtgaccctgcggcaggcctgcatcctggccagcatctttgagaccactggatctgtgctgctgggcgccaaggtgggggagaccatcaggaagggcatcattgatgtgaacctgtacaatgaaacagtggagaccctgatggccggggaggtgtctgccatggtgggcagcgctgtgtggcagctgattgccagcttcctgcggctgcccatcagcggcacccactgcatcgtgggcagcaccatcggcttcagcctggtggccatcggcaccaagggcgtgcagtggatggagctggtgaagatcgtggcctcctggttcatcagccccctgctgagcggcttcatgagcggcctgctgtttgtgctgatccgcatcttcatcctgaagaaggaggaccctgtgcccaacggcctgcgggccctgcccgtcttctacgccgccaccatcgccatcaacgtgttcagcatcatgtacacaggagcccctgtgctgggcctggtgctgcccatgtgggccatcgccctgatcagctttggagtggccctgctgtttgccttctttgtgtggctgtttgtgtgcccctggatgaggaggaagatcaccgggaagctgcagaaggagggcgccctgagccgggtgtctgatgagagcctgagcaaggtgcaggaggccgagagccctgtgttcaaggagctgcccggggccaaggccaatgatgacagcaccatccccctgaccggggctgctggggagaccctgggcaccagcgagggcaccagcgctggcagccaccccagggctgcctacggccgggccctgtccatgacccacggctctgtgaagagccccatcagcaatggcacctttggatttgatggccacaccaggagtgatggccacgtgtaccacacagtgcacaaggacagcggcctgtacaaggacctgctgcacaagatccacatcgaccggggccctgaggagaagccagcccaggagagcaactaccgcctgctgcggaggaacaacagctacacctgctacacagctgccatctgtggcctgcctgtgcacgccaccttccgggctgctgacagcagcgccccagaagattctgagaagctggtgggggacacagtgtcctacagcaagaagaggctgcgctatgacagctacagcagctactgcaatgctgtggccgaggccgagattgaagctgaggagggcggcgtggagatgaagctggccagcgagctggccgaccctgaccagccccgggaggaccctgctgaggaggagaaggaggagaaggatgcccctgaggtgcacctgctcttccacttcctgcaggtgctgacagcctgcttcggcagctttgcccacggcggcaatgatgtgtccaatgccatcggccccctggtggccctgtggctgatctacaagcagggcggcgtgacccaggaggccgccacccctgtgtggctgctcttctatggaggagtgggcatctgcaccggcctgtgggtgtggggcagaagagtcatccagaccatgggcaaggacctgacccccatcacccccagcagcggcttcaccatcgagctggccagcgccttcaccgtggtgattgccagcaacatcggcctgcctgtgtccaccacccactgcaaggtgggctctgtggtggccgtgggctggatccgcagcaggaaggctgtggactggaggctcttcaggaacatctttgtggcctggtttgtgacagtgcctgtggccggcctcttctctgctgctgtgatggccctgctgatgtatggcatcctgccctacgtgtag

SEQ ID NO: 284781 - DNA, 87 bp, Artificial Sequence
  derived and/or modified sequence
atggccatggatgagtacctgtggatggtgatcctgggcttcatcatcgccttcatcctggccttctctgtgggcgccaatgactag

SEQ ID NO: 284782 - DNA, 144 bp, Artificial Sequence
  derived and/or modified sequence
atggccatggatgagtacctgtggatggtgatcctgggcttcatcatcgccttcatcctggccttctctgtgggcgccaatgatgtggccaacagctttggaacagctgtgggcagcggcgtggtgaccctgcggcaggcctag

SEQ ID NO: 284783 - DNA, 1959 bp, Artificial Sequence
  derived and/or modified sequence
atggccatggacgagtacctgtggatggtgatcctgggcttcatcattgccttcatcctggccttttctgtgggcgcaaacgatgtggcaaacagtttcggaacagcggtaggctccggcgtcgtaactctccggcaagcttgcattctggcgagtatctttgagactactgggtctgttctgttgggagcaaaggtgggggagactatacggaagggcattatcgatgtgaacctgtataacgagacagtagaaaccctgatggcgggggaagtctcggctatggtcggctcagcggtgtggcagttaatcgcttcctttctccgcttgccaatcagtggcacgcattgcatcgttggtagcacaattgggttttcgttggtcgccatcgggaccaaaggggtgcagtggatggaactggtgaaaattgttgcttcatggttcatcagccccctcctcagtgggttcatgagcgggctgctgttcgtgctgattcgaatttttatcctgaagaaagaggatcctgtccccaacgggctgcgcgcactgcccgttttttatgcagccactattgccatcaatgtcttctccatcatgtatacaggcgcaccagtcctgggacttgttctccctatgtgggcgatagcattgatcagttttggggtggcgctgctttttgccttcttcgtctggctcttcgtctgtccttggatgaggaggaagataacgggcaagttacaaaaagagggggctctgtctcgagtgtccgatgaatcacttagtaaagtgcaagaagctgagagcccagtgtttaaggaacttcctggcgctaaagccaatgatgacagcacaatcccattgacaggcgccgccggggagacactggggacatccgagggtacatccgcagggtcccatccacgcgccgcatacgggcgcgcactgagcatgactcacggatctgttaaatctccaatttccaacggcacgttcggctttgatggccacactagaagtgacggtcacgtctaccatactgttcacaaagattctggactgtacaaggatctccttcacaaaatccatatcgacagagggccagaggaaaaaccagcacaagaaagtaattaccgactgctgagacgcaacaacagctacacctgttacacggctgctatctgcgggctgcccgtccatgcgacgtttcgagcggctgactccagtgcaccagaagactcagagaaattggtcggggatacagtaagctactccaaaaaacggctcaggtacgatagctatagttcttattgtaatgcagtagctgaggccgaaatcgaggcagaggagggaggagtggaaatgaaactcgcaagcgagttggcggatcccgaccagccccgggaggaccccgctgaggaagagaaggaagaaaaagatgctccagaggtacatctgttattccattttctgcaggttctgactgcgtgtttcgggtccttcgcccatggcggaaacgatgtgtctaatgcaattggacccctcgtggcgctgtggctaatctataagcaaggcggcgttacacaggaagccgccacccctgtgtggctgttgttctatggtggtgtgggaatttgcacagggttatgggtgtgggggaggcgggtgatccaaacaatgggaaaggatctgacgccaattaccccctcatccggattcacaattgaactcgcaagcgcgttcaccgtggtgatcgccagtaatatcggactgcctgtttccaccacccactgtaaggtagggagcgtggttgccgtcggctggatacggagccggaaagctgtcgattggcgcctttttcggaatatcttcgtggcttggtttgttactgtgccagtggcaggcttgtttagtgcagcggtgatggccctcctcatgtatggcatactgccctatgtgtag

SEQ ID NO: 284784 - DNA, 87 bp, Artificial Sequence
  derived and/or modified sequence
atggccatggacgagtacctgtggatggtgatcctgggcttcatcatagctttcatactggcattctcagtcggggctaacgactag

SEQ ID NO: 284785 - DNA, 1959 bp, Artificial Sequence
  derived and/or modified sequence
atggccatggacgagtacctgtggatggtgatcctgggcttcatcatcgccttcattctggccttttccgtgggagctaatgacgtcgctaactccttcggcacggccgtcgggtccggcgtggtgactctgcgacaggcttgtattctggccagcatatttgagactactggcagcgtactcctgggtgctaaggtcggtgagaccatcagaaagggaatcatcgacgtgaatctgtacaacgaaactgtggaaacactgatggcaggagaagtaagtgcaatggtgggtagcgcagtgtggcagctgatcgccagttttctgcgattacctatatccgggacacattgcatcgtgggatcaaccattggcttctcactggttgctatcggcacaaaaggagtgcaatggatggagttggtgaagatcgtggcctcctggttcatttccccactgttaagcggttttatgtctgggctcctgttcgtcttgatcaggatcttcatccttaagaaagaggatcctgttcccaacgggctgcgggctctcccagtgttctatgccgcgacgatcgccatcaatgttttctcgattatgtatacaggcgcgcccgtactgggcctagtattacctatgtgggcaatcgccttgattagtttcggtgtggctctcctgttcgctttctttgtgtggcttttcgtgtgtccatggatgcgtaggaagataactgggaagctccagaaggaaggtgctttgtcccgtgtgagtgacgaaagcctcagtaaggtacaggaggcagagtccccagtgtttaaggagctgcccggagccaaggccaatgatgacagtactattccccttaccggtgcagccggcgaaaccctaggcacatccgaggggaccagcgccggttcccacccacgagcggcatatggcagagctctgtcaatgacccacgggtctgtcaaaagcccaatctctaacgggaccttcggcttcgatggccacactcggagcgatggccatgtgtaccataccgtacataaagattccgggctctacaaggatctgttacacaagatccacatcgacagaggccccgaggaaaaacctgcccaagaatctaactatcggttacttcgccggaataattcgtacacgtgctacacagctgccatttgcggcctccccgtccatgccacgtttagggctgccgattcatcggcccctgaggatagcgagaagctggtcggggacacagtgtcttacagcaaaaagaggctaaggtacgatagctattcaagttactgcaatgcagttgctgaggctgaaatcgaggcagaggagggcggagtggagatgaagctggccagtgaactggctgatcctgatcaaccaagagaggaccccgctgaggaggaaaaggaagaaaaggatgcccctgaagtgcacctgcttttccactttctgcaagttctgaccgcctgtttcggcagttttgcccatggtggcaatgacgtgtcaaatgcgattgggcccctggtggccctctggctaatatacaagcaggggggggtaacccaggaggcagccaccccggtgtggctgttgttttacggtggcgttgggatctgtaccgggctgtgggtatgggggagacgcgtcattcaaactatggggaaggatcttacacccatcacgccaagttcgggatttactatcgagctggccagtgccttcaccgtggtgatagcgagtaacataggcttacccgtgtcaacaacacactgtaaggtcgggagtgtggtcgctgttggatggattagaagcagaaaagcagtagattggagactattcaggaatattttcgtcgcatggtttgtgactgtgcccgtggcgggcctttttagtgctgcggtgatggcccttcttatgtatgggattctcccttacgtatag

SEQ ID NO: 284786 - DNA, 1959 bp, Artificial Sequence
  derived and/or modified sequence
atggccatggacgagtacctgtggatggtgatcctgggcttcatcatcgctttcatcctggcattttccgtcggcgccaacgatgtggccaactcctttggtacggcagtaggctctggggtagtcacacttaggcaggcctgtatccttgcatcaatttttgagacaacaggcagtgtccttctcggcgctaaggtcggcgagactatcagaaagggcatcattgacgtgaacctttacaacgagaccgtggagactctgatggctggggaggtgtcagctatggtagggtcagccgtctggcagctcattgcttctttccttcggctcccaatatccggcacccattgcatcgtcggaagtacaataggctttagtctcgttgccattggcaccaagggggtccagtggatggaactggtgaaaattgtggcaagctggtttatcagcccattactttccgggttcatgtcgggtcttctctttgtgctgatccgaatcttcattctgaaaaaagaagaccctgtccccaatggcctcagggctctccccgtgttttatgctgcaacaatcgcgattaatgtcttttctataatgtataccggcgcccccgtgttaggtctggtattacccatgtgggcaatcgcactcataagctttggcgtcgccctactttttgcgtttttcgtttggttgtttgtgtgcccttggatgcggagaaaaatcaccggaaagttgcaaaaagaaggcgcgctgagtcgggttagtgatgagtcactttctaaggtgcaggaggcggagtcgcccgtttttaaggaactgccaggtgctaaagctaacgacgactcaacaataccactgactggtgcggccggtgaaaccctgggcacctccgaaggaacatccgctggctcccacccacgggcggcctatggacgtgccctgtcaatgacccacggatcagtcaagtctcccatcagcaatggcacctttggatttgacggccacactaggtctgatggccacgtgtaccatacagtccacaaggattccggcctgtacaaagatcttctacataaaattcacatcgacagggggccagaagagaagccagctcaggagtctaattatcgattgctacgtaggaacaatagttacacatgctataccgcagccatttgtggcttgcctgtgcacgctactttccgcgctgctgactcgtctgcacccgaggattctgaaaagttagtgggggacacggtgagctactctaaaaagcgtctgagatacgacagctactcctcatactgcaatgccgtagccgaggccgagatcgaagccgaagagggaggcgtagaaatgaagctcgcttctgagctggctgatcccgatcagccacgggaggatcctgcggaggaggaaaaggaggagaaagacgctccagaagtgcatctgttgttccactttctgcaggtattaactgcctgttttggatcatttgcccatggggggaacgatgtgagcaatgccattgggccgctggtggcattgtggctgatctacaaacagggaggcgtgacccaggaggccgctactcctgtttggttgttattctacggtggagtaggcatatgcacgggcctatgggtgtggggaaggagagtgattcagaccatgggaaaggatctgactccaattactccatccagcggtttcaccatcgagctcgctagtgcgtttaccgtcgtgatcgcgagcaatataggacttccagtatcaaccacacactgcaaggtggggagcgtggtcgcagtgggatggatcaggagcaggaaggcagtggactggcgcctgtttaggaatatctttgtggcatggttcgtcacagtgcccgttgccggcctgtttagtgccgcagttatggccctacttatgtacggcatactcccttacgtgtag

SEQ ID NO: 284787 - DNA, 144 bp, Artificial Sequence
  derived and/or modified sequence
atggccatggacgagtacctgtggatggtgatcctgggcttcatcattgccttcattctagcctttagtgttggggcgaacgatgttgctaatagttttggcaccgccgtgggcagcggagtggtcaccctgagacaggcctag

SEQ ID NO: 284788 - DNA, 1959 bp, Artificial Sequence
  derived and/or modified sequence
atggccatggacgagtatctgtggatggtcattctgggttttattattgccttcattcttgcattttcggttggcgcaaatgatgtggcaaattcttttgggacagctgtgggttcaggtgtggtcacgcttcggcaggcttgcatcctggcatctatttttgagactacaggcagtgtcctccttggcgcaaaggtgggtgaaacaatccgcaaggggataatcgatgttaacctgtataatgagactgtagagactctgatggctggggaagttagtgcgatggtgggcagcgccgtttggcagctgatagccagtttcctgcgactgccaatatctgggacccactgcattgtaggaagtaccattgggttcagcctggtggccatcggcacaaaaggtgttcagtggatggagctggtcaaaattgtggccagctggttcatttccccacttctgtcaggtttcatgagcggactccttttcgtactcattcgcatctttatcttgaagaaagaggacccagtgccaaacggtctgcgagccctgccagtgttctatgccgctaccattgctataaacgtcttctccatcatgtacaccggggcacctgtgctgggcctggttctgcccatgtgggctatcgctctcattagttttggcgtggccctgctgtttgcctttttcgtgtggttgtttgtctgtccatggatgcgaaggaaaattaccgggaaactacagaaggaaggggctctgagcagggtcagtgatgagtctctttctaaagtgcaagaagccgaatcccccgtgtttaaagagctgccaggtgccaaggcgaatgacgacagcaccatcccactcacaggcgctgctggggaaactcttggcacgagcgagggcacaagcgctggaagtcacccaagggccgcatacgggagggcactgtctatgactcatggttctgtcaagagtcccatctcgaacggcacctttgggttcgatggtcatacccgtagcgacggccatgtgtaccacactgtgcacaaagatagcggcttgtacaaggacctgctgcataaaatccacatagaccgcggacctgaggaaaaacccgctcaggaatccaactacaggctgctgcggaggaataattcttacacttgttacacagctgctatttgcgggctgcccgtccatgcgacctttagggctgcggactcatccgccccagaggatagcgagaagcttgtaggtgatacagtctcatactcaaaaaaacgtctgcggtatgatagctacagtagttactgcaacgcagtcgcagaggctgagattgaggctgaggagggaggagtggagatgaagctggccagcgaactggcggacccagaccagcctcgggaagaccctgcagaagaggagaaagaggaaaaagatgcgccagaggtgcacctcctgttccattttctccaggtactaacagcttgtttcggctcatttgctcatggcggaaacgacgtgtctaacgctataggacctctcgtcgccctgtggctgatttataagcagggaggggttactcaagaagccgctacccccgtgtggctccttttttatgggggagtgggcatctgcacaggcctctgggtgtgggggagaagagtgattcagacaatgggtaaggatttaacccctattacgccatcctcaggctttaccatcgaacttgcatccgccttcacggtggtcatcgctagcaacataggactacccgtttctactacccactgcaaagtgggttccgtcgtggcagtgggctggattcggagccgaaaagcagtcgactggagactcttcagaaatatctttgtggcttggtttgttacggtgcctgttgccggtttgttttccgctgcagtgatggctctgttaatgtatggaatcttgccttacgtgtag

SEQ ID NO: 284789 - DNA, 87 bp, Artificial Sequence
  derived and/or modified sequence
atggcgatggacgaatatttatggatggtcatccttggctttatcatcgcttttattctggcattctcagtaggggcaaatgattag

SEQ ID NO: 284790 - DNA, 1959 bp, Artificial Sequence
  derived and/or modified sequence
atggccatggatgagtacctgtggatggttattctgggcttcatcatcgcttttatcctggccttctccgttggagccaatgacgtagccaattccttcggaacagccgtcggctccggcgtggttactctgcgccaggcctgtatcttagcgtccatttttgagacaacaggatcggtgctgctgggcgctaaggtgggcgagaccattagaaagggtatcatcgatgtaaacctctacaacgagacagtggaaactttaatggctggagaagtctctgcaatggtgggctccgccgtgtggcaactgattgcttccttcctccgactccccatctcagggactcattgtattgtgggatccaccatcggattctccctcgtggccattggcactaagggtgtgcagtggatggaactggtgaaaattgtggcttcctggtttatctcccccctgctctcaggtttcatgtctgggcttctgttcgttctcatcagaatttttatactcaagaaagaggacccagtccccaacggcctccgcgctctgcccgtattttacgccgctaccatcgccatcaacgtgttctctattatgtacactggggctcccgttttaggcctcgtcctcccgatgtgggctatcgccctgatctcattcggcgtggctctcctctttgccttcttcgtgtggttgttcgtgtgtccttggatgaggaggaaaattactgggaagcttcagaaagaaggcgcactcagtagggtgtctgacgagtctttgtctaaggtgcaagaggccgagtctcctgtgtttaaagagctccccggagcaaaggccaacgatgattctaccatacccctgacaggcgcagccggagaaacactgggcacatcagaaggcacgtcagcagggtctcacccgagggccgcttatggacgggcactgtccatgacgcacgggtctgtcaagtctccgatttccaacggtacctttggatttgatgggcatacgcgcagtgacggccacgtttatcatacagtccacaaggatagcgggctgtacaaggatctccttcataagatccacatcgaccgcggaccagaggagaaacccgcacaggaaagcaactacagactcctgagacggaataatagctatacgtgttacactgccgcaatttgtggacttccagtgcacgcaacatttcgcgctgcggattcgtccgcacctgaggattcggagaaattggtgggcgacacagtcagttatagcaaaaaaagactccgatatgatagttactcttcttactgcaatgccgtggcagaagccgagatcgaggcggaggaaggcggtgtcgagatgaagctggccagcgagctggccgatccggaccagcccagagaggatccagccgaggaagagaaagaggagaaagacgccccagaggtccacctcctgtttcattttctccaggtgctgacagcatgcttcggaagcttcgcgcacggtggaaatgacgtgtctaatgcaatcggtcccctcgtggctttgtggttaatatacaaacaagggggtgtgacacaagaagccgctacacccgtgtggctattgttttacgggggtgtgggcatctgcaccggcctgtgggtgtggggcaggagggtgatccagactatggggaaagacttgactcccataactccctccagcggttttacgatcgagctcgcttctgcattcaccgtagtcatcgcctcgaatattggcctccccgtgtcaaccactcattgcaaagtcgggtctgtcgtggccgtagggtggatacgcagtcgtaaagctgtagactggcgcttgtttcgaaatatctttgtggcctggttcgtgaccgtccccgtcgctggcctcttcagcgcggcagttatggccctgctgatgtacggcattctcccttacgtctag

SEQ ID NO: 284791 - DNA, 1959 bp, Artificial Sequence
  derived and/or modified sequence
atggcgatggatgagtacctgtggatggtgatcctcggtttcataattgccttcattctggcttttagcgtcggggctaatgacgtggccaatagtttcggcaccgccgttggctccggcgtggtcaccctgcgccaggcttgcatactggcctctatttttgagacgacaggctcagtgttgctgggcgctaaggtaggggagactattcggaaggggataatcgacgttaacttgtacaacgagaccgtggagactctcatggcaggggaggtgtccgcgatggttggaagcgcagtgtggcagctgatcgcttcttttctgaggctacccattagcggaactcattgcatcgtgggtagcactattgggttctcgctggtggccattggcaccaagggcgtgcagtggatggagctcgtcaaaattgtggcatcttggttcatttctccactgctttccggctttatgagtggcctgttgtttgttcttataaggatctttatcctcaagaaggaagatccagtacccaacggcctgagggccttgcctgttttctacgcagcgactattgctatcaacgtgttttcaatcatgtacaccggggctcccgttttgggcctggtactgcctatgtgggcgatcgctctgattagctttggcgttgcactactcttcgccttcttcgtttggctgttcgtttgtccttggatgcgcaggaaaattacagggaagctgcagaaagagggtgcattgagtcgcgtgtccgacgagagtttatcgaaagtacaggaggccgagagtccggtgtttaaagagctccctggggcaaaagctaacgacgacagcaccattcccctaaccggtgcggcaggagaaaccttgggaactagcgaggggacctcagccggaagccaccctagagctgcctacggccgtgcgttgtctatgacacacggtagcgtgaaaagccctatcagtaacggcacattcggattcgacgggcacacccgatcggacgggcatgtttaccacaccgttcataaggatagcggtctatataaagatctgctgcacaagatccacattgaccggggtcccgaggagaagccagcacaagaaagcaactatcggctgctgcgacgcaataactcatatacgtgctacacagcagccatttgcgggcttcccgtccacgctacgtttagagctgccgatagctcagccccagaggatagcgaaaagctggtcggagataccgttagttacagcaagaagcgccttagatatgacagttactcctcatattgtaatgcggtagccgaggcagagatcgaagcagaggaaggtggcgttgaaatgaaactggctagtgaactcgctgatcccgaccaacctcgggaagaccccgctgaggaagagaaggaggagaaggatgccccagaggtccacctcttgttccacttcctccaagttctaacagcgtgttttggcagcttcgctcacggcggaaacgatgtttctaatgcgatcggacctctggtggcactgtggctgatttataagcaggggggagtcacacaagaagctgcaaccccagtgtggctgttgttttatggcggagtggggatttgcaccggcttatgggtttggggacgtcgggtcatccaaacaatggggaaggatctgactcccattaccccctctagcggattcaccatcgagctggcctctgccttcaccgttgtgattgcatccaatattggtctgcctgtgtcaaccactcactgcaaagtcgggagtgtcgtggcagtagggtggattcgttccaggaaggccgtcgactggaggctgttcaggaacatttttgttgcatggttcgtcactgtgccggtggccggactgttctccgctgctgtaatggccctccttatgtacggcatcctaccttatgtgtag

SEQ ID NO: 284792 - DNA, 144 bp, Artificial Sequence
  derived and/or modified sequence
atggccatggatgaatatctctggatggtgatcctgggctttatcatagcattcatccttgccttttctgtgggagccaacgatgtcgctaactcttttggaaccgcagttgggagtggcgtcgtgactctcagacaggcatag

SEQ ID NO: 284793 - DNA, 3657 bp, Artificial Sequence
  derived and/or modified sequence
cgcttccggaagcgggcgactcgcagctccacgcgacgccgaggggctccgcgccgggaccgggcgggtgctcggagtttcggggaccgcacgggaccgagggcaggaggagacatcacagctttcccagatcgggaggaaaaatatggaatgtgttttaccgctgactgaacacaaccaaatgaactgtcctgacagtagtttgcaaaccagcagctagcagtttgtccagcctctaacattgtccagcactttccagagcaaactcactgtttacaagaactcttggccttacgaagtttataacctcaagctttgtttatttaaaatattcctgcaaaagaaaagtacccggcacccactttccaaaatggccatggatgagtatttgtggatggtcattttgggtttcatcatagctttcatcttggccttttctgttggtgcaaacgatgttgccaactcctttggtacagccgtgggctctggtgtggtgaccttgaggcaggcatgcattttagcttcaatatttgaaaccaccggctccgtgttactaggcgccaaagtaggagaaaccattcgcaaaggtatcattgacgtgaacctgtacaacgagacggtggagactctcatggctggggaagttagtgccatggttggttccgctgtgtggcagctgattgcttccttcctgaggcttccaatctcaggaacgcactgcattgtgggttctactataggattctcactggtcgcaatcggtaccaaaggtgtgcagtggatggagcttgtcaagattgttgcttcttggtttatatctccactgttgtctggtttcatgtctggcctgctgtttgtactcatcagaattttcatcttaaaaaaggaagaccctgttcccaatggcctccgggcactcccagtattctatgctgctaccatagcaatcaatgtcttttccatcatgtacacaggagcaccagtgctcggccttgttctccccatgtgggccatagccctcatttcctttggtgtcgccctcctgttcgctttttttgtgtggctcttcgtgtgtccgtggatgcggaggaaaataacaggcaaattacaaaaagaaggtgctttatcacgagtatctgacgaaagcctcagtaaggttcaggaagcagagtccccagtatttaaagagctaccaggtgccaaggctaatgatgacagcaccatcccgctcacgggagcagcaggggagacactggggacctcggaaggcacttctgcgggcagccaccctcgggctgcatacggaagagcactgtccatgacccatggctctgtgaaatcgcccatctccaacggcaccttcggcttcgacggccacaccaggagcgacggtcatgtgtaccacaccgtgcacaaagactcggggctctacaaagatctgctgcacaaaatccacatcgacaggggccccgaggagaagccagcccaggaaagcaactaccggctgctgcgccgaaacaacagttacacctgctacaccgcagccatttgtgggctgccagtgcacgccacctttcgagctgcggactcatcggccccagaggacagtgagaagctggtgggcgacaccgtgtcctactccaagaagaggctgcgctacgacagctactcgagctactgtaacgcggtggcagaggcggagatcgaggcggaggagggcggcgtggagatgaagctggcgtcggagctggccgaccctgaccagccgcgagaggaccctgcagaggaggagaaggaggagaaggacgcacccgaggttcacctcctgttccatttcctgcaggtcctcaccgcctgtttcgggtcctttgctcacggcggcaatgacgtgagtaatgccatcggtcccctggtagccttgtggctgatttacaaacaaggcggggtaacgcaagaagcagctacacccgtctggctgctgttttatggaggagttggaatctgcacaggcctctgggtctgggggagaagagtgatccagaccatggggaaggacctcactcccatcacgccgtccagcggcttcacgatcgagctggcctcagccttcacagtggtgatcgcctccaacatcgggcttccagtcagcaccacgcactgtaaggtgggctcggtggtggccgtgggctggatccgctcccgcaaggctgtggactggcgcctctttcggaacatcttcgtggcctggttcgtgaccgtccctgtggctgggctgttcagcgctgctgtcatggctcttctcatgtatgggatccttccatatgtgtgatttgtcttcttccagctgcaaacagctaaagggatggtctggtgttggcgtgtgggagacatgtgtgctcgtgccgcacatacacatcctggccgtgcacggctctctcatgaccagctctctgcctcccttccaggaggctccatcccacactgttcacccaggctgcggagactcaccttcccgagctaacttaactactgtacataataatatgtattaaactggtatcgtggtgatataatgtggtgcagttacttatatattaaatatctattgtatccatagaataggcagcattatttcaaacatattcaagttgggagtggagatcattgcctagaagtcaatattcaataaatcttgtacataactatttcgatggcaaatgttaagccttctaaaaggaaagtgtagattggaaaatgattttttttccaaatgatgtttttgccttctaatatactgtaaggtaatgagcttcagaacaggcaacctgaccctgcagaggtcgcgtgctgtgggatgacagcgggacgggagctcacaagtgctttcactgaagatttgttcatatactgtgtattgattgttgtgtaatatatcatcattgcttttgtaaatacgtaaaactgtaattttttaatggtgtgcttcccttatacttttttgatcagagaattttggaaagtaccaaagaagcaggggaatcattggccagtgttacgttttcacattgtctgtctcccaccctcactgatcacgcctgccccagagcagtgtgtggcggtgacaccgtcacccagcatgcgccacgccgtggctcccaccagcagtgccaccgccaccacaccccagatcccacccaccttgcagtggcctttccttgtcatcagagtagagaatgcacaggtgttggtgagggcgtgtggctgagcactacatgtcaagtccagagtcagtttctatcccaattctccctgcagcctgaagaacggatccttgtctccaatgtcagcacaaaggaggctttttctgtgctttgacattctagcacttcagggatgagagggagggagaatcctggatgctggatggagtatttctctgaggcccacacaaagctggacacccccaggctctactccatcccattggagtctcttctttttttgatagcgggagggaggaagtacgactaatgttggagcctgaaactatggaaatgctgctaaaatttttatattgacaaacattttcttggtacttcattgtcatttttcattaatcaaccatattaaatttataataaaaaatgcccctcagaa

SEQ ID NO: 284794 - DNA, 2284 bp, Artificial Sequence
  derived and/or modified sequence
cccttttcagttttttgagccggagagacgcagcggcggccccagtgccgcccccgggcgcgaggagacatcacagctttcccagatcgggaggaaaaatatggaatgtgttttaccgctgactgaacacaaccaaatgaactgtcctgacagtagtttgcaaaccagcagctagcagtttgtccagcctctaacattgtccagcactttccagagcaaactcactgtttacaagaactcttggccttacgaagtttataacctcaagctttgtttatttaaaatattcctgcaaaagaaaagtacccggcacccactttccaaaatggccatggatgagtatttgtggatggtcattttgggtttcatcatagctttcatcttggccttttctgttggtgcaaacgatgttgccaactcctttggtacagccgtgggctctggtgtggtgaccttgaggcaggcatgcattttagcttcaatatttgaaaccaccggctccgtgttactaggcgccaaagtaggagaaaccattcgcaaaggtatcattgacgtgaacctgtacaacgagacggtggagactctcatggctggggaagttagtgccatggttggttccgctgtgtggcagctgattgcttccttcctgaggcttccaatctcaggaacgcactgcattgtgggttctactataggattctcactggtcgcaatcggtaccaaaggtgtgcagtggatggagcttgtcaagattgttgcttcttggtttatatctccactgttgtctggtttcatgtctggcctgctgtttgtactcatcagaattttcatcttaaaaaaggaagaccctgttcccaatggcctccgggcactcccagtattctatgctgctaccatagcaatcaatgtcttttccatcatgtacacaggagcaccagtgctcggccttgttctccccatgtgggccatagccctcatttcctttggtgtcgccctcctgttcgctttttttgtgtggctcttcgtgtgtccgtggatgcggaggaaaataacaggcaaattacaaaaagaaggtgctttatcacgagtatctgacgaaagcctcagtaaggttcaggaagcagagtccccagtatttaaagagctaccaggtgccaaggctaatgatgacagcaccatcccgctcacgggagcagcaggggagacactggggacctcggaaggcacttctgcgggcagccaccctcgggctgcatacggaagagcactgtccatgacccatggctctgtgaaatcgcccatctccaacggcaccttcggcttcgacggccacaccaggagcgacggtcatgtgtaccacaccgtgcacaaagactcggggctctacaaagatctgctgcacaaaatccacatcgacaggggccccgaggagaagccagcccaggaaagcaactaccggctgctgcgccgaaacaacagttacacctgctacaccgcagccatttgtgggctgccagtgcacgccacctttcgagctgcggactcatcggccccagaggacagtgagaagctggtgggcgacaccgtgtcctactccaagaagaggctgcgctacgacagctactcgagctactgtaacgcggtggcagaggcggagatcgaggcggaggagggcggcgtggagatgaagctggcgtcggagctggccgaccctgaccagccgcgagaggaccctgcagaggaggagaaggaggagaaggacgcacccgaggttcacctcctgttccatttcctgcaggtcctcaccgcctgtttcgggtcctttgctcacggcggcaatgacgtgagtaatgccatcggtcccctggtagccttgtggctgatttacaaacaaggcggggtaacgcaagaagcagctacacccgtctggctgctgttttatggaggagttggaatctgcacaggcctctgggtctgggggagaagagtgatccagaccatggggaaggacctcactcccatcacgccgtccagcggcttcacgatcgagctggcctcagccttcacagtggtgatcgcctccaacatcgggcttccagtcagcaccacgcactgtaaggtgggctcggtggtggccgtgggctggatccgctcccgcaaggctgtggactggcgcctctttcggaacatcttcgtggcctggttcgtgaccgtccctgtggctgggctgttcagcgctgctgtcatggctcttctcatgtatgggatccttccatatgtgtga

SEQ ID NO: 284795 - DNA, 2992 bp, Artificial Sequence
  derived and/or modified sequence
gtgcttaaaaatcaagtgaatgcctgttgggaaaaagcttactccttctctttgtcagtacttgcaaaaacaacttaaaagaagttagtattattggactgaattcagtaattagcataatcatgatgctatgtattgttcaccagggcacgccccttggccgcatttcccattaagaggacaccgatgttgtcctagtgaataaatcccggcacacatgatgcaaatcagcgtgttcctgcctgctgcttggctgcagttaattttagccggggttagttctatgagttgtaaaagtagaagttagcaagctgaaatgtgacttctcggcctaatgtggtaggatatctattttagacttcagattgtgtttgtgatcaggagagcagtcttctgaagaattgtggctcagttttcttggaaactacttgaggagacatcacagctttcccagatcgggaggaaaaatatggaatgtgttttaccgctgactgaacacaaccaaatgaactgtcctgacagtagtttgcaaaccagcagctagcagtttgtccagcctctaacattgtccagcactttccagagcaaactcactgtttacaagaactcttggccttacgaagtttataacctcaagctttgtttatttaaaatattcctgcaaaagaaaagtacccggcacccactttccaaaatggccatggatgagtatttgtggatggtcattttgggtttcatcatagctttcatcttggccttttctgttggtgcaaacgatgttgccaactcctttggtacagccgtgggctctggtgtggtgaccttgaggcaggcatgcattttagcttcaatatttgaaaccaccggctccgtgttactaggcgccaaagtaggagaaaccattcgcaaaggtatcattgacgtgaacctgtacaacgagacggtggagactctcatggctggggaagttagtgccatggttggttccgctgtgtggcagctgattgcttccttcctgaggcttccaatctcaggaacgcactgcattgtgggttctactataggattctcactggtcgcaatcggtaccaaaggtgtgcagtggatggagcttgtcaagattgttgcttcttggtttatatctccactgttgtctggtttcatgtctggcctgctgtttgtactcatcagaattttcatcttaaaaaaggaagaccctgttcccaatggcctccgggcactcccagtattctatgctgctaccatagcaatcaatgtcttttccatcatgtacacaggagcaccagtgctcggccttgttctccccatgtgggccatagccctcatttcctttggtgtcgccctcctgttcgctttttttgtgtggctcttcgtgtgtccgtggatgcggaggaaaataacaggcaaattacaaaaagaaggtgctttatcacgagtatctgacgaaagcctcagtaaggttcaggaagcagagtccccagtatttaaagagctaccaggtgccaaggctaatgatgacagcaccatcccgctcacgggagcagcaggggagacactggggacctcggaaggcacttctgcgggcagccaccctcgggctgcatacggaagagcactgtccatgacccatggctctgtgaaatcgcccatctccaacggcaccttcggcttcgacggccacaccaggagcgacggtcatgtgtaccacaccgtgcacaaagactcggggctctacaaagatctgctgcacaaaatccacatcgacaggggccccgaggagaagccagcccaggaaagcaactaccggctgctgcgccgaaacaacagttacacctgctacaccgcagccatttgtgggctgccagtgcacgccacctttcgagctgcggactcatcggccccagaggacagtgagaagctggtgggcgacaccgtgtcctactccaagaagaggctgcgctacgacagctactcgagctactgtaacgcggtggcagaggcggagatcgaggcggaggagggcggcgtggagatgaagctggcgtcggagctggccgaccctgaccagccgcgagaggaccctgcagaggaggagaaggaggagaaggacgcacccgaggttcacctcctgttccatttcctgcaggtcctcaccgcctgtttcgggtcctttgctcacggcggcaatgacgtgagtaatgccatcggtcccctggtagccttgtggctgatttacaaacaaggcggggtaacgcaagaagcagctacacccgtctggctgctgttttatggaggagttggaatctgcacaggcctctgggtctgggggagaagagtgatccagaccatggggaaggacctcactcccatcacgccgtccagcggcttcacgatcgagctggcctcagccttcacagtggtgatcgcctccaacatcgggcttccagtcagcaccacgcactgtaaggtgggctcggtggtggccgtgggctggatccgctcccgcaaggctgtggactggcgcctctttcggaacatcttcgtggcctggttcgtgaccgtccctgtggctgggctgttcagcgctgctgtcatggctcttctcatgtatgggatccttccatatgtgtgatttgtcttcttccagctgcaaacagctaaagggatggtctggtgttggcgtgtgggagacatgtgtgctcgtgccgcacatacacatcctggccgtgcacggctctctcatgaccagctctctgcctcccttccaggaggctccatcccacactgttcacccaggctgcggagactcaccttcccgagctaacttaactactgtacataataatatgtattaaactggtatcgtggtgatataatgtggtgcagttacttatatattaaatatctattgtatccatagaataggcagcattatttcaaacatattcaagttgggagtggagatcattgc

SEQ ID NO: 284796 - DNA, 1959 bp, Artificial Sequence
  derived and/or modified sequence
atggccatggacgagtacctgtggatggtgatcctgggcttcatcatcgccttcatcctggccttcagcgtgggcgccaacgacgtggccaacagcttcggcaccgccgtgggcagcggcgtggtgaccctgagacaggcctgcatcctggccagcatcttcgagaccaccggcagcgtgctgctgggcgccaaggtgggcgagaccatcagaaagggcatcatcgacgtgaacctgtacaacgagaccgtggagaccctgatggccggcgaggtgagcgccatggtgggcagcgccgtgtggcagctgatcgccagcttcctgagactgcccatcagcggcacccactgcatcgtgggcagcaccatcggcttcagcctggtggccatcggcaccaagggcgtgcagtggatggagctggtgaagatcgtggccagctggttcatcagccccctgctgagcggcttcatgagcggcctgctgttcgtgctgatcagaatcttcatcctgaagaaggaggaccccgtgcccaacggcctgagagccctgcccgtgttctacgccgccaccatcgccatcaacgtgttcagcatcatgtacaccggcgcccccgtgctgggcctggtgctgcccatgtgggccatcgccctgatcagcttcggcgtggccctgctgttcgccttcttcgtgtggctgttcgtgtgcccctggatgagaagaaagatcaccggcaagctgcagaaggagggcgccctgagcagagtgagcgacgagagcctgagcaaggtgcaggaggccgagagccccgtgttcaaggagctgcccggcgccaaggccaacgacgacagcaccatccccctgaccggcgccgccggcgagaccctgggcaccagcgagggcaccagcgccggcagccaccccagagccgcctacggcagagccctgagcatgacccacggcagcgtgaagagccccatcagcaacggcaccttcggcttcgacggccacaccagaagcgacggccacgtgtaccacaccgtgcacaaggacagcggcctgtacaaggacctgctgcacaagatccacatcgacagaggccccgaggagaagcccgcccaggagagcaactacagactgctgagaagaaacaacagctacacctgctacaccgccgccatctgcggcctgcccgtgcacgccaccttcagagccgccgacagcagcgcccccgaggacagcgagaagctggtgggcgacaccgtgagctacagcaagaagagactgagatacgacagctacagcagctactgcaacgccgtggccgaggccgagatcgaggccgaggagggcggcgtggagatgaagctggccagcgagctggccgaccccgaccagcccagagaggaccccgccgaggaggagaaggaggagaaggacgcccccgaggtgcacctgctgttccacttcctgcaggtgctgaccgcctgcttcggcagcttcgcccacggcggcaacgacgtgagcaacgccatcggccccctggtggccctgtggctgatctacaagcagggcggcgtgacccaggaggccgccacccccgtgtggctgctgttctacggcggcgtgggcatctgcaccggcctgtgggtgtggggcagaagagtgatccagaccatgggcaaggacctgacccccatcacccccagcagcggcttcaccatcgagctggccagcgccttcaccgtggtgatcgccagcaacatcggcctgcccgtgagcaccacccactgcaaggtgggcagcgtggtggccgtgggctggatcagaagcagaaaggccgtggactggagactgttcagaaacatcttcgtggcctggttcgtgaccgtgcccgtggccggcctgttcagcgccgccgtgatggccctgctgatgtacggcatcctgccctacgtgtag

SEQ ID NO: 284797 - DNA, 87 bp, Artificial Sequence
  derived and/or modified sequence
atggccatggacgagtacctgtggatggtgatcctgggcttcatcatcgccttcatcctggccttcagcgtgggcgccaacgactag

SEQ ID NO: 284798 - DNA, 144 bp, Artificial Sequence
  derived and/or modified sequence
atggccatggacgagtacctgtggatggtgatcctgggcttcatcatcgccttcatcctggccttcagcgtgggcgccaacgacgtggccaacagcttcggcaccgccgtgggcagcggcgtggtgaccctgagacaggcctag

SEQ ID NO: 284799 - protein, 71 aa, Artificial Sequence
  derived and/or modified sequence
MAMDEYLWMVILGFIIAFILAFSVGANDVANSFGTAVGSGVVTLRQACILASIFETTGSVLLGAKVGETIR

SEQ ID NO: 284800 - protein, 28 aa, Artificial Sequence
  derived and/or modified sequence
MAMDEYLWMVILGFIIAFILAFSVGAND

SEQ ID NO: 284801 - protein, 78 aa, Artificial Sequence
  derived and/or modified sequence
MAMDEYLWMVILGFIIAFILAFSVGANDVANSFGTAVGSGVVTLRQACILASIFETTGSVLLGAKVGETIRKGIIDVN

SEQ ID NO: 284802 - protein, 47 aa, Artificial Sequence
  derived and/or modified sequence
MAMDEYLWMVILGFIIAFILAFSVGANDVANSFGTAVGSGVVTLRQA

SEQ ID NO: 284803 - protein, 443 aa, Artificial Sequence
  derived and/or modified sequence
MLSSFPVVLLETMSHYTDEPRFTIEQIDLLQRLRRTGMTKHEILHALETLDRLDQEHSDKFGRRSSYGGSSYGNSTNNVPASSSTATASTQTQHSGMSPSPSNSYDTSPQPCTTNQNGRENNERLSTSNGKMSPTRYHANSMGQRSYSFEASEEDLDVDDKVEELMRRDSSVIKEEIKAFLANRRISQAVVAQVTGISQSRISHWLLQQGSDLSEQKKRAFYRWYQLEKTNPGATLSMRPAPIPIEDPEWRQTPPPVSATSGTFRLRRGSRFTWRKECLAVMESYFNENQYPDEAKREEIANACNAVIQKPGKKLSDLERVTSLKVYNWFANRRKEIKRRANIAAILESHGIDVQSPGGHSNSDDVDGNDYSEQDTWQVRNGEEEEGRSSEGGREAEKDDSTSHSDHQDPISLAVEMAAVNHTILALARQGANEIKTEALDDD

SEQ ID NO: 284804 - protein, 405 aa, Artificial Sequence
  derived and/or modified sequence
MLSSFPVVLLETMSHYTDEPRFTIEQIDLLQRLRRTGMTKHEILHALETLDRLDQEHSDKFGRRSSYGGSSYGNSTNNVPASSSTATASTQTQHSGMSPSPSNSYDTSPQPCTTNQNGRENNERLSTSNGKMSPTRYHANSMGQRSYSFEASEEDLDVDDKVEELMRRDSSVIKEEIKAFLANRRISQAVVAQVTGISQSRISHWLLQQGSDLSEQKKRAFYRWYQLEKTNPGATLSMRPAPIPIEDPEWRQTPPPVSATSGTFRLRRGSRFTWRKECLAVMESYFNENQYPDEAKREEIANACNAVIQKPGKKLSDLERVTSLKVYNWFANRRKEIKRRANIAAILESHGIDVQSPGGHSNSDDVDGNDYSEQDTWQVRNGEEEEGRSSEGGREAEKVEEERRI

SEQ ID NO: 284805 - DNA, 1332 bp, Artificial Sequence
  derived and/or modified sequence
atgctgagcagcttccccgtggtgctgctggagaccatgagccactacaccgacgagcccagattcaccatcgagcagatcgacctgctgcagagactgagaagaaccggcatgaccaagcacgagatcctgcacgccctggagaccctggacagactggaccaggagcacagcgacaagttcggcagaagaagcagctacggcggcagcagctacggcaacagcaccaacaacgtgcccgccagcagcagcaccgccaccgccagcacccagacccagcacagcggcatgagccccagccccagcaacagctacgacaccagcccccagccctgcaccaccaaccagaacggcagagagaacaacgagagactgagcaccagcaacggcaagatgagccccaccagataccacgccaacagcatgggccagagaagctacagcttcgaggccagcgaggaggacctggacgtggacgacaaggtggaggagctgatgagaagagacagcagcgtgatcaaggaggagatcaaggccttcctggccaacagaagaatcagccaggccgtggtggcccaggtgaccggcatcagccagagcagaatcagccactggctgctgcagcagggcagcgacctgagcgagcagaagaagagagccttctacagatggtaccagctggagaagaccaaccccggcgccaccctgagcatgagacccgcccccatccccatcgaggaccccgagtggagacagacccccccccccgtgagcgccaccagcggcaccttcagactgagaagaggcagcagattcacctggagaaaggagtgcctggccgtgatggagagctacttcaacgagaaccagtaccccgacgaggccaagagagaggagatcgccaacgcctgcaacgccgtgatccagaagcccggcaagaagctgagcgacctggagagagtgaccagcctgaaggtgtacaactggttcgccaacagaagaaaggagatcaagagaagagccaacatcgccgccatcctggagagccacggcatcgacgtgcagagccccggcggccacagcaacagcgacgacgtggacggcaacgactacagcgagcaggacacctggcaggtgagaaacggcgaggaggaggagggcagaagcagcgagggcggcagagaggccgagaaggacgacagcaccagccacagcgaccaccaggaccccatcagcctggccgtggagatggccgccgtgaaccacaccatcctggccctggccagacagggcgccaacgagatcaagaccgaggccctggacgacgactag

SEQ ID NO: 284806 - DNA, 1218 bp, Artificial Sequence
  derived and/or modified sequence
atgctgagcagcttccccgtggtgctgctggagaccatgagccactacaccgacgagcccagattcaccatcgagcagatcgacctgctgcagagactgagaagaaccggcatgaccaagcacgagatcctgcacgccctggagaccctggacagactggaccaggagcacagcgacaagttcggcagaagaagcagctacggcggcagcagctacggcaacagcaccaacaacgtgcccgccagcagcagcaccgccaccgccagcacccagacccagcacagcggcatgagccccagccccagcaacagctacgacaccagcccccagccctgcaccaccaaccagaacggcagagagaacaacgagagactgagcaccagcaacggcaagatgagccccaccagataccacgccaacagcatgggccagagaagctacagcttcgaggccagcgaggaggacctggacgtggacgacaaggtggaggagctgatgagaagagacagcagcgtgatcaaggaggagatcaaggccttcctggccaacagaagaatcagccaggccgtggtggcccaggtgaccggcatcagccagagcagaatcagccactggctgctgcagcagggcagcgacctgagcgagcagaagaagagagccttctacagatggtaccagctggagaagaccaaccccggcgccaccctgagcatgagacccgcccccatccccatcgaggaccccgagtggagacagacccccccccccgtgagcgccaccagcggcaccttcagactgagaagaggcagcagattcacctggagaaaggagtgcctggccgtgatggagagctacttcaacgagaaccagtaccccgacgaggccaagagagaggagatcgccaacgcctgcaacgccgtgatccagaagcccggcaagaagctgagcgacctggagagagtgaccagcctgaaggtgtacaactggttcgccaacagaagaaaggagatcaagagaagagccaacatcgccgccatcctggagagccacggcatcgacgtgcagagccccggcggccacagcaacagcgacgacgtggacggcaacgactacagcgagcaggacacctggcaggtgagaaacggcgaggaggaggagggcagaagcagcgagggcggcagagaggccgagaaggtggaggaggagagaagaatctag

SEQ ID NO: 284807 - DNA, 1332 bp, Artificial Sequence
  derived and/or modified sequence
atgctgagtagttttcctgttgtgttgctcgaaactatgtcacattacacggacgagcccagattcaccattgaacaaattgacctgctccagcgcctacggaggaccggcatgacgaagcacgaaatcctccacgccctggagaccctcgacaggctcgaccaagagcactcagacaaattcggccgcagatcctcctacggtgggagctcctatggtaactctaccaataacgtccctgccagcagttccactgctaccgcaagtacccagacgcagcactccggcatgtctccatctccaagtaatagttatgatacatctccgcagccgtgtaccacaaatcaaaacggtagagagaataacgaacgtctgagtaccagcaatggaaagatgtctcccacccggtaccacgccaattctatgggacagagatcctatagttttgaggcatctgaagaggacttggatgtggacgataaggtggaagagttgatgcggagggatagctcggtgatcaaggaagaaatcaaagctttcctggccaatagacgcatcagtcaggctgtcgtggcccaggtaaccggtattagtcagtcccgcatttcgcactggctgctgcagcaaggttccgacctgtcagaacaaaagaagagagctttctatagatggtatcagctagaaaagaccaatccaggggccaccctgtcaatgagacccgctccaattccaattgaggatccagaatggcgtcagacaccaccccccgtgtcagccacttcaggaacgttcaggctgaggcgcggcagtagatttacctggcgcaaggagtgcttggccgtaatggagtcctattttaacgagaatcagtacccggacgaagccaagagagaagaaatagccaatgcatgcaacgcagtgattcagaaacccggcaagaagctgtctgaccttgagcgtgtgacgagcttaaaggtttacaactggttcgccaaccgtcggaaggaaattaaacgccgggctaatattgctgcgattctagagtcccatggcattgatgttcagtccccaggcggacacagtaattccgacgatgtggacgggaatgattattcggagcaggacacatggcaagtacgcaacggggaagaggaggaaggtcgtagctcagagggggggcgggaggcagagaaggacgatagcacgtcccatagcgatcaccaagatcctattagtctggctgtcgaaatggccgctgttaatcacaccatcctagctctggcccgccagggggccaatgagataaagaccgaggccctcgatgatgattag

SEQ ID NO: 284808 - DNA, 1332 bp, Artificial Sequence
  derived and/or modified sequence
atgctcagttcattccccgtggtgctgctggagaccatgtcgcattacacagatgagccacgcttcaccatagagcaaattgacctccttcagcgcctgcgcaggactggcatgactaagcacgaaatcctgcacgcgttagagactctggatcgcctcgaccaggagcactctgataagttcggcagacggtcctcctatggggggagtagctacggtaatagcacaaacaacgtcccggctagttcctctacagccaccgcctcaacacagacacagcactcgggaatgtccccctccccaagtaacagctacgacacctccccacagccttgcaccaccaatcagaatggccgggagaacaacgaaagactctcaacctctaatgggaagatgtcccccacacgttaccacgcgaactccatgggtcaacggtcctactctttcgaggcaagcgaggaagatctcgatgtcgatgacaaagtggaagagctgatgaggcgggactctagtgtaatcaaggaggaaattaaagcattcctggctaatcgacgaatctctcaggcagttgtcgcacaagttactgggatcagccaatcccgaatttcgcactggctgttacagcagggaagtgatctgagtgagcagaagaagagggccttctacagatggtaccaactcgagaaaacaaatcctggagctactttaagtatgcgtccagccccgattcctatagaagacccagagtggaggcaaacaccaccacccgtgtcagccactagcggaacatttaggctgcgcaggggctctagattcacatggaggaaagagtgtttggccgtgatggagtcttatttcaacgagaatcagtatcctgatgaagcgaaacgcgaggagatcgcaaacgcttgtaatgcagtgattcagaagcctggaaaaaagcttagcgacctcgagagggttacatccctaaaagtgtacaattggtttgctaaccgccgcaaagagattaaaaggagagcgaatatcgcagccatcctcgaatcccacggcatagatgtgcagagccccggtggccactcaaatagcgacgacgtggacggcaatgactactcagaacaagacacgtggcaagtgagaaacggggaggaagaggagggacgatcctcggaaggcggccgcgaggccgagaaggatgacagtaccagccactctgaccaccaggaccctattagcctggccgtagagatggctgccgtgaatcacaccatcctggccttggccaggcagggagccaacgagataaagacagaggctttggacgatgactag

SEQ ID NO: 284809 - DNA, 1218 bp, Artificial Sequence
  derived and/or modified sequence
atgctgagctcctttccagtcgtactgctcgaaactatgtcacactacaccgatgaaccacgcttcacaatcgagcaaatagatctgcttcagaggctgaggagaacgggcatgaccaaacatgagatcttgcatgccttagaaacactggacaggctcgatcaggagcactccgataaattcgggaggagaagctcctatgggggatcctcctatggtaactctaccaacaacgttcctgcctcatcttccacagcgacagcctcgacacagacccagcatagtggcatgagtccttctccatcaaacagttatgacacaagtccacagccctgtacaacaaatcagaacggtcgggaaaataacgaacgcctgtccacatccaatggaaagatgagccccaccaggtaccatgccaactcaatgggacagcgcagctattctttcgaggcgtccgaagaagatttagatgtggatgataaggtggaggaactaatgaggagagactctagtgttatcaaggaggagattaaagccttccttgcaaacagacgaattagccaggccgtggttgcacaggttaccggcatttcacaaagcagaatctctcactggctgctccagcaaggtagcgacctttccgaacagaaaaaaagggccttctatcggtggtatcagctggagaagactaaccccggggctaccttaagcatgcggccagcgcctatccccatcgaagatcctgaatggagacagacacctcccccagtgtctgcgacatcaggcactttcagactgcggcgtggctctcgattcacctggcggaaggagtgcctggcggttatggaatcatattttaacgagaatcaatatccggacgaagccaaacgtgaagaaatcgctaacgcttgcaatgcggtcattcagaagcccgggaaaaaactgagcgacctggaacgggtgacgtctctgaaagtgtacaattggttcgctaatcgtagaaaggagatcaagcggagagcgaatatcgccgccattctggaaagccacgggatcgatgttcagtcccctggaggccactctaactcagacgatgtagacggaaatgactatagcgagcaggatacctggcaggtgaggaatggtgaggaggaggagggtcgcagcagcgaaggcgggcgcgaagccgaaaaggtggaggaggaaaggaggatctag

SEQ ID NO: 284810 - DNA, 1332 bp, Artificial Sequence
  derived and/or modified sequence
atgctgagcagcttccctgtggtgctgctggagaccatgagccactacacagatgagccccgcttcaccatcgagcagattgacctgctgcagaggctgcggaggacaggcatgaccaagcatgagatcctgcacgccctggagaccctggaccggctggaccaggagcacagcgacaagtttggaagaagaagcagctatggaggcagcagctatggcaacagcaccaacaacgtgcctgccagcagcagcacagccacagccagcacccagacccagcacagcggcatgagccccagccccagcaacagctatgacaccagcccccagccctgcaccaccaaccagaatggccgggagaacaatgaaaggctgagcaccagcaatggcaagatgagccccacccgctaccacgccaacagcatgggccagaggagctacagctttgaggccagcgaggaggacctggatgtggatgacaaggtggaggagctgatgagaagagacagcagcgtcatcaaggaggagatcaaggccttcctggccaacagacgcatcagccaggccgtggtggcccaggtgacaggcatcagccagagccgcatcagccactggctgctgcagcagggcagtgacctgtctgagcagaagaagagggccttctaccgctggtaccagctggagaagaccaaccctggggccaccctgtccatgaggcctgcccccatccccatcgaggaccctgagtggaggcagaccccacctcctgtgtctgccaccagcggcaccttccggctgcggcggggcagccgcttcacctggaggaaagaatgtctggccgtgatggagagctacttcaatgaaaaccagtacccagatgaggccaagcgggaggagatcgccaatgcctgcaatgctgtgatccagaagccaggcaagaagctgagtgacctggagcgggtgaccagcctgaaggtgtacaactggtttgccaacagaaggaaggagatcaagagaagagccaacattgctgccatcctggagagccacggcattgatgtgcagagccctgggggccacagcaacagtgatgatgtggatggaaatgactacagcgagcaggacacctggcaggtgagaaatggagaggaggaggagggccgcagcagcgagggcggccgggaggccgagaaggatgacagcaccagccacagcgaccaccaggaccccatcagcctggccgtggagatggctgctgtgaaccacaccatcctggccctggcccggcagggcgccaatgagatcaagacagaggccctggatgatgactag

SEQ ID NO: 284811 - DNA, 1218 bp, Artificial Sequence
  derived and/or modified sequence
atgctgagcagcttccctgtggtgctgctggagaccatgagccactacacagatgagccccgcttcaccatcgagcagattgacctgctgcagaggctgcggaggacaggcatgaccaagcatgagatcctgcacgccctggagaccctggaccggctggaccaggagcacagcgacaagtttggaagaagaagcagctatggaggcagcagctatggcaacagcaccaacaacgtgcctgccagcagcagcacagccacagccagcacccagacccagcacagcggcatgagccccagccccagcaacagctatgacaccagcccccagccctgcaccaccaaccagaatggccgggagaacaatgaaaggctgagcaccagcaatggcaagatgagccccacccgctaccacgccaacagcatgggccagaggagctacagctttgaggccagcgaggaggacctggatgtggatgacaaggtggaggagctgatgagaagagacagcagcgtcatcaaggaggagatcaaggccttcctggccaacagacgcatcagccaggccgtggtggcccaggtgacaggcatcagccagagccgcatcagccactggctgctgcagcagggcagtgacctgtctgagcagaagaagagggccttctaccgctggtaccagctggagaagaccaaccctggggccaccctgtccatgaggcctgcccccatccccatcgaggaccctgagtggaggcagaccccacctcctgtgtctgccaccagcggcaccttccggctgcggcggggcagccgcttcacctggaggaaagaatgtctggccgtgatggagagctacttcaatgaaaaccagtacccagatgaggccaagcgggaggagatcgccaatgcctgcaatgctgtgatccagaagccaggcaagaagctgagtgacctggagcgggtgaccagcctgaaggtgtacaactggtttgccaacagaaggaaggagatcaagagaagagccaacattgctgccatcctggagagccacggcattgatgtgcagagccctgggggccacagcaacagtgatgatgtggatggaaatgactacagcgagcaggacacctggcaggtgagaaatggagaggaggaggagggccgcagcagcgagggcggccgggaggccgagaaggtggaggaggagcggcgcatctag

SEQ ID NO: 284812 - DNA, 1332 bp, Artificial Sequence
  derived and/or modified sequence
atgctgagcagcttccccgtggtgctgctggagaccatgagccactatacagatgagcccaggtttactatcgaacagatcgacttgctgcaacgtctacgccgcacaggcatgacgaagcatgagatccttcacgccctggaaactttggacagactggatcaggagcacagtgacaagtttggaaggcgctcatcctacggagggagttcgtacggcaattccaccaacaatgtccccgcttcctcttctaccgctacagcttcgacccagacccagcatagcggcatgagcccctcgcccagcaacagttatgacactagcccccagccatgtaccactaaccagaacggccgcgaaaacaacgagaggcttagcacctccaacggtaagatgtctccaactcgctaccatgccaactctatgggccaacgtagctatagcttcgaggcgtcggaggaagatttagatgtggatgataaggtcgaagagttaatgaggagggatagttctgttattaaggaagagatcaaggccttcctggcaaacaggcgtatttcgcaagcggtggtggctcaggtgacaggcatcagccagtcaaggatctcgcactggttgctgcagcagggctctgacctgtccgagcagaaaaaaagagcattctatcgatggtaccagctggagaaaacgaacccgggggccacattatccatgagacctgcaccaataccgatcgaagaccccgagtggcgacagacaccaccaccggtctcagccacgagcgggacttttcgccttagacgcggcagtcggttcacctggcgcaaggagtgcctagcggtcatggagtcttacttcaatgaaaaccagtatccagatgaagccaagagagaggagattgcaaatgcctgcaacgccgttatccagaagcccggtaaaaagctgtctgacctagaacgcgtgaccagtctgaaagtgtacaactggtttgcaaatcgcaggaaagaaattaagaggcgcgcgaatatcgccgcgatcctggagagccatggaattgatgtgcaatctccagggggtcattctaacagcgatgacgttgatgggaacgactattctgaacaggacacctggcaggttagaaatggggaagaggaggaaggtaggtcatccgagggaggcagagaagcagagaaagacgattctacctctcatagcgaccatcaggaccctatcagcctagcagtggaaatggccgccgtgaaccataccatactggcgcttgctaggcaaggcgctaatgagattaagactgaggcattggacgacgattag

SEQ ID NO: 284813 - DNA, 1332 bp, Artificial Sequence
  derived and/or modified sequence
atgctgagcagcttccccgtggtgctgctggagaccatgagccactacaccgacgaacctaggttcaccatcgaacagatagacctactgcagcgcctgaggcgtacgggcatgacaaaacacgagattctccacgcactcgaaactctggacaggttggatcaagaacattctgacaagttcggtcggcggagctcttacggaggaagctcttacggcaactctaccaacaatgttccagcttccagctccactgctactgcctccacccagacccagcattctggaatgagtccgtcgccctctaattcatacgatacttctccccagccctgtactactaatcagaacgggagagaaaataacgagcggctgagcactagcaacggaaaaatgtccccaactcggtatcatgcaaattccatgggccagcggagctacagttttgaagccagcgaggaagacctggacgtagatgacaaggttgaggagctgatgaggagggacagcagcgttattaaggaagagataaaagcattccttgctaatcggaggatatctcaggctgtagttgcgcaagtgaccggaattagccaatcaagaatttcccactggctgcttcagcaggggtctgacttatccgaacagaaaaaacgagctttttataggtggtatcaactggaaaaaacaaaccccggggctaccctctcaatgagacccgcgccaatacctatcgaggaccctgagtggcgccaaacccctccacccgtgagcgcaactagtggtaccttccgcctgcggagggggtcccgatttacctggaggaaggaatgtctggctgtgatggagagctacttcaatgaaaaccagtaccctgatgaagccaagcgcgaagagattgccaatgcgtgcaatgcggtgattcaaaagcccggaaaaaagttgagcgatctggagagagttacttcgctcaaggtatacaactggttcgccaaccgtaggaaagaaattaagcgccgagcaaacatcgcggctattctcgaatcccacggcatcgacgtccagtctccaggaggtcacagcaactcagacgacgtcgatggcaacgattacagcgagcaggacacatggcaggtgagaaacggagaggaggaggagggcagatccagcgaaggcgggcgagaagccgaaaaggatgattcaacgtcccactcggaccatcaagatcccatctccttggctgtcgagatggctgctgtgaatcacacaatccttgctcttgcgcgtcagggcgccaatgagattaaaactgaggctctcgatgacgactag

SEQ ID NO: 284814 - DNA, 1218 bp, Artificial Sequence
  derived and/or modified sequence
atgctgagcagcttccccgtggtgctgctggagaccatgagccactataccgacgaaccaaggtttactatcgaacagatcgatttgctgcagagacttcgcagaacagggatgactaaacacgaaatccttcacgctcttgagactctcgatagactggatcaggaacactcagataagttcggaagaagatcctcttacggaggttcgagttacggcaattccacgaacaacgtgcccgcatcatcaagcaccgccaccgcgagtacacaaacccaacacagtggtatgagtcccagtccctctaactcctacgacacctccccacaaccttgcacaacaaaccagaatggtcgcgagaataacgaaagactgagcactagcaacggaaagatgtcacccacaaggtatcatgcgaacagcatggggcagaggtcgtactcgttcgaagcctccgaagaggacctggatgtagatgacaaggtggaggaactgatgcgacgagatagctcagttatcaaagaagagataaaggcctttctcgctaatagacgcatttcacaggctgtggtagcgcaggtcacaggtatttcccaatccagaatctctcattggctgctgcagcagggcagtgacttgtctgagcagaagaagcgcgctttttacagatggtaccagctagagaaaacaaatcctggagctactctcagtatgagacccgcacctattcctatcgaagatcctgaatggaggcaaacacctcctccagtgtccgccacctctggtactttccgcctccgccgaggaagtaggtttacatggagaaaggaatgcctcgctgtgatggaatcctactttaacgaaaatcagtatccagacgaggccaagagggaggaaattgccaacgcatgtaatgccgtgatacagaaacccggcaagaaactgtctgacctggagagggtgacctctctgaaagtctacaactggttcgccaatagaagaaaagagatcaagaggagggccaacatcgcggccattctagaatcacatggcatcgacgtgcagagccctggcggccacagcaattcggatgatgtcgacggcaacgactattctgagcaggacacctggcaagtaagaaatggcgaagaagaagaggggcgctctagtgagggcggcagggaagcggagaaggttgaggaagagagacgcatttag

SEQ ID NO: 284815 - DNA, 1332 bp, Artificial Sequence
  derived and/or modified sequence
atgctctcaagtttcccagttgtgcttttggaaactatgtctcactacactgatgaaccacgattcaccatagaacagattgatctgctccagagactgagacgcacaggtatgaccaagcacgaaattttgcacgcattggagacacttgaccgcctcgatcaagagcactctgataaatttggccgtcgctccagctatggtggctctagctatggcaattccacgaacaacgtacccgcatcatcaagtaccgcaactgccagcacccagacacaacattctggaatgagcccctccccctcaaactcttacgacacgagcccccagccatgtactaccaatcagaatggaagagaaaacaatgaacgcctctccaccagtaatggcaagatgtcccccactaggtaccatgcgaactcgatgggacagaggtcatactcattcgaagccagtgaagaagacctggacgtggatgataaggtggaggagttgatgagacgtgacagttcggtgatcaaagaggagattaaagcatttctggccaatcgacgaatttcccaggccgtcgtggcccaggtcaccggtatcagccagtcccgcatctcacactggctcctgcagcaaggaagcgatctcagcgaacagaagaagagggccttctaccgctggtaccaattagaaaagacgaaccctggagccaccctttctatgagacccgcacccatacctatagaagacccagagtggcgacagacaccccctccagtgtccgctacaagtgggacattcagactcagacggggtagccggtttacatggagaaaagaatgtttagcagtgatggagagctacttcaatgagaatcagtaccctgacgaagccaaacgggaagaaatcgctaacgcctgtaacgcagttatacaaaagcccggtaagaaattgtccgacctcgaacgcgttacatccctcaaagtgtataattggtttgcaaataggagaaaggagatcaaaagaagagccaacatagcggcaatcttggaaagccatgggatcgacgtccagtccccgggagggcactcaaattccgacgacgtggatggcaacgactatagcgaacaagatacatggcaggtgcgcaatggagaagaagaggaaggtaggagcagcgagggcggacgagaagccgaaaaagacgatagcacgtctcatagcgatcaccaggatcctataagcctggccgtggagatggctgccgtgaaccatacaattttagccctggcccgtcagggggcaaatgagataaagaccgaggcgttggatgatgattag

SEQ ID NO: 284816 - DNA, 1332 bp, Artificial Sequence
  derived and/or modified sequence
atgctctcaagttttcccgtcgtgcttctggagacgatgtctcattacaccgacgaacctcgattcaccatcgagcaaatcgacttactgcagcgcctccgacgcacaggtatgactaagcacgaaatcctccatgctttggaaactctggacagactggatcaggagcactccgacaagttcggaaggcgatcctcatatggcggatccagctacggtaattctacaaacaatgtcccggcaagctcttctaccgcgacggcctctacccagacccagcattcaggaatgtcaccttcaccttccaattcctatgacacttcaccccagccttgtacaacaaaccagaatgggcgtgagaataacgaacgcctctctacctcaaatggtaagatgagccccacccgatatcatgctaattccatgggtcagcgttcctactcatttgaagcctccgaagaagacctggacgtcgacgacaaggtcgaagagctgatgcgaagggatagctctgtcataaaagaagaaattaaggctttccttgcaaacagaagaatatcccaggccgtggtggcccaggtcacaggcatatcccagagccggatatcgcattggctcctccagcaaggctcggatttaagtgaacagaagaagcgcgctttttacaggtggtatcaattggaaaagaccaacccaggcgctaccctatcaatgcggccagcaccgatccctatcgaggatcccgaatggcgccaaaccccacctccagtttctgccacttctgggacttttcgcttacgccgtgggtccagattcacctggcggaaagaatgcttggctgttatggaatcctactttaacgaaaaccagtaccccgatgaagccaaacgggaggaaatcgctaacgcctgtaatgccgtcattcagaaacccggtaaaaaactgagcgacctcgagagggttacgagcctgaaggtctacaactggttcgccaaccgtcgcaaagaaatcaagcggcgtgcgaacattgcagctattctggagagtcacggaattgacgtgcagtctcctggtggccactctaactcggatgatgtggacggaaacgattacagtgaacaggatacctggcaggtgcgaaacggcgaagaagaggaaggccgaagtagtgaagggggacgtgaagctgaaaaggacgactctacctcccacagtgaccatcaggaccctatttcactggcagtggaaatggccgcagtcaaccatactattctggcactcgctagacagggagcaaacgaaatcaagacagaggcgctagatgatgactag

SEQ ID NO: 284817 - DNA, 1218 bp, Artificial Sequence
  derived and/or modified sequence
atgctgagcagctttcctgtggttcttctcgagactatgtcccattatacagacgaacctagatttaccatcgaacaaatagatttgttacaaagactccggagaactggtatgactaagcacgaaatcttgcatgccctggagactcttgacagattggaccaagagcattctgacaaattcggacggaggtcctcctatggaggctcttcatacggcaactctaccaacaatgtgccagcatcgtcatccacagcaacagccagcactcaaacccagcacagcggcatgtcccccagccccagtaatagttacgatacgtccccacagccatgtaccaccaaccagaatgggagagagaacaatgagcgtttgtcaacaagtaatggaaagatgtcccccaccagataccatgcaaacagtatgggacaaaggtcgtacagcttcgaggcatctgaggaagatctggatgtcgacgataaggtcgaagagttaatgcgcagggactcaagtgtgatcaaggaggaaattaaagcttttctcgctaacagacggatcagccaagcagtagtcgcacaagttactggaatcagccaatcgaggattagccattggttgctgcagcaaggtagtgacctctctgaacagaaaaaacgcgctttctaccggtggtaccagcttgagaaaaccaaccccggtgccaccctgagcatgcgtcccgctccgattccaatcgaggatcccgaatggcgtcagacacctccgcctgtttcagccacctcgggtacttttaggctccgcaggggtagtagattcacgtggcgcaaggagtgtctggccgtaatggagtcttacttcaacgaaaatcagtacccagatgaagctaagagagaggaaatcgcaaatgcttgtaatgctgtgatccagaagcccggaaaaaagttgagcgatttggaaagagtcacatcactgaaagtctacaactggtttgcgaacagaagaaaggagatcaagcgacgagctaacattgctgccatcttagaatcacatggcattgacgtacagtcccccggtggtcactctaacagcgatgatgtggatggaaacgactacagcgaacaggacacgtggcaggtcagaaatggcgaggaggaggaagggagaagcagtgagggtgggcgagaggccgaaaaggtagaggaggaaagacggatatag

SEQ ID NO: 284818 - DNA, 3244 bp, Artificial Sequence
  derived and/or modified sequence
tgttgatatcaatatggcggttgtcagccagacaaagacagtcagtctgatgtgattgagacaagggaggtttttcagggggagactgggagataggggcctcccctcccccttctcctcttcctgcgccggcctcaacccctccccagtcccctcccgacgggcgccccacgcggaagacacccctccccctcccgccttccctcctccctatctcagcccttcgtactgggacgttggggagggggctgtgccgggcggagagaactcagcgaggattctgagaatggtagataacgcagatcatctctggaaaggatattgatccgcctcatgtaaagtatgcttagttcctttccagtggttttgctggaaaccatgtctcattatacagatgaacccagatttaccatagagcagatagatctgcttcagcgacttcggcgtactggaatgactaaacatgaaattctccatgccttggaaactttggaccgtcttgatcaagagcatagtgacaagtttggaagaaggtccagctatggaggaagttcatatgggaatagtactaacaatgtcccagcatcttcctctacagctacagcttccacacagacgcagcattcgggaatgtccccgtcacctagcaacagttatgatacttccccacagccttgcactaccaatcaaaatgggagggagaataatgagcgattatctacatccaatggaaagatgtcaccaactcgctaccatgcaaacagcatgggtcagaggtcatacagttttgaagcctcagaagaggacctagatgtagatgataaagtggaagaattaatgaggagggacagcagtgtgataaaagaggaaatcaaagcctttcttgccaatcggaggatttcccaagcagttgttgcacaggtaacaggtatcagtcagagccggatctctcattggctgttgcagcagggatcagacctgagtgaacagaagaaaagagcattttaccgatggtatcaacttgagaagacaaaccctggcgctacactaagtatgagaccagcccccattccaatagaggaccctgaatggagacaaacgcctcccccagtctctgccacatctggtactttccgactgcgacgagggagtcgatttacctggagaaaggagtgcctggctgttatggaaagttacttcaatgagaatcaatacccagatgaagcaaagagggaagaaattgcaaacgcttgcaatgcagttatacagaagccaggcaaaaagctgtcagatctggaaagagttacctccctgaaagtatataattggtttgctaacagaaggaaggagatcaagaggagagccaatattgcagcaatcctggagagtcatgggatagatgtgcagagtccaggaggccactcaaacagtgatgatgtcgacgggaatgactactctgagcaggatacttggcaagtacgcaatggggaggaggaggagggaagaagttcagagggaggcagagaagcagagaaggatgacagtacgagccatagtgaccaccaagaccccatctcattagctgtggaaatggcagcagtcaaccacactatcttggcattggcccgacaaggagccaacgaaatcaagacagaggccctggatgatgactgatcagggaggttaaacatgacaagttaacttagtttagacgtagcaccttagcagactttcctcggtccttaacatgtgttcttacagtataacttgcagtttcttgtatgtcaggtagctgttagggtcttgttctgtgaagatggcatggtgccctcagcctttgcatatactctctcagtattaactcccagtaaataataaccaaccaaccaaccaaacttccctctcccagcccccgaggctagaaaatcttgctgctccgtcttagcattccaagaaagtgcttccaggtatttagatagccctcagttctcaaatattagactacgtgtaaaatcttgggtacctttagattcttgtaacactagtctgtactcccttttccttccccaagactgataggatgcaagctgaggtcgtggcacaggaatgacagacaccatttggggagtatccacagagtcaaaggaacactagaatccccacctcagcgtgaggataattgatttccagctgcaataagccgtgcctcattatagccacactgtggctagattatacttctttgggtgctgtgctaagaatgtcaatggaaaaagccgatctcagattttgtttgaagttaacatgcctgacacagacatcctttcctctcacaagctgtgtgacttagtagataaaatactgccttctgcctttgggaccatgattaaaaacaaagacaaaaaccaaaagtcattaaaaaaaaaaaaaaaaaaaacccagcttgagagcattggaaaaaaaaaatatgagctgaatgtctaatggatgctaagtccagttttcagaaccactgtacattccacggcacagttagcagtgcctgcctggaaaagttttggaggtcatcgtggaagttgctttgcctcctgtcagtgtcccctttccctgctaccaaaaaagtctttcaaggatggagctaaggtcaaaaatgagtgaaaaaacttgcagtgtttgtatccattaaacggaagccccctcactctgagaggtcactagaggacttcatagtggggttgtgctgcttatcacagatgcagacacttgcccagataggagcagagaaaagcaggggacgtttcctactcacattgtggctgtatgagaacacgatgggactgctttgctgttctctttactctgtccttggagaggtgtgaaaagctgtattgctacaggcaatttatttaataattggaagccatattgataatggatgtggtaatatttgtaaagtttaatctactttaagcggcagtaactaatggaatttttttccttgatcacatatgtagcacttttgttactttttaaagatatttatatttgataaatctttttttcattttgagaactcaaaataccaaacagtgaacttgcattctaaagtcaccctgtgatcaccttgtcatctagtagcaaaatgatgaactattcatgcatcaaagaaaattacatctgctggccttgtatgaaaatgatctcttggcatcccgattaaatgacacactgtcactgtgggtaa

SEQ ID NO: 284819 - DNA, 1731 bp, Artificial Sequence
  derived and/or modified sequence
aaagtatgcttagttcctttccagtggttttgctggaaaccatgtctcattatacagatgaacccagatttaccatagagcagatagatctgcttcagcgacttcggcgtactggaatgactaaacatgaaattctccatgccttggaaactttggaccgtcttgatcaagagcatagtgacaagtttggaagaaggtccagctatggaggaagttcatatgggaatagtactaacaatgtcccagcatcttcctctacagctacagcttccacacagacgcagcattcgggaatgtccccgtcacctagcaacagttatgatacttccccacagccttgcactaccaatcaaaatgggagggagaataatgagcgattatctacatccaatggaaagatgtcaccaactcgctaccatgcaaacagcatgggtcagaggtcatacagttttgaagcctcagaagaggacctagatgtagatgataaagtggaagaattaatgaggagggacagcagtgtgataaaagaggaaatcaaagcctttcttgccaatcggaggatttcccaagcagttgttgcacaggtaacaggtatcagtcagagccggatctctcattggctgttgcagcagggatcagacctgagtgaacagaagaaaagagcattttaccgatggtatcaacttgagaagacaaaccctggcgctacactaagtatgagaccagcccccattccaatagaggaccctgaatggagacaaacgcctcccccagtctctgccacatctggtactttccgactgcgacgagggagtcgatttacctggagaaaggagtgcctggctgttatggaaagttacttcaatgagaatcaatacccagatgaagcaaagagggaagaaattgcaaacgcttgcaatgcagttatacagaagccaggcaaaaagctgtcagatctggaaagagttacctccctgaaagtatataattggtttgctaacagaaggaaggagatcaagaggagagccaatattgcagcaatcctggagagtcatgggatagatgtgcagagtccaggaggccactcaaacagtgatgatgtcgacgggaatgactactctgagcaggatacttggcaagtacgcaatggggaggaggaggagggaagaagttcagagggaggcagagaagcagagaaggatgacagtacgagccatagtgaccaccaagaccccatctcattagctgtggaaatggcagcagtcaaccacactatcttggcattggcccgacaaggagccaacgaaatcaagacagaggccctggatgatgactgatcagggaggttaaacatgacaagttaacttagtttagacgtagcaccttagcagactttcctcggtccttaacatgtgttcttacagtataacttgcagtttcttgtatgtcaggtagctgttagggtcttgttctgtgaagatggcatggtgccctcagcctttgcatatactctctcagtattaactcccagtaaataataaccaaccaaccaaccaaacttccctctcccagcccccgaggctagaaaatcttgctgctccgtcttagcattccaagaaagtgcttccaggtatttagatagccctcagttctcaaatattagactacgtgtaaaatcttgggtacctttagattcttgtaacactagtctgtactcccttttccttcccc

SEQ ID NO: 284820 - DNA, 1765 bp, Artificial Sequence
  derived and/or modified sequence
gttgatatcaatatggcggttgtcagccagacaaagacagtcagtctgatgtgattgagacaagggaggtttttcagggggagactgggagataggggcctcccctcccccttctcctcttcctgcgccggcctcaacccctccccagtcccctcccgacgggcgccccacgcggaagacacccctccccctcccgccttccctcctccctatctcagcccttcgtactgggacgttggggagggggctgtgccgggcggagagaactcagcgaggattctgagaatggtagataacgcagatcatctctggaaaggatattgatccgcctcatgtaaagtatgcttagttcctttccagtggttttgctggaaaccatgtctcattatacagatgaacccagatttaccatagagcagatagatctgcttcagcgacttcggcgtactggaatgactaaacatgaaattctccatgccttggaaactttggaccgtcttgatcaagagcatagtgacaagtttggaagaaggtccagctatggaggaagttcatatgggaatagtactaacaatgtcccagcatcttcctctacagctacagcttccacacagacgcagcattcgggaatgtccccgtcacctagcaacagttatgatacttccccacagccttgcactaccaatcaaaatgggagggagaataatgagcgattatctacatccaatggaaagatgtcaccaactcgctaccatgcaaacagcatgggtcagaggtcatacagttttgaagcctcagaagaggacctagatgtagatgataaagtggaagaattaatgaggagggacagcagtgtgataaaagaggaaatcaaagcctttcttgccaatcggaggatttcccaagcagttgttgcacaggtaacaggtatcagtcagagccggatctctcattggctgttgcagcagggatcagacctgagtgaacagaagaaaagagcattttaccgatggtatcaacttgagaagacaaaccctggcgctacactaagtatgagaccagcccccattccaatagaggaccctgaatggagacaaacgcctcccccagtctctgccacatctggtactttccgactgcgacgagggagtcgatttacctggagaaaggagtgcctggctgttatggaaagttacttcaatgagaatcaatacccagatgaagcaaagagggaagaaattgcaaacgcttgcaatgcagttatacagaagccaggcaaaaagctgtcagatctggaaagagttacctccctgaaagtatataattggtttgctaacagaaggaaggagatcaagaggagagccaatattgcagcaatcctggagagtcatgggatagatgtgcagagtccaggaggccactcaaacagtgatgatgtcgacgggaatgactactctgagcaggatacttggcaagtacgcaatggggaggaggaggagggaagaagttcagagggaggcagagaagcagagaaggtagaagaagagaggaggatctgatccaaacaagcaagttacaccattcacgacacacactcagtgtttgagaaatactaggggcagctggaccccatgcctaaacacgtaccgacgcagggcacgatggaaggccccactcactctggccccactgcagtgggaaccctcctgcccaaaggagtggttcttccagagtctctggcacactgacacatgcatcctctcat

SEQ ID NO: 284821 - protein, 551 aa, Artificial Sequence
  derived and/or modified sequence
VCPRSYFLEGRGSYSFLSLFSTSPAPYRRNGHPHNKLRNRIWGMVNFVNMIYKTLNIHVTLVGIEIWTHEDKIELYSNIETTLLRFSFWQEKILKTRKDFDHVVLLSGKWLYSHVQGISYPGGMCLPYYSTSIIKDLLPDTNIIANRMAHQLGHNLGMQHDEFPCTCPSGKCVMDSDGSIPALKFSKCSQNQYHQYLKDYKPTCMLNIPFPYNFHDFQFCGNKKLDEGEECDCGPAQECTNPCCDAHTCVLKPGFTCAEGECCESCQIKKAGSICRPAKDECDFPEMCTGHSPACPKDQFRVNGFPCKNSEGYCFMGKCPTREDQCSELFDDEAIESHDICYKMNTKGNKFGYCKNKENRFLPCEEKDVRCGKIYCTGGELSSLLGEDKTYHLKDPQKNATVKCKTIFLYHDSTDIGLVASGTKCGEGMVCNNGECLNMEKVYISTNCPSQCNENPVDGHGLQCHCEEGQAPVACEETLHVTNITILVVVLVLVIVGIGVLILLVRYRKCIKLKQVQSPPTETLGVENKGYFGDEQQIRTEPILPEIHFLN

SEQ ID NO: 284822 - DNA, 1656 bp, Artificial Sequence
  derived and/or modified sequence
gtatgccccaggtcttattttcttgagggacgaggatcgtatagttttctgtctttgttttcaactagtcccgccccataccgccgcaatggacaccctcacaacaagctgcggaatcgaatatggggcatggtaaattttgtaaatatgatttataaaactctaaacattcacgtaacactggtaggcatcgaaatatggacacacgaggacaagatagaactatacagcaacatcgaaacaacactgttgcgtttttccttttggcaggaaaaaatcctcaaaacccgcaaggattttgaccacgttgttctgttgtccgggaaatggctgtactcccatgtgcaggggatcagttatcctggtggcatgtgcctgccctattactccacaagtatcattaaggatctcttacctgacaccaacattatagctaatagaatggcccaccagctggggcacaacctgggaatgcagcacgatgaattcccctgtacatgcccaagcggcaagtgcgtcatggactctgacggctccatccctgcccttaaatttagtaagtgttcccagaatcagtaccaccagtatctcaaagattacaaacccacatgcatgctcaacatcccgtttccctacaatttccacgacttccaattctgtggcaacaaaaagctcgacgagggagaggagtgcgactgtgggccagcacaagagtgcaccaatccatgctgtgacgcccatacttgtgtcctcaagcctgggttcacttgcgccgaaggggagtgctgtgaaagctgccagatcaaaaaggctgggtcaatttgtaggcccgctaaggatgaatgtgacttcccggagatgtgtaccggccactcccctgcttgtcctaaagatcaattccgtgtgaacggcttcccctgcaagaactctgaaggctattgttttatgggaaagtgtccaacccgggaggaccagtgcagcgagttattcgacgacgaggccatcgaaagtcatgacatctgctataagatgaatacgaaaggaaacaaatttggttattgcaagaacaaggaaaaccggtttctgccctgcgaggaaaaggacgtcaggtgcggcaagatctactgcacaggcggcgagctgtccagcttattaggggaagataagacataccacctgaaagatccacagaagaacgccactgtcaagtgcaagaccattttcctatatcatgattccaccgacatcggccttgttgcgtctggtaccaagtgcggcgaaggcatggtgtgtaacaatggcgaatgcctgaatatggagaaggtatacatctctacgaattgcccctcccagtgtaacgagaaccccgtcgacggacacggactgcagtgccattgcgaggaaggacaggcccccgtagcatgcgaggagaccctgcacgtcacaaacattaccatcctggttgtagtcctggtgctggtcatcgtggggattggcgtccttatcctgctagtgaggtacaggaaatgcattaagctgaagcaggtgcagagtccacccacagagaccctgggcgtggagaacaaagggtattttggcgacgaacagcaaatccgaactgaacccatccttccagaaattcactttctcaattag

SEQ ID NO: 284823 - DNA, 1656 bp, Artificial Sequence
  derived and/or modified sequence
gtgtgccccaggagctacttcctggagggccggggcagctacagcttcctgagcctcttcagcaccagccctgccccctacagaagaaatggccacccccacaacaagctgaggaaccgcatctggggcatggtgaactttgtgaacatgatctacaagaccctgaacatccacgtgaccctggtgggcatcgagatctggacccatgaggacaagattgagctgtacagcaacatcgagaccaccctgctgcgcttctccttctggcaggagaagatcctgaagaccaggaaggactttgaccacgtggtgctgctgagcggcaagtggctgtacagccacgtgcagggcatctcctacccaggcggcatgtgcctgccctactacagcaccagcatcatcaaggacctgctgcctgacaccaacatcatcgccaacaggatggcccaccagctgggccacaacctgggcatgcagcatgatgagttcccctgcacctgccccagcgggaaatgtgtgatggacagtgatggcagcatcccagccctgaagttcagcaagtgcagccagaaccagtaccaccagtacctgaaggactacaagcccacctgcatgctgaacatccccttcccctacaacttccatgacttccagttctgtggcaacaagaagctggatgaaggagaggagtgtgactgtggccctgcccaggagtgcaccaacccctgctgtgatgcccacacctgtgtgctgaagccaggcttcacctgtgccgagggggagtgctgtgagagctgccagatcaagaaggccggcagcatctgcaggcctgccaaggatgaatgtgacttccctgagatgtgcaccggccacagccctgcctgccccaaggaccagttccgggtgaatggcttcccctgcaagaacagcgagggctactgcttcatgggcaagtgccccacccgggaggaccagtgcagcgagctgtttgatgatgaggccatcgagagccatgacatctgctacaagatgaacaccaagggcaacaagtttggctactgcaagaacaaggagaaccgcttcctgccctgtgaggagaaggatgtgcgctgtgggaagatctactgcacaggaggagagctgagcagcctgctgggggaggacaagacctaccacctgaaggacccccagaagaatgccaccgtgaagtgcaagaccatcttcctgtaccatgacagcacagacatcggcctggtggccagcggcaccaagtgtggggagggcatggtgtgcaacaatggagaatgtctgaacatggagaaggtgtacatcagcaccaactgccccagccagtgcaatgaaaatcctgtggatggccacggcctgcagtgccactgtgaggagggccaggcccctgtggcctgtgaggagaccctgcacgtgaccaacatcaccatcctggtggtggtgctggtgctggtgattgtgggcatcggcgtgctgatcctgctggtgcgctacaggaagtgcatcaagctgaagcaggtgcagagccccccaacagagaccctgggcgtggagaacaagggctactttggagatgagcagcagatcagaacagagcccatcctgcctgagatccacttcctgaactag

SEQ ID NO: 284824 - DNA, 1656 bp, Artificial Sequence
  derived and/or modified sequence
gtgtgcccccggagctacttcctggagggccggggcagctacagctttctctctctcttctccacgagccctgctccttatcgtaggaacgggcatccccacaataagttaagaaatagaatttggggtatggtcaacttcgtcaatatgatatataagacccttaacattcatgtcaccctcgtgggcatagaaatctggacacatgaagacaagattgagctgtactccaatatcgagaccaccctcttaaggttttccttctggcaggagaagattctcaaaacccggaaggatttcgatcacgtggtcctcctcagcggcaaatggctgtatagtcacgttcaaggcatatcttaccccgggggcatgtgtctcccatactattctacgtctataattaaagacctgctaccggacacgaatatcatagccaatagaatggcccaccagctcgggcataacctgggtatgcaacatgacgaattcccatgtacctgtccgtccggtaaatgcgtgatggattcagatggctctattccagccttgaagtttagcaaatgttcccagaatcaataccaccaataccttaaggattataagcctacttgcatgctcaacatccccttcccttataacttccacgactttcagttttgtgggaacaaaaaattagatgaaggcgaggaatgcgactgcggtcccgcccaggagtgtaccaatccttgctgtgatgctcatacttgtgttctgaaacccgggttcacatgtgccgaaggagaatgttgcgagagttgccagatcaaaaaggccggttcaatctgtcgacctgccaaggacgaatgtgacttcccggaaatgtgcacagggcacagtcccgcttgtcccaaagaccaattccgggtcaacgggtttccatgcaagaacagtgaaggctattgctttatgggaaagtgtccaactcgcgaagaccagtgtagcgagctgttcgatgacgaggccatcgaaagtcacgacatctgctataagatgaatacgaagggaaacaaattcggctactgtaagaataaagaaaatcggttcctaccatgcgaggagaaggacgtgagatgcggaaagatctactgcacaggcggcgaactctccagcttgctgggtgaggacaagacataccacctcaaagatcctcagaaaaacgccacagtaaaatgcaagactatctttctctaccacgattctaccgatattggactggttgcctcgggaactaaatgcggagaggggatggtgtgcaataacggtgagtgtctgaacatggaaaaagtgtatatttctacgaattgtccgtcccaatgtaatgagaaccctgttgatggacatgggttgcagtgccattgcgaagaagggcaggctcctgtcgcctgtgaggagactttgcatgtgacgaatatcaccatcctggtcgtggtccttgtgctggtcatagtcggcatcggagtgctcattctgcttgtgagatatcggaaatgcatcaagttaaagcaggttcagtctccaccaaccgagaccctgggtgttgaaaataagggctattttggggatgagcagcagatcaggacagagcctattctacccgagatccactttctgaattag

SEQ ID NO: 284825 - DNA, 1656 bp, Artificial Sequence
  derived and/or modified sequence
gtctgtcccagaagttattttctcgaagggagaggatcctattctttcctttcccttttcagcactagtcctgcaccatacaggcgcaacggtcatccccacaataaattaaggaaccggatttgggggatggttaatttcgtgaatatgatttataagacattgaacatccacgtcaccctcgttgggatagagatctggacacacgaggataagatcgagctgtatagtaatatcgaaacgaccctcctgcgattcagtttctggcaagagaagatcctcaagaccagaaaggacttcgaccacgtcgtcttgctcagcggcaaatggctctattctcatgtgcaaggaattagctacccaggcggtatgtgcctaccatattactccaccagcatcattaaagacctacttccagacaccaatattatcgctaatcggatggcccaccaactcggccacaacctcgggatgcagcacgacgaattcccttgcacctgcccatctgggaagtgtgtgatggacagtgatgggtccatacccgcattaaaattcagcaagtgcagccagaatcagtatcatcagtatctgaaagactacaagcctacttgtatgctgaacatcccctttccgtacaactttcacgacttccagttctgtggaaacaagaaactcgacgaaggcgaggaatgtgattgtggcccagctcaggagtgtacaaatccatgctgcgacgcacacacatgcgtgctcaagcctgggtttacgtgtgcagaaggggaatgttgcgaaagttgccagataaagaaggcaggatcaatttgcagacccgcaaaagatgaatgcgacttcccagagatgtgtaccggtcactcgccggcatgtccaaaagaccagtttcgagtcaatgggtttccctgcaagaacagcgagggatattgttttatgggcaagtgtccgactagagaggatcaatgctccgagttgtttgatgacgaagctatcgagtcccacgatatctgctacaaaatgaatactaaaggtaacaaatttggctattgtaaaaataaggagaatcgtttcctcccatgcgaagaaaaagacgttcggtgtggcaagatctattgcaccgggggtgaactgagcagtctcctaggtgaggacaagacatatcacctaaaggacccccagaaaaacgctactgttaaatgtaaaactatattcctgtaccatgacagtaccgatattggactggtggcatcaggaaccaaatgcggggagggaatggtttgtaacaatggggagtgtctaaacatggaaaaggtatatatttccacgaactgcccatctcagtgtaatgagaatccggttgatggccacggcctccagtgccattgtgaagaagggcaagcacctgtggcatgtgaagagacacttcacgtgacaaatataaccatcctggtggtggtacttgttctagtgatagtcggaattggggtgctgatcctgctcgtgcggtataggaaatgtatcaaacttaagcaggttcagtctccacctacagagaccctgggggtggaaaacaagggctatttcggagacgaacagcagatccggacagaacccatattgccagagattcacttcctgaattag

SEQ ID NO: 284826 - DNA, 1656 bp, Artificial Sequence
  derived and/or modified sequence
gtgtgccccagaagctacttcctggagggcagaggcagctacagcttcctgagcctgttcagcaccagccccgccccctacagaagaaacggccacccccacaacaagctgagaaacagaatctggggcatggtgaacttcgtgaacatgatctacaagaccctgaacatccacgtgaccctggtgggcatcgagatctggacccacgaggacaagatcgagctgtacagcaacatcgagaccaccctgctgagattcagcttctggcaggagaagatcctgaagaccagaaaggacttcgaccacgtggtgctgctgagcggcaagtggctgtacagccacgtgcagggcatcagctaccccggcggcatgtgcctgccctactacagcaccagcatcatcaaggacctgctgcccgacaccaacatcatcgccaacagaatggcccaccagctgggccacaacctgggcatgcagcacgacgagttcccctgcacctgccccagcggcaagtgcgtgatggacagcgacggcagcatccccgccctgaagttcagcaagtgcagccagaaccagtaccaccagtacctgaaggactacaagcccacctgcatgctgaacatccccttcccctacaacttccacgacttccagttctgcggcaacaagaagctggacgagggcgaggagtgcgactgcggccccgcccaggagtgcaccaacccctgctgcgacgcccacacctgcgtgctgaagcccggcttcacctgcgccgagggcgagtgctgcgagagctgccagatcaagaaggccggcagcatctgcagacccgccaaggacgagtgcgacttccccgagatgtgcaccggccacagccccgcctgccccaaggaccagttcagagtgaacggcttcccctgcaagaacagcgagggctactgcttcatgggcaagtgccccaccagagaggaccagtgcagcgagctgttcgacgacgaggccatcgagagccacgacatctgctacaagatgaacaccaagggcaacaagttcggctactgcaagaacaaggagaacagattcctgccctgcgaggagaaggacgtgagatgcggcaagatctactgcaccggcggcgagctgagcagcctgctgggcgaggacaagacctaccacctgaaggacccccagaagaacgccaccgtgaagtgcaagaccatcttcctgtaccacgacagcaccgacatcggcctggtggccagcggcaccaagtgcggcgagggcatggtgtgcaacaacggcgagtgcctgaacatggagaaggtgtacatcagcaccaactgccccagccagtgcaacgagaaccccgtggacggccacggcctgcagtgccactgcgaggagggccaggcccccgtggcctgcgaggagaccctgcacgtgaccaacatcaccatcctggtggtggtgctggtgctggtgatcgtgggcatcggcgtgctgatcctgctggtgagatacagaaagtgcatcaagctgaagcaggtgcagagcccccccaccgagaccctgggcgtggagaacaagggctacttcggcgacgagcagcagatcagaaccgagcccatcctgcccgagatccacttcctgaactag

SEQ ID NO: 284827 - DNA, 474 bp, Artificial Sequence
  derived and/or modified sequence
atgctgtctgtgtcccggccctgcttcagccagggcgccttcctgggccgcaccctgggctctgtgtgggcccagggcggcagccggctgcccctgtgcttctggtaccgcatccgctgtggccggcctgctgtggtgcacatcggcggggagggcgcccgctgggagaagggggcccggggcaggaaggagcaccggctgcggcggagtgacctgggcagcaggcctgtgcccttcctggcccagggcatcccagacatcgtcatccggctgctgtgcctgtctgctggcagcgccagcagccaccaggccagtgaccccctgagcagcgctgctgccaccctggccgctgagctggactgggccctggtgtcccagaagagcagcgaggacctggccccacccagcctgctgctgaactgcatctccttcctgatcacccagtgcccccacccccgctggctgcccggctag

SEQ ID NO: 284828 - DNA, 804 bp, Artificial Sequence
  derived and/or modified sequence
atggccgaccagctgtacctggagaacatcgacgagttcgtgaccgaccagaacaagatcgtgacctacaagtggctgagctacaccctgggcgtgcacgtgaaccaggccaagcagatgctgtacgactacgtggagagaaagagaaaggagaacagcggcgcccagctgcacgtgacctacctggtgagcggcagcctgatccagaacggccacagctgccacaaggtggccgtggtgagagaggacaagctggaggccgtgaagagcaagctggccgtgaccgccagcatccacgtgtacagcatccagaaggccatgctgaaggacagcggccccctgttcaacaccgactacgacatcctgaagagcaacctgcagaactgcagcaagttcagcgccatccagtgcgccgccgccgtgcccagagcccccgccgagagcagcagcagcagcaagaagttcgagcagagccacctgcacatgagcagcgagacccaggccaacaacgagctgaccaccaacggccacggcccccccgccagcaagcaggtgagccagcagcccaagggcatcatgggcatgttcgccagcaaggccgccgccaagacccaggagaccaacaaggagaccaagaccgaggccaaggaggtgaccaacgccagcgccgccggcaacaaggcccccggcaagggcaacatgatgagcaacttcttcggcaaggccgccatgaacaagttcaaggtgaacctggacagcgagcaggccgtgaaggaggagaagatcaaggagaagaagagatag

SEQ ID NO: 284829 - DNA, 804 bp, Artificial Sequence
  derived and/or modified sequence
atggctgatcagctttacttggaaaacatcgatgagtttgtcacggatcagaataagatagtgacctacaagtggctgtcgtatacacttggcgtccacgtgaatcaagcaaaacagatgctgtatgactatgtcgagagaaagagaaaggagaattcaggggcacagctacatgtgacgtacctcgtatcgggctccctcatacagaatggccattcttgtcataaagttgccgtggtgagggaggacaaactagaggcagtgaaaagtaagctagcagtaaccgcgtcaatacatgtctatagcatccagaaagctatgctcaaggactccggcccgctcttcaacactgattatgacatcttaaagagcaatctccagaactgctccaagttctccgctatccagtgcgcagctgctgttccccgagccccggccgagagctcttcgagctccaagaaatttgagcagtctcacttgcatatgagctctgaaacgcaggccaataatgagctcacaacaaacgggcacggcccacccgcctcaaagcaggttagccagcaacccaagggcatcatgggcatgttcgcctccaaggcagccgctaagactcaggagactaataaagagactaaaacggaggccaaagaggtgacgaacgcctcagcagcgggcaataaggcccctgggaagggtaatatgatgtctaacttctttgggaaagcagccatgaacaagtttaaggtcaaccttgatagtgaacaagccgttaaggaagagaaaatcaaagaaaagaagcgctag

SEQ ID NO: 284830 - DNA, 804 bp, Artificial Sequence
  derived and/or modified sequence
atggctgaccagctgtacctggagaacattgatgaatttgtgacagaccagaacaagatcgtgacctacaagtggctgagctacaccctgggcgtgcacgtgaaccaggccaagcagatgctgtatgactatgtggagaggaagaggaaagaaaattctggggcccagctgcacgtgacctacctggtgtctggcagcctcatccagaatggccacagctgccacaaggtggccgtggtgcgggaggacaagctggaggccgtgaagagcaagctggccgtgacagccagcatccacgtgtacagcatccagaaggccatgctgaaggacagcggccccctcttcaacacagattatgacatcctgaagagcaacctgcagaactgcagcaagttcagcgccatccagtgtgccgctgctgtgccccgggccccagctgagagcagcagcagcagcaagaagtttgagcagagccacctgcacatgagcagcgagacccaggccaacaatgagctgaccaccaatggacatggccccccagccagcaagcaggtgtcccagcagcccaagggcatcatgggcatgtttgccagcaaggctgctgccaagacccaggagaccaacaaggagaccaagacagaggccaaggaggtgaccaatgccagcgctgctggcaacaaggcccctggaaaaggaaacatgatgagcaacttcttcggcaaggccgccatgaacaagttcaaggtgaacctggacagcgagcaggccgtgaaggaggagaagatcaaggagaagaagaggtag

SEQ ID NO: 284831 - DNA, 804 bp, Artificial Sequence
  derived and/or modified sequence
atggccgaccagctgtacctggagaacatcgacgagttcgtgaccgatcaaaataaaatcgtcacgtacaaatggttgtcctacactctcggcgtgcacgttaaccaggctaaacaaatgctctacgattacgtggaacggaagcggaaggagaactctggagcccaactccacgtgacctatctggtgtccggttcattgatccagaacgggcatagctgtcacaaagtcgccgtggtcagggaagataaactcgaagccgtgaagtcaaagcttgcagtgacagcatccatacacgtgtactccatccagaaggctatgctaaaagactctgggcccttgttcaacaccgactacgatattctcaagtccaacctgcagaattgttctaaattctcggccattcagtgcgcggcggccgtgcctagggcccccgccgagagcagcagcagcagcaaaaagtttgagcaaagtcatttgcacatgtcctccgaaactcaagcgaataatgaactaacaactaatggtcacggccccccggcctccaagcaggtaagtcagcagcccaagggtattatgggaatgttcgcgtccaaagctgctgcaaagacgcaggagactaacaaagaaacaaaaacagaggcaaaagaggtgactaatgcctctgccgccggcaataaggcgccaggtaaggggaatatgatgtcaaacttttttggcaaagcggccatgaacaaatttaaggtgaacctcgattccgagcaagctgtcaaagaggaaaagatcaaagagaagaagcgttag

SEQ ID NO: 284832 - DNA, 804 bp, Artificial Sequence
  derived and/or modified sequence
atggcggatcagctctacctagagaatattgacgaattcgtgaccgatcagaacaagatcgttacatacaagtggctatcgtataccctcggagtgcatgtcaaccaagcgaaacagatgctatacgactatgtcgaaaggaagagaaaggaaaactctggcgcacagctgcatgttacctatttggttagtggttctctcatccagaatgggcattcctgtcataaggtggccgtggtgcgggaggataagctcgaggctgtgaagagcaaactggccgtgaccgcgtcaatccacgtctacagtatccagaaagcaatgctgaaggactcagggcctctcttcaacacagactatgacattctcaaatctaatctgcagaattgttcgaagttttctgcgattcagtgcgcagctgctgtccccagagcaccggctgaaagctcttcatctagcaaaaaatttgaacagtcacacctgcatatgtcatctgaaacacaagccaataatgagctcacgacaaatgggcacggccctcccgcatcgaagcaggtttcacaacagccgaagggaattatgggcatgttcgcttccaaagctgctgcaaagacccaagagaccaacaaggagacaaagactgaggctaaggaggtaacgaacgcctcagccgctggcaataaagctcctggcaagggtaacatgatgtctaacttttttggtaaagcagcaatgaataaatttaaagtcaacctggactctgagcaggcagttaaagaagagaagatcaaagagaagaaacggtag

SEQ ID NO: 284833 - DNA, 839 bp, Artificial Sequence
  derived and/or modified sequence
gaggggttagaggcgggtcccagcgctgccgcaccatggcggaccagctttatctggaaaatatagacgagttcgtcacggaccaaaacaagatcgtgacatacaaatggctgagctatacactaggggttcatgttaaccaggccaaacagatgctgtatgattatgttgaaaggaaacgaaaagaaaattcaggagcccaactgcatgttacctacttggtgtctggcagtctcattcagaatggacattcctgccacaaggttgcagtagtgagagaagataaattggaagcagtgaagtccaagctagctgtgactgccagcatccatgtgtacagcatccagaaagccatgctaaaggacagtgggcctctgttcaatactgactatgacatccttaaaagcaacttgcagaactgcagcaaatttagtgctatacaatgtgcagctgccgtccctagagctcctgctgaatcctcttcgtcttccaaaaagtttgagcagtcacatcttcacatgtcaagtgagacacaagccaacaatgagctgaccaccaatggtcatggcccacctgcatccaagcaggtttcccagcagcccaaaggaattatgggaatgtttgcctccaaagctgctgctaaaacccaagaaaccaacaaggaaacgaaaacagaggctaaagaagtaacaaatgcatctgcagcaggcaacaaggcaccagggaaagggaatatgatgagcaacttttttggaaaagctgctatgaataaatttaaagtcaatttggactcagaacaagcagtgaaagaagaaaaaataaaggaaaaaaaaaggtag

SEQ ID NO: 284834 - protein, 799 aa, Artificial Sequence
  derived and/or modified sequence
AKMATEHPEPPKAELQLPPPPPPGHYGAWAAQELQAKLAEIGAPIQGNREELVERLQSYTRQTGIVLNRPVLRGEDGDKAAPPPMSAQLPGIPMPPPPLGLPPLQPPPPPPPPPPGLGLGFPMAHPPNLGPPPPLRVGEPVALSEEERLKLAQQQAALLMQQEERAKQGDHSLKEHELLEQQKRAAVLLEQERQQEEEEMETDARSSLGQSASETEEDTVSVSKKEKNRKRRNRKKKKKPQRVRGVSSESSGDREKDSTRSRGSDSPAADVEIEYVTEEPEIYEPNFIFFKRIFEAFKLTDDVKKEKEKEPEKLDKLENSAAPKKKGFEEEHKDSDDDSSDDEQEKKPEAPKLSKKKLRRMNRFTVAELKQLVARPDVVEMHDVTAQDPKLLVHLKATRNSVPVPRHWCFKRKYLQGKRGIEKPPFELPDFIKRTGIQEMREALQEKEEQKTMKSKMREKVRPKMGKIDIDYQKLHDAFFKWQTKPKLTIHGDLYYEGKEFETRLKEKKPGDLSDELRISLGMPVGPNAHKVPPPWLIAMQRYGPPPSYPNLKIPGLNSPIPESCSFGYHAGGWGKPPVDETGKPLYGDVFGTNAAEFQTKTEEEEIDRTPWGELEPSDEESSEEEEEEESDEDKPDETGFITPADSGLITPGGFSSVPAGMETPELIELRKKKIEEAMDGSETPQLFTVLPEKRTATVGGAMMGSTHIYDMSTVMSRKGPAPELQGVEVALAPEELELDPMAMTQKYEEHVREQQAQVEKEDFSDMVAEHAAKQKQKKRKAQPQDSRGGSKKYKEFKF

SEQ ID NO: 284835 - protein, 773 aa, Artificial Sequence
  derived and/or modified sequence
MAEAHQAVAFQFTVTPDGIDLRLSHEALRQIYLSGLHSWKKKFIRFKNGIITGVYPASPSSWLIVVVGVMTTMYAKIDPSLGIIAKINRTLETANCMSSQTKNVVSGVLFGTGLWVALIVTMRYSLKVLLSYHGWMFTEHGKMSRATKIWMGMVKIFSGRKPMLYSFQTSLPRLPVPAVKDTVNRYLQSVRPLMKEEDFKRMTALAQDFAVGLGPRLQWYLKLKSWWATNYVSDWWEEYIYLRGRGPLMVNSNYYAMDLLYILPTHIQAARAGNAIHAILLYRRKLDREEIKPIRLLGSTIPLCSAQWERMFNTSRIPGEETDTIQHMRDSKHIVVYHRGRYFKVWLYHDGRLLKPREMEQQMQRILDNTSEPQPGEARLAALTAGDRVPWARCRQAYFGRGKNKQSLDAVEKAAFFVTLDETEEGYRSEDPDTSMDSYAKSLLHGRCYDRWFDKSFTFVVFKNGKMGLNAEHSWADAPIVAHLWEYVMSIDSLQLGYAEDGHCKGDINPNIPYPTRLQWDIPGECQEVIETSLNTANLLANDVDFHSFPFVAFGKGIIKKCRTSPDAFVQLALQLAHYKDMGKFCLTYEASMTRLFREGRTETVRSCTTESCDFVRAMVDPAQTVEQRLKLFKLASEKHQHMYRLAMTGSGIDRHLFCLYVVSKYLAVESPFLKEVLSEPWRLSTSQTPQQQVELFDLENNPEYVSSGGGFGPVADDGYGVSYILVGENLINFHISSKFSCPETDSHRFGRHLKEAMTDIITLFGLSSNSKK

SEQ ID NO: 284836 - DNA, 2322 bp, Artificial Sequence
  derived and/or modified sequence
atggcagaagctcaccaggccgtggccttccagttcactgtaaccccagacggcatcgacctgcgactgtctcatgaggcactgcggcagatctacttgagcgggcttcacagctggaagaaaaagtttataaggttcaagaacggcatcattacaggcgtgtaccctgcctccccgtcaagctggctcattgtagtagttggcgttatgaccaccatgtatgcaaagatagacccttcattgggcatcatcgctaagattaaccggaccctcgagactgccaactgtatgtccagccagaccaaaaatgtggtgtccggcgtccttttcggaacaggcttatgggttgccttgattgtgaccatgcgttatagtttgaaggtgttgctgtcctatcacggctggatgttcacagaacacggaaaaatgagtcgcgcaaccaagatctggatggggatggtcaagatcttctccggtagaaaacctatgttgtattctttccagacctccctccctcggctgccagttcctgctgtgaaagacaccgtaaaccgctacttgcagtccgttcgcccgctcatgaaggaagaggactttaaacgaatgactgcacttgcccaggattttgcagttggattgggacctcggctgcagtggtatctgaaactcaaatcctggtgggcaacaaactacgtgtctgattggtgggaagaatacatttacctgagagggcggggccccctaatggtgaactccaactattacgccatggacctgctttacattctccccactcatattcaggctgccagggccgggaacgctattcacgcaatcttattgtaccgcagaaagctggaccgcgaggaaatcaagccaatccgtctgctcgggtctactatccccctctgttctgctcaatgggagcgaatgtttaacacatctcgcatccccggtgaagagaccgatacaatccagcatatgcgggactcgaagcacattgtggtgtatcaccgcggccggtattttaaggtgtggctctaccatgatggacggctgttgaagcccagagagatggagcagcagatgcaacgcatcctggacaacacttccgagccgcagcctggggaagcaagactggccgccctgactgcaggtgaccgtgtgccttgggcacgctgtcggcaggcttacttcggaagggggaaaaacaagcaatcattggacgcagtcgaaaaggcggccttcttcgtgactctggatgagacagaggagggatatcggtctgaggatcccgatactagcatggattcttacgccaaaagcctgcttcacggtcgctgttacgatcgctggttcgataagtcattcaccttcgtggtttttaagaacgggaagatgggactgaacgcagagcattcctgggctgatgccccaatcgtcgcccatttgtgggaatacgtgatgagcatcgacagcctacagcttgggtatgcagaagatggccactgtaagggtgatatcaacccgaatatcccataccccacacgcctgcagtgggacatccccggagaatgtcaagaagtaattgagacatctctgaatactgccaatctactggctaacgacgtcgattttcattccttcccttttgtggcttttggcaagggcatcattaaaaaatgcagaacttccccagatgcgttcgtccagctggcactccagctggctcactataaggatatgggaaaattctgcctcacctacgaggcatccatgacccggcttttccgggagggacgcacagaaaccgtgagatcttgcactaccgagagctgcgattttgtccgagccatggttgaccctgcacaaactgtggagcagcgcctgaaactgttcaagctagcctcggagaaacaccaacacatgtacagactcgcgatgaccggcagcggtatcgataggcacctattctgcctgtacgtagtcagtaagtacctggcagtcgaatcaccatttcttaaggaggtgctcagcgagccctggaggttgtcgaccagccagacgccgcagcagcaagtggaactgttcgacctggagaataatcctgagtacgtcagctctgggggagggttcggcccagtggcagacgatggatacggagtgtcatacattctggtgggggagaatctgatcaactttcacattagcagcaagttctcctgtcccgaaactgattctcacagatttggtcgccacctgaaggaagccatgacggatataattaccttattcggcctgtcatccaattcaaagaaatag

SEQ ID NO: 284837 - DNA, 2322 bp, Artificial Sequence
  derived and/or modified sequence
atggccgaagctcaccaggcggtggctttccagtttacggtgactcctgatggaatcgacctgcggttgtctcacgaagctctgagacagatttatctgtccggtctccacagctggaagaaaaagtttatccgctttaaaaacgggattattacaggagtataccccgcatctccaagctcttggcttatagtggtagtgggagtgatgacgaccatgtatgccaagatcgacccttctctcggtatcatcgctaagattaatagaaccctggaaaccgctaattgcatgtctagtcagactaaaaatgtagtgagcggcgtgctgttcggcacgggactctgggtcgcgctgatcgtgaccatgaggtacagtttgaaggtcttactttcgtaccatggttggatgttcacagagcacgggaaaatgagtagagctactaagatttggatggggatggtgaagattttttccgggaggaagccgatgctgtactcgttccagacgtctctcccaagacttcctgtccctgcggtcaaggatactgtaaacaggtacctccagtccgtaagaccacttatgaaagaggaggactttaaacgaatgactgctctcgcccaggacttcgccgtgggcttgggacctcgcctccagtggtacctcaagctcaagagttggtgggccaccaattatgtgagcgattggtgggaagagtatatttatctccggggcagggggccactaatggtgaactctaactactatgccatggatttgctttacatcttgcccacacatatccaagctgctcgtgcaggaaacgccattcatgcaattcttctgtacagacggaagctggaccgagaagagattaaaccaatcagactgcttggatccaccattcccctttgtagtgcacagtgggagagaatgtttaacacatcgcgcataccgggcgaggaaacagacacaatccaacacatgcgtgatagcaagcacatcgtggtctaccatcgaggaaggtactttaaggtgtggctttaccatgacggtaggttgctgaagccccgggaaatggaacagcagatgcagcggatattggataacacaagcgagcctcagcccggcgaggcaaggctggctgcactgactgcaggcgacagggtgccttgggctaggtgtcgtcaggcttactttgggcggggcaagaataagcaaagtctggatgctgtggaaaaagcagcatttttcgtaacgctggacgaaactgaagagggttacaggagtgaagaccctgacacatcaatggatagctacgctaagtcactactccacggcagatgttatgatagatggtttgataagagcttcacttttgtggtcttcaagaacggtaaaatgggactcaatgccgagcactcctgggccgatgctcctatcgtagcccacttgtgggagtacgtgatgtctatcgactctctgcaactcggatacgccgaggacggtcactgcaagggcgacataaaccccaacatcccatacccaacgcgacttcagtgggacatacctggggagtgtcaggaagtcatagaaacttctctgaatacggcgaatctgctggctaacgacgtcgactttcattcgttcccatttgtggccttcgggaagggcataatcaaaaaatgcagaacaagtcctgatgcattcgtccaactcgcactccagctggcgcactacaaagacatgggcaagttctgcctcacttacgaggcctccatgacccgccttttccgcgaaggacgcaccgagactgtccggtcttgcacgactgagtcctgtgatttcgttcgcgccatggttgacccagctcagacggtcgagcaaagactgaagctgtttaagctcgcctccgaaaagcatcagcacatgtacagactggcaatgaccggctcgggaattgatcgtcatctgttctgtctgtacgtcgtaagcaagtatctggcagtggaatctcctttcctgaaggaggtgctgagtgaaccatggcggctgtccactagccagactccacagcagcaggtggagctttttgacctggaaaacaaccctgagtacgtttcatcaggcggagggtttgggcctgtggcggatgacggatatggggtttcctatattttagtgggggaaaacctgatcaacttccacatttcctcaaaatttagctgccccgagaccgactcccaccggttcggaaggcacctgaaagaagctatgacagacataatcacactgttcggtctgtctagtaactcaaagaagtag

SEQ ID NO: 284838 - DNA, 2322 bp, Artificial Sequence
  derived and/or modified sequence
atggccgaagcccaccaggcagtggcctttcagtttaccgtgactccggacggtatagatctccgactgtcccatgaggcactgcgtcagatttacctcagtgggctccactcttggaaaaagaagtttattcgctttaagaatgggatcatcaccggagtatacccagccagccctagcagttggcttattgtcgttgtcggcgtcatgaccaccatgtatgccaagattgatccaagcttgggtattatcgccaaaatcaatagaactttagagactgcaaattgtatgtcgtcacagacaaaaaatgtcgtctctggcgtgttgtttggcaccggtttgtgggtggcactcattgtgacaatgcggtactcacttaaggttctcctgagctatcacggctggatgttcactgagcacgggaaaatgtcacgggccacaaaaatatggatgggtatggtgaagattttctccggacgtaagccgatgctttactcattccagacctccctcccccgcctcccagtcccagctgtcaaggatacagtgaatcgctatctgcagtcggtgagacccctcatgaaggaggaggacttcaagagaatgacggcactggctcaggactttgccgtgggactgggacccagattacaatggtatcttaaactgaagtcctggtgggctaccaattacgtgagtgattggtgggaagagtatatctatctgagaggccgagggccgcttatggtcaatagcaattactacgcaatggatctactctacattctacctacacatattcaggcagcccgggccgggaacgctatccatgcaattctgctttaccgacgtaaactggaccgggaggagatcaaacctatccggctgctgggctcaaccattccactgtgttccgcgcagtgggaacgaatgttcaacactagccgcattcctggcgaagagaccgataccattcagcatatgagagatagtaagcacattgttgtctatcaccgggggcgctattttaaggtgtggctgtaccatgatggacggctgctgaagccgcgggaaatggaacagcagatgcagagaattctggataacacctccgaaccgcagccaggtgaagcgagactggcagccctgactgccggcgatagagttccttgggctagatgccgtcaggcttacttcggaaggggcaaaaacaagcagagcctggacgccgtcgagaaagccgcctttttcgtgaccctcgacgaaacagaagaaggctatcggtctgaagaccccgacacgagtatggatagttacgcaaaaagcttactgcatggcaggtgctacgaccgttggtttgacaaatctttcactttcgtggtgttcaaaaacggcaagatgggtctgaatgcggagcactcctgggctgatgcccccattgtcgcccatctgtgggaatatgtgatgtcaatcgactctctccagctgggatacgccgaagatggccattgcaaaggggatattaatcctaatatcccttacccaaccaggctccagtgggatatccccggcgagtgtcaggaagtaattgagacaagtctgaacaccgcaaatctcctggcgaacgacgtggactttcacagctttcctttcgtggcttttggaaagggtatcattaagaagtgtcgcacctcacctgatgcgtttgtccaattagcactccagctcgcacattacaaagacatgggcaaattctgcctgacctacgaggcaagcatgacccgcttgttcagagaaggaagaacagagacagtacggtcttgcaccaccgaaagctgcgacttcgtccgagctatggtggatcccgcccagaccgtagaacagagattaaaactgttcaaattggcgagcgagaaacatcagcacatgtacagacttgctatgactgggagcggtattgaccgacacctcttctgcctgtacgtggtctctaaatatctggccgtggaatcacctttccttaaggaagtgttgtcagaaccttggcgcctcagcacttcccagacacctcagcagcaggtggaattatttgatcttgaaaataaccccgaatacgtgtcttctggagggggatttggccctgttgccgatgacgggtacggtgtgtcttacatactagtcggcgagaatctgataaacttccacatttcctccaaatttagctgtcccgagacagactcacacaggttcggccggcatctgaaggaggccatgactgacattatcactctctttgggttatcctcaaattcaaaaaaatag

SEQ ID NO: 284839 - DNA, 2322 bp, Artificial Sequence
  derived and/or modified sequence
atggccgaggcccaccaggccgtggccttccagttcaccgtgaccccagatggcatcgacctgcggctgagccatgaggccctgcggcagatctacctgagcggcctgcacagctggaagaagaagttcatccgcttcaagaatggcatcatcaccggggtgtacccagccagccccagctcctggctgattgtggtggtgggcgtgatgaccaccatgtatgccaagattgaccccagcctgggcatcatcgccaagatcaacagaaccctggagacagccaactgcatgagcagccagaccaagaatgtggtgtctggagtgctgtttggcaccggcctgtgggtggccctgattgtgaccatgagatacagcctgaaggtgctgctgagctaccacggctggatgttcacagagcacggcaagatgagccgggccaccaagatctggatgggcatggtgaagatcttcagcggcaggaagcccatgctgtacagcttccagaccagcctgccccggctgcctgtgcctgctgtgaaggacacagtgaaccgctacctgcagagcgtgcggcccctgatgaaggaggaggacttcaagaggatgacagccctggcccaggactttgctgtgggcctgggcccccggctgcagtggtacctgaagctgaagtcctggtgggccaccaactacgtgtctgactggtgggaggagtacatctacctgcggggccggggccccctgatggtgaacagcaactactatgccatggacctgctgtacatcctgcccacccacatccaggccgcccgggctggaaatgccatccacgccatcctgctgtacagaaggaagctggaccgggaggagatcaagcccatccggctgctgggcagcaccatccccctgtgcagcgcccagtgggagaggatgttcaacaccagccgcatccctggagaggagacagacaccatccagcacatgagggacagcaagcacatcgtggtgtaccaccggggccgctacttcaaggtgtggctgtaccatgatggccgcctgctgaagccccgggagatggagcagcagatgcagaggatcctggacaacaccagcgagccccagcctggagaggcccggctggccgccctgacagctggggacagagtgccctgggcccgctgccggcaggcctacttcggccggggcaagaacaagcagagcctggatgctgtggagaaggccgccttctttgtgaccctggatgaaacagaggagggctacagaagtgaggaccctgacacctccatggacagctatgccaagagcctgctgcacggccgctgctatgaccgctggtttgacaagagcttcacctttgtggtgttcaagaatggcaagatgggcctgaatgctgagcacagctgggcagatgcccccatcgtggcccacctgtgggagtatgtgatgagcattgacagcctgcagctgggctatgcagaagatggccactgcaagggggacatcaaccccaacatcccctaccccacccggctgcagtgggacatccctggagagtgccaggaggtgattgagaccagcctgaacacagccaacctgctggccaatgatgtggacttccacagcttcccctttgtggccttcggcaagggcatcatcaagaagtgcaggaccagcccagatgcctttgtgcagctggccctgcagctggcccactacaaggacatgggcaagttctgcctgacctatgaggcctccatgaccaggctcttccgggagggccgcacagagaccgtgcgcagctgcaccacagagagctgtgactttgtgcgggccatggtggaccctgcccagacagtggagcagaggctgaagctgttcaagctggccagcgagaagcaccagcacatgtaccgcctggccatgactggaagtggcatcgacagacacctgttctgcctgtatgtggtgtccaagtacctggccgtggagagccccttcctgaaggaggtgctgtctgagccctggaggctgagcaccagccagaccccccagcagcaggtggagctgtttgacctggagaacaacccagaatatgtgagcagcggcggcggcttcggccctgtggctgatgatggctacggcgtgtcctacatcctggtgggagaaaatctcatcaacttccacatcagcagcaagttcagctgcccagagacagacagccaccgcttcggccgccacctgaaggaggccatgacagacatcatcaccctgtttggcctgagcagcaacagcaagaagtag

SEQ ID NO: 284840 - DNA, 2322 bp, Artificial Sequence
  derived and/or modified sequence
atggccgaggcccaccaggccgtggccttccagttcaccgtgaccccggacggaatcgacttgagactcagccacgaggcgctgcggcagatctacttgtccggccttcacagctggaaaaaaaaatttatccggtttaagaacgggattattactggcgtttaccccgcaagcccgtctagctggctaatcgtcgttgtcggtgtgatgacaacaatgtatgctaaaattgacccttctcttggaatcattgccaaaattaataggactctcgaaacggcaaactgcatgagctcacaaacaaaaaatgtggtctctggcgttctcttcggtaccgggctgtgggtggcactgatcgtaacaatgcgatactcccttaaggtcctcctcagctaccacgggtggatgttcacggagcacgggaagatgtcccgagctaccaagatctggatgggcatggttaagatcttctccggtcggaagccaatgctatacagcttccagacctcgctgcccaggctgcctgtccctgccgttaaagatacggtgaacagatacctgcagtccgttcgcccactgatgaaggaggaggactttaagcgcatgaccgccctcgcacaagattttgcagttgggctggggcctcggctccagtggtaccttaaattaaagtcttggtgggcaacaaactacgtgtcggactggtgggaggaatatatttaccttcgggggagagggccattgatggtgaacagtaattattacgcgatggacctgctgtacatactccccacacatatacaggcggcgagagcaggcaatgctatccatgcaatattactgtatcgaaggaaactggacagagaggaaatcaaacccatacgccttctgggctccacaatcccactatgtagtgcgcaatgggagcgcatgttcaatacttcacgaattcctggcgaggaaacagataccatacagcacatgcgcgattcaaagcatatcgttgtttatcaccgcggccgttacttcaaagtgtggctgtaccacgatggccgactactgaagcctagggaaatggagcagcaaatgcaacggatactggacaataccagcgagcctcagccgggcgaagccagactggctgctctgactgctggggatagagtaccttgggcacgctgtagacaggcttatttcggccgcggtaagaacaagcaatctttggacgctgtagagaaagctgccttcttcgtgacactggatgagaccgaagaggggtaccgatctgaggaccccgacacgtccatggactcttatgcaaaatccctgcttcacggaaggtgttacgaccgatggtttgacaaatccttcacatttgttgttttcaagaacggcaagatgggattaaacgccgaacattcttgggctgatgctcccatagttgcccatttgtgggagtacgttatgtcaatcgacagcctccagctggggtacgctgaagatggccactgtaaaggggatatcaatcctaacatcccctaccccaccagactgcaatgggatatccctggcgaatgtcaggaggtcatcgaaactagtctcaataccgccaatctgctggcgaacgatgtggactttcattccttccccttcgtggctttcggtaagggtattattaaaaaatgcaggacctcaccagatgctttcgtgcaactcgccctgcagctggcccactacaaggatatgggtaaattttgcttgacctacgaggcatcaatgacacgcttatttagggagggccgtacagaaacggtgcgctcctgcacgacagagtcctgcgattttgtgagagctatggttgacccagctcaaactgtcgagcaaagacttaagctgttcaagctggctagcgagaagcaccagcatatgtaccggcttgctatgactgggagcggcatcgataggcatctcttctgcctgtacgtagtgtctaaataccttgccgtggagtcccccttcctgaaggaggtgttgagcgagccatggcggctgagtacaagtcagaccccccagcagcaggtggagctgttcgaccttgagaacaatcctgagtatgtgagcagtggcgggggattcggccctgtcgctgatgatgggtatggggtatcatacattttggtgggggaaaacttgataaactttcacatatccagcaagttcagctgcccagagacggactctcaccgattcggacgtcacttgaaggaggccatgacagacatcattaccctgtttggcttaagctccaattcaaagaaatag

SEQ ID NO: 284841 - DNA, 2322 bp, Artificial Sequence
  derived and/or modified sequence
atggccgaggcccaccaggccgtggccttccagttcaccgtgacccctgatggtatagacctacgactgtcccatgaggcattgaggcagatctacctgtccggacttcattcatggaagaaaaagtttatacggtttaaaaacggaatcattactggggtgtacccggcttccccaagcagctggttaatcgtggtggttggcgtaatgaccactatgtatgccaagatcgaccctagcctgggcatcattgccaaaataaataggacactcgaaaccgcaaactgtatgtcgtcccagacaaaaaatgtggtaagcggagtgctgttcgggactggcctctgggtggcactgatcgtgactatgaggtactctctgaaagttttactgagctatcatggttggatgtttacagaacatggcaagatgagcagggcaactaaaatttggatgggcatggtcaagatattctcgggtcgtaaacctatgttgtacagctttcagacaagcctgccgagacttccagttcccgctgtgaaggacactgtgaacagatatctgcaatctgtgcgacccctgatgaaggaggaagattttaagcgtatgactgccctcgctcaggactttgctgttggactcggaccacggttacagtggtacctgaagcttaagtcttggtgggctaccaactacgtgtccgattggtgggaagagtatatttatctgcgagggagaggcccccttatggtcaactcaaattattatgccatggatctcctgtatatcctgccaacacacatccaggccgcccgcgcaggcaacgcaattcatgccatacttctttacaggcggaagctggacagggaggagattaagcccattcgactgctcgggtcgacaatccctctgtgtagcgcgcagtgggagcggatgtttaatacaagccgaattcctggggaggagaccgataccatacagcacatgcgagactctaagcacatcgtggtctatcaccggggacgctatttcaaggtgtggctctaccatgatggccgcctgctgaaaccacgagagatggagcagcaaatgcagagaatcctagacaacactagtgagccacagcccggcgaggcacggctggccgccctgaccgctggcgacagagtgccgtgggcccgttgcagacaggcatattttggccgggggaaaaataagcagagtcttgatgctgtggaaaaggccgcctttttcgtgacgttggatgagaccgaagaggggtacagaagcgaggatccagataccagcatggactcttatgccaaatccttattacacgggcggtgctacgatcgctggttcgataagagtttcacattcgttgtttttaaaaacggcaaaatgggtctgaacgccgaacacagctgggcagatgcacccatagtggctcatctgtgggaatatgttatgtcaatcgatagcctgcagcttggctacgctgaagacggacactgcaagggggacattaacccaaacataccgtaccccacaagactgcagtgggatattccaggcgagtgtcaagaggtaatcgaaacaagcctgaacaccgctaatctgttagcaaacgatgttgacttccactcttttcctttcgtcgccttcggaaagggaattataaaaaagtgccggacctccccggacgccttcgtgcaactcgccctgcagctggcccactacaaggacatggggaagttttgtctcacttatgaagcttctatgactagactgtttagggaaggccgtacagaaactgtgcgatcatgtacaaccgaaagttgtgactttgtcagagccatggtggatcctgcacagactgtggagcagaggctcaagctgttcaagctcgcctcagagaaacaccagcatatgtatcgcctggccatgaccggatccggaatcgaccggcacctgttctgcctttacgtagtgagtaaatacctggccgtggagtccccgtttttgaaggaggtgctgtccgagccatggaggctttctacaagtcagactcctcaacagcaggtggaactgtttgaccttgaaaataatccggagtatgttagctctggtggcggatttggacccgttgcagacgacggatatggcgtctcctacatactggtgggcgaaaacctcatcaattttcacatttccagtaaattcagctgtcctgagacagatagccaccggttcggacggcacctgaaagaagcaatgacagacattatcactctcttcggtttatcgagcaactctaagaaatag

SEQ ID NO: 284842 - DNA, 2322 bp, Artificial Sequence
  derived and/or modified sequence
atggccgaggcccaccaggccgtggccttccagttcaccgtgaccccagacgggatagacctgagattgagccacgaagctttgcggcaaatttacctttctggactgcactcctggaaaaagaaatttatacggttcaagaatgggatcataactggtgtatatcccgcttccccaagctcctggctgattgtagtggtgggtgtgatgaccaccatgtacgctaaaatagacccgagtctcggcataatcgccaagatcaacaggactctagagacagcgaattgcatgtcatctcagacgaaaaacgtggtgagcggcgtgttattcgggacggggttatgggtggctctcatcgtgacaatgaggtactcacttaaggtactcttatcttatcacggttggatgttcaccgagcatggcaagatgtcccgcgctactaagatttggatgggaatggtgaagatctttagtggcaggaaacccatgctgtactcttttcagacttctttgcctcgcctgccagtccctgcagtgaaagatactgtaaaccgctatctgcagagcgtgagacctctcatgaaagaggaagatttcaagcggatgaccgcgttggcccaagacttcgctgtaggcctggggcctagactccagtggtaccttaaactgaaatcgtggtgggcaacaaactacgtgtccgactggtgggaagagtacatctacctgaggggacgcggtccccttatggtgaacagtaactactacgcgatggacctcttgtacatcctccccacacatatccaagccgcacgcgctggcaatgccatccatgccatacttttatatcgtcgcaagcttgatagggaggaaatcaagccaattcgcttgttggggtcaacaatacccctatgcagtgcccaatgggagcggatgtttaataccagcagaattcccggagaggaaactgacacgattcaacacatgagggactctaagcacattgtcgtgtaccatcgcgggcggtatttcaaggtctggctatatcacgacggacggttgctgaagccacgagaaatggaacaacaaatgcagcgaattctggataatacctcagaaccccagcccggcgaggccagattggctgccctgacagcaggggatagggttccatgggcccgctgcaggcaggcttattttgggaggggtaaaaataagcagtctctggacgccgtcgagaaggcagccttttttgtgaccttggacgaaaccgaggagggctataggtctgaggatccagataccagcatggatagctatgcgaagagcttactgcatgggcgttgttatgacaggtggttcgataaaagcttcaccttcgtggtttttaaaaacggaaaaatgggcttgaatgctgaacacagctgggcggatgctccgatagttgcgcacctatgggagtacgtcatgagcattgattcactgcagcttgggtacgctgaggatggacactgtaagggggatatcaatcccaacatcccatacccaacaaggctccagtgggacatccccggagaatgccaggaagtgattgagacaagcttgaatacagcaaatcttcttgctaacgatgttgactttcattccttcccctttgtggcatttgggaagggcattataaaaaagtgtcggacatcacccgatgcgtttgtccagctggccttacaacttgcccactataaggatatggggaagttttgcctcacttacgaagctagcatgacgcgcctgttccgcgaaggccggaccgagacggtacgctcctgtactacagagagttgcgacttcgtccgcgccatggttgatcctgcacaaaccgtggaacagcgcctaaaactcttcaaattagcatccgagaaacaccaacacatgtatagactagccatgactggcagcggtatcgatcgccacctcttctgcctgtatgttgtgtcaaaatatctggcggtggagtctccattcctaaaggaagtgctgtccgagccatggagactctcaacatcccagacaccacagcaacaagtcgagctgtttgatcttgagaataaccctgagtatgtttcttctggcggaggattcgggccggtggcagacgacggttacggagtatcctacattcttgtgggcgaaaatctcattaatttccatatctccagcaagttcagttgcccggaaaccgactcgcaccggtttggcagacacctgaaggaagccatgaccgatatcatcactctgtttggattgagctctaacagcaaaaaatag

SEQ ID NO: 284843 - DNA, 2322 bp, Artificial Sequence
  derived and/or modified sequence
atggcggaggctcatcaggccgtggccttccagttcaccgtcaccccagatggaattgaccttcggctttctcacgaagctctgagacagatatacttatccgggctgcatagctggaagaaaaagtttattcgcttcaaaaacgggataataaccggtgtttaccccgcaagtcccagtagctggctgatcgtggtcgtgggtgtgatgaccactatgtacgccaaaattgacccctcgcttggaataatcgccaagataaacagaaccttggagacagctaactgcatgtcatctcagaccaagaatgtcgtctctggggtgctgttcggcactggactttgggttgcactgattgtgaccatgcggtactctctgaaggtcttattaagttaccacggttggatgttcaccgagcacggaaagatgagcagggctaccaagatctggatgggcatggtaaagatttttagtggcaggaagccaatgctttacagcttccagacaagcctgccacgcttgcccgtgcctgcagttaaggatactgtaaataggtacttgcagtctgtaagacccctaatgaaagaggaagacttcaagaggatgactgccctagcccaagacttcgccgtgggcctcggccctcggcttcagtggtacctgaagctgaagagctggtgggctaccaactacgtctcggactggtgggaagaatatatctatttacggggtagggggcctctcatggtgaacagtaattactacgctatggatttgctgtatatcttgccgacgcatatacaggctgccagagccggaaatgccattcacgcaattttactttatcgtagaaaactggaccgagaagagattaaaccaattagactgctcggctctactatacctctgtgttcagctcagtgggaacgcatgttcaatacttcccgaattcctggcgaggaaaccgacacaattcagcatatgagggactctaagcacatcgtggtctaccacaggggacgctatttcaaagtgtggctgtaccacgatggaagactgctcaagccgcgtgagatggagcaacagatgcagcgaatcctagataatacttccgagccgcagcctggggaggcgagacttgccgctctcaccgcaggggatcgcgtaccatgggccagatgtagacaggcatacttcgggaggggtaagaataagcaaagcctagacgccgtggagaaggctgccttttttgttaccctggatgaaactgaggaggggtatcggtcagaagatcccgacacctctatggactcatatgcaaagtccctcctccatggaaggtgctacgatcgctggttcgataagagctttacattcgtggtttttaaaaacggcaagatgggtctgaatgctgaacactcctgggcagacgccccaattgttgcccacttgtgggagtacgttatgtctattgatagcctgcagctgggatatgctgaagatggccattgcaagggtgacataaaccctaatataccctacccaactcgattgcagtgggacatccccggagaatgccaggaagttatagagacgtcccttaacaccgcgaatttactggccaatgacgtggacttccacagcttcccgttcgtggccttcggtaaagggattatcaagaaatgtagaacttctcccgacgcatttgttcagctggcgcttcaattagcacattacaaggacatgggcaaattttgcctcacgtacgaggcttcaatgacacggctctttcgggagggccgtacagaaacagtccgttcatgtaccactgagtcttgcgacttcgtgcgagcgatggtggatccggctcagaccgtggaacagcggctgaagctcttcaaactggcttcggagaagcatcagcatatgtatcgcttagccatgaccgggtcaggaattgacagacatttattttgcctgtacgttgtcagcaaatatctggcagtggagtctcccttcctaaaagaagtgctgtcagagccatggcgtctctccacctcacagactccgcagcaacaggttgaattgttcgaccttgagaataatcccgagtatgtctcaagtggtggcggatttggtccagtggccgacgacggatatggcgtatcctacattctggttggggagaacctcataaattttcacatcagctccaagttcagctgcccagaaactgatagccatcggttcggccgtcacctgaaagaagctatgactgacattatcaccttgttcgggctgagctctaattctaaaaagtag

SEQ ID NO: 284844 - DNA, 2322 bp, Artificial Sequence
  derived and/or modified sequence
atggcagaagcgcaccaggccgtggcctttcaattcactgtgacgcctgatggaatcgatctccggttaagtcacgaggcactgagacagatatatctgagtgggctccattcatggaagaaaaagtttatccggttcaagaacgggatcattactggagtatatccggctagcccttcctcatggctaatcgtggttgtgggtgtgatgacaaccatgtatgcaaagattgacccttcactgggtattatcgccaaaattaatcggacgctggagacggctaattgtatgtcctcacaaacgaagaacgtggtcagtggagtactgttcggaaccggcctgtgggttgccctgattgtcactatgaggtacagcttaaaagtactgctgtcctatcacggttggatgttcacagagcatgggaagatgagcagagccactaaaatctggatggggatggtcaaaatcttttctggtagaaaacccatgctctacagtttccaaacaagtctgcctcgactgcctgtgcccgcagttaaagataccgtgaaccgctacttgcagtcagttcgcccactgatgaaagaggaagatttcaagcggatgaccgcactggcccaagacttcgcagtgggactcggccctagacttcaatggtacttgaagctcaagtcgtggtgggcaactaattacgtgagtgactggtgggaggagtacatttatctgcgcggaagaggcccactgatggttaacagtaattactacgcaatggacctgctgtatatacttcccactcacattcaagcggctagggctggaaatgcgattcatgcaattctgttgtatcgcagaaaacttgatagagaagagataaagccaatccggctgctcggcagtacaattcccctctgctctgcacagtgggagcgtatgttcaacactagtaggatcccaggagaagagacagataccatccagcacatgcgggactccaaacacatcgtggtctatcacaggggcaggtactttaaagtctggttgtaccacgatggcagactcctgaaacctcgggagatggagcagcagatgcagaggatcctggacaatacatctgagccacaacctggcgaagcgaggctcgccgctttgacagctggggatagggtaccttgggccagatgccgccaggcatattttggcagaggaaagaacaaacaaagcctggatgctgtcgagaaggctgcctttttcgtgacactggatgaaacggaggaaggttatagaagtgaagaccctgatacttccatggactcgtacgccaagtccctgttgcatggacggtgctatgatagatggttcgataagagtttcacattcgtggtctttaagaacggcaagatgggactgaacgcagagcacagttgggccgacgctcctatagttgcgcacctgtgggaatacgtaatgtccatcgacagcctgcagttgggctatgccgaggacggccactgtaaaggagatattaatcccaatatcccatacccaacacgcttacaatgggacatccctggagaatgtcaagaggtgattgagacttctctgaacacagcaaacctactggccaacgatgtggacttccactccttcccatttgtggcctttgggaaggggatcatcaaaaagtgcaggacttcacccgatgcctttgtccagttggctctgcaactcgcacactacaaagatatgggcaagttttgtctgacatacgaggccagcatgacccgtttatttcgcgagggtaggacagaaacggtacgctcatgtactaccgagagctgcgacttcgtgcgcgcaatggtggatccggcacagacagttgaacaacggctgaaacttttcaaactagcctccgagaaacaccagcacatgtataggctcgcaatgacgggctccggaatagaccgtcatctgttctgcctgtatgtagtttccaaatatctggccgtagagtctccttttctgaaggaagtgctgagcgagccctggagactgtctacttcgcagactccacaacagcaggtagaactttttgaccttgaaaacaaccccgagtacgtgagctcaggcggaggctttggacccgtagccgatgatggctacggggtatcctatatcctcgtgggggaaaatctgataaatttccatattagcagtaagtttagctgccccgaaacagactcccacagatttgggaggcacctcaaagaagctatgacagacataatcaccttatttggactttcgagcaatagcaaaaagtag

SEQ ID NO: 284845 - DNA, 2322 bp, Artificial Sequence
  derived and/or modified sequence
atggccgaggctcaccaagctgttgcctttcagtttacagtgacccctgacggcatcgatttgcgattgtctcatgaggccctgcggcagatctacctcagcggactccacagttggaagaaaaagtttatccggtttaaaaatggaatcataactggagtgtaccctgccagcccatcaagctggctcatcgtggtcgttggcgtaatgactacaatgtacgctaagattgacccatctctgggcataatcgccaagattaaccgcactctagaaactgccaattgtatgtcctcgcagactaaaaacgtcgtgtcaggagtattgttcggcactggactgtgggttgccctcattgtcacgatgagatattccctcaaagtgctgctgagttaccatggatggatgtttacagaacacgggaaaatgtcaagagcaacaaaaatctggatgggtatggttaagattttctcagggagaaagcctatgctgtactctttccagacaagcctgcccagactgccagtccctgccgtgaaagacactgtgaatcgctaccttcaatccgtccgccctctcatgaaggaggaagattttaagagaatgaccgcgttggctcaggatttcgccgtggggcttggacccaggttgcagtggtacctcaagctcaaatcgtggtgggccacaaattacgtatccgattggtgggaggaatatatttacctgcgtggtcgcggaccactaatggtgaactcaaattactacgcaatggacctattgtacatcctacctacccacattcaggccgctcgggctgggaacgccatccacgccatccttctctataggagaaaattggaccgagaagagattaaacccatccggcttcttgggtccacgattcctctttgctcagcacagtgggaaagaatgtttaatacaagccggattcctggcgaggagacggatactatccaacacatgagggatagtaagcacatcgttgtataccatcggggacggtattttaaggtatggctttatcatgatggtcggcttcttaagccaagggagatggagcagcagatgcagcgaatcctggacaatactagtgaacctcagccaggggaggcacgcctcgccgcacttacagcaggagacagagtgccttgggctaggtgccgacaggcctacttcgggaggggaaaaaataaacaaagtctagacgccgtcgagaaggccgctttcttcgtcaccttggatgagactgaagaaggttaccgtagcgaagaccctgacaccagtatggactcatatgccaagtccctcctgcacgggaggtgctatgaccgctggtttgataaaagcttcacattcgttgtgtttaaaaacgggaaaatgggtcttaatgcagagcactcttgggccgatgctcctatagtggcacacttatgggaatatgttatgtcgatagatagtctgcaactgggatatgcagaggacgggcattgcaaaggggatattaaccctaatatcccctaccccactcggctgcagtgggatatccccggtgagtgtcaggaggtcattgaaaccagcctaaacactgctaacctgttggccaacgatgtggacttccacagcttccccttcgtagcatttggaaagggcatcatcaagaagtgcagaacctcccccgacgctttcgtgcaactggcacttcaactcgctcactacaaggatatgggaaagttctgtttgacgtatgaggcctcgatgactcgattatttcgcgaggggaggacggaaacagtgaggtcgtgcacaaccgagtcatgtgattttgtgcgagctatggtcgatcctgcccagactgtggagcagagactaaagctgtttaagctggcgagcgagaagcaccaacatatgtatagactcgcaatgacaggcagcggcatagaccggcacctgttctgtttgtatgtcgtttccaagtatctcgctgtggagtctcctttcttaaaggaggtgctgtcagaaccctggcgactgtctacatcccagacccctcagcagcaggtggagctgttcgacttggagaataaccccgagtacgttagtagcggagggggatttggccctgtggctgacgatgggtacggagtgtcatacatcctagtgggggaaaatctgatcaactttcacatttcaagcaagttttcctgtcctgaaacagactctcataggtttggcagacacctgaaagaagccatgaccgacatcattacgctgttcggcctcagcagtaattccaagaaatag

SEQ ID NO: 284846 - DNA, 5249 bp, Artificial Sequence
  derived and/or modified sequence
ggacccgcctcagccaatccgctgctgccggcgtcgggtgcgctcggcctcgcccgcggccctccttccccggctcccgctcgccgctcgttcactccaccgccgccgccgccgccgccgctgccgctgccgctgccgcacctccgtagctgactcggtactctctgaagatggcagaagctcaccaagctgtggcctttcagttcacggtcactccggacgggattgacctgcggctgagccatgaagctcttagacaaatctatctctctggacttcattcctggaaaaagaagttcatcagattcaagaacggcatcatcactggcgtgtacccggcaagcccctccagttggcttatcgtggtggtgggcgtgatgacaacgatgtacgccaagatcgacccctcgttaggaataattgcaaaaatcaatcggactctggaaacggccaactgcatgtccagccagacgaagaacgtggtcagcggcgtgctgtttggcaccggcctgtgggtggccctcatcgtcaccatgcgctactccctgaaagtgctgctctcctaccacgggtggatgttcactgagcacggcaagatgagtcgtgccaccaagatctggatgggtatggtcaagatcttttcaggccgaaaacccatgttgtacagcttccagacatcgctgcctcgcctgccggtcccggctgtcaaagacactgtgaacaggtatctacagtcggtgaggcctcttatgaaggaagaagacttcaaacggatgacagcacttgctcaagattttgctgtcggtcttggaccaagattacagtggtatttgaagttaaaatcctggtgggctacaaattacgtgagcgactggtgggaggagtacatctacctccgaggacgagggccgctcatggtgaacagcaactattatgccatggatctgctgtatatccttccaactcacattcaggcagcaagagccggcaacgccatccatgccatcctgctttacaggcgcaaactggaccgggaggaaatcaaaccaattcgtcttttgggatccacgattccactctgctccgctcagtgggagcggatgtttaatacttcccggatcccaggagaggagacagacaccatccagcacatgagagacagcaagcacatcgtcgtgtaccatcgaggacgctacttcaaggtctggctctaccatgatgggcggctgctgaagccccgggagatggagcagcagatgcagaggatcctggacaatacctcggagcctcagcccggggaggccaggctggcagccctcaccgcaggagacagagttccctgggccaggtgtcgtcaggcctattttggacgtgggaaaaataagcagtctcttgatgctgtggagaaagcagcgttctttgtgacgttagatgaaactgaagaaggatacagaagtgaagacccggatacgtcaatggacagctacgccaaatctctactacacggccgatgttacgacaggtggtttgacaagtcgttcacgtttgttgtcttcaaaaacgggaagatgggcctcaacgctgaacactcctgggcagatgcgccgatcgtggcccacctttgggagtacgtcatgtccattgacagcctccagctgggctatgcggaggatgggcactgcaaaggcgacatcaatccgaacattccgtaccccaccaggctgcagtgggacatcccgggggaatgtcaagaggttatagagacctccctgaacaccgcaaatcttctggcaaacgacgtggatttccattccttcccattcgtagcctttggtaaaggaatcatcaagaaatgtcgcacgagcccagacgcctttgtgcagctggccctccagctggcgcactacaaggacatgggcaagttttgcctcacatacgaggcctccatgacccggctcttccgagaggggaggacggagaccgtgcgctcctgcaccactgagtcatgcgacttcgtgcgggccatggtggacccggcccagacggtggaacagaggctgaagttgttcaagttggcgtctgagaagcatcagcatatgtatcgcctcgccatgaccggctctgggatcgatcgtcacctcttctgcctttacgtggtgtctaaatatctcgctgtggagtcccctttccttaaggaagttttatctgagccttggagattatcaacaagccagacccctcagcagcaagtggagctgtttgacttggagaataacccagagtacgtgtccagcggagggggctttggaccggttgctgatgacggctatggtgtgtcgtacatccttgtgggagagaacctcatcaatttccacatttcttccaagttctcttgccctgagacggattctcatcgctttggaaggcacctgaaagaagcaatgactgacatcatcactttgtttggtctcagttctaattccaaaaagtaattccactggagctgctgggaaggaaaacgagctcttctgatgcaaaccaaatgaaaaataggcattaatcctgaccttagctcgggatgaaacactgctcttaaaaaaactcagttttccttccagaaaatgtgggtgtttttttttcctagaacagtatctctcccctgtgaagcataaccccactacttccagacttgccctcccttgggggacatctgataaagtctcccctgatgtctccgcatcggcttggatttattaagggatgcaaatcttgttgagttaatgaaggaattagtagggttgtggcttcacacacagtggaatggaaatggtgtgctttctcagtggcaaccgaaggcctagtgcttaagggcatttagcatcatccaagcagggtaaacttttgttttgttaaaagaaaaatgtgttattcaagttggtgtccccagttgtagctaacacatctggaatgcactaaccaaaatgctgtgctttggagacctgcttttgtcaccgtgggtaaccgttcccgtctggtccagtagcctgtgtttgcctctccacatttgaagcaagcaggatgcaaggtcttcagttttactgaccttgtatgtcttcaagtcttcacaacccagtgccttaaaaatgaaaggccctaaatgtaagggagatggagagaaagatttattttgtagagtctttgggtggaattgtgggtatactgttcccttcacaattgactgagtatggataaccgtacataagcatttgctacaccccaccagccccctccccctcagaaacaccagttccttcccaagggcagctgtgccagactcccctcccgggactgccttcttgtcatcataagcaacaaaagaaataacaggcacatgtcataaaaggggagcaagggccgtgatggtcagataattcactcaagaataaaacatgacacgtgcctcaggaggatctctttcccaaagtgacagcaaggagggcagggcatcggccaccaagcggggactagcaagtgaggaaggggagggcagcccaccgtggtgaggagagagtggctccacgaccccaagggatggccttctcctcccacccggtgaggggaaagactcaccagagggtgatggagacagtatgccggctcaccttggtgaccagccaagatgtctcaagtgacagtgctaggtgttcacccagcctgtccttcagataggagtgccttcacgaaagcgtctcatggaccacaaagcaattatgcactgagtcatcttcagtatttaatgcaaaaatgaagcatcatggaatgaaattcccactgtctgtcatgacaagcttagctgtccattgttttaaattgtgtatttatttttttgaccacttggttctagttgggcctgactccttcagagtgctgcaccccgatagtacaacagcgatggctgaactgttggagtcgatggaaggtgcttgccggagaacacgtgcctttttttttttttttttttttgagatggagtttcactcttgttgcccaggctggagtgcagtggtgcaatctcggctcactgcagcatctgccttgcaggttcaagcgattctcctgtctcagcctcccaagtagctgggattacacgcccaacaccatgccctgctaatttttgtatttttagtagagacggggtttcatcatattggtcaggctggtctcgaactcctgacctcaggtgatccacctgcctcagcctcccaaagtgctgggattacaggcatgagccaccatgcgcggcccacatgcatgttttatgtatgtatacttcatgatgtaaaaatcccacctttatgggccaaagattttttttctcctgaaagcaagaaaaaatgaaaacaaaagacaaaaaaaaaaaaaaaagcgtccaggcgcggtggctcatgcgtgtaatcccagcactttgggaggccaaggcgggcggatcacgaggtcaggagatggagaccatcctggctaacacggtgaaaccccgtctctactaaaaattcaaaaaatgagccgggcgtggtggcgggcgcctgtagtcccagctactcaggaggctgaggcaggagaatggcgtgaacccgggaggcggagcttgcagtgagccgagatcgctccactgcactccagcctgggcgacagagcgagactccgtctaaaaaaaaaagcaaaaacaaaccaacaacaaaagcccctgactgtccgtcaagcaggcagcggggatgtagctctctctgccctgggcaagaatagcacttcccgttaaaagccagcagccggcgtcagtccctatcagagccagctagatcatgcactgttgaccactgagcaatctgtgttacactagagttcacagggcattttgagtgtagacgtgagtgcttaaacatatttgggtttctctctcaggttttaaatgtttcaaatgtaattgttgctcatcagtgcagttatcaatgcaattttatattccttgaggggagaaagaggggtcttattgtacatgtccaaggggggtgataagagtattatctgtttaatttaattggaacaaaccattgtcttaacgcagccatggtttgaatttgttatcttgggctgaccggtgcatgtaaatacagtatgctctttggatgtaaatcttagaaatgcagtgtgaatgtaggttatcattaataaaacattaaccccagtctact

SEQ ID NO: 284847 - DNA, 4594 bp, Artificial Sequence
  derived and/or modified sequence
aatccgctgctgccggcgtcgggtgcgctcggcctcgcccgcggccctccttccccggctcccgctcgccgctcgttcactccaccgccgccgccgccgccgccgctgccgctgccgctgccgcacctccgtagctgactcggtactctctgaagatggcagaagctcaccaagctgtggcctttcagttcacggtcactccggacgggattgacctgcggctgagccatgaagctcttagacaaatctatctctctggacttcattcctggaaaaagaagttcatcagattcaagaacggcatcatcactggcgtgtacccggcaagcccctccagttggcttatcgtggtggtgggcgtgatgacaacgatgtacgccaagatcgacccctcgttaggaataattgcaaaaatcaatcggactctggaaacggccaactgcatgtccagccagacgaagaacgtggtcagcggcgtgctgtttggcaccggcctgtgggtggccctcatcgtcaccatgcgctactccctgaaagtgctgctctcctaccacgggtggatgttcactgagcacggcaagatgagtcgtgccaccaagatctggatgggtatggtcaagatcttttcaggccgaaaacccatgttgtacagcttccagacatcgctgcctcgcctgccggtcccggctgtcaaagacactgtgaacaggtatctacagtcggtgaggcctcttatgaaggaagaagacttcaaacggatgacagcacttgctcaagattttgctgtcggtcttggaccaagattacagtggtatttgaagttaaaatcctggtgggctacaaattacgtgagcgactggtgggaggagtacatctacctccgaggacgagggccgctcatggtgaacagcaactattatgccatggatctgctgtatatccttccaactcacattcaggcagcaagagccggcaacgccatccatgccatcctgctttacaggcgcaaactggaccgggaggaaatcaaaccaattcgtcttttgggatccacgattccactctgctccgctcagtgggagcggatgtttaatacttcccggatcccaggagaggagacagacaccatccagcacatgagagacagcaagcacatcgtcgtgtaccatcgaggacgctacttcaaggtctggctctaccatgatgggcggctgctgaagccccgggagatggagcagcagatgcagaggatcctggacaatacctcggagcctcagcccggggaggccaggctggcagccctcaccgcaggagacagagttccctgggccaggtgtcgtcaggcctattttggacgtgggaaaaataagcagtctcttgatgctgtggagaaagcagcgttctttgtgacgttagatgaaactgaagaaggatacagaagtgaagacccggatacgtcaatggacagctacgccaaatctctactacacggccgatgttacgacaggtggtttgacaagtcgttcacgtttgttgtcttcaaaaacgggaagatgggcctcaacgctgaacactcctgggcagatgcgccgatcgtggcccacctttgggagtacgtcatgtccattgacagcctccagctgggctatgcggaggatgggcactgcaaaggcgacatcaatccgaacattccgtaccccaccaggctgcagtgggacatcccgggggaatgtcaagaggttatagagacctccctgaacaccgcaaatcttctggcaaacgacgtggatttccattccttcccattcgtagcctttggtaaaggaatcatcaagaaatgtcgcacgagcccagacgcctttgtgcagctggccctccagctggcgcactacaaggacatgggcaagttttgcctcacatacgaggcctccatgacccggctcttccgagaggggaggacggagaccgtgcgctcctgcaccactgagtcatgcgacttcgtgcgggccatggtggacccggcccagacggtggaacagaggctgaagttgttcaagttggcgtctgagaagcatcagcatatgtatcgcctcgccatgaccggctctgggatcgatcgtcacctcttctgcctttacgtggtgtctaaatatctcgctgtggagtcccctttccttaaggaagttttatctgagccttggagattatcaacaagccagacccctcagcagcaagtggagctgtttgacttggagaataacccagagtacgtgtccagcggagggggctttggaccggttgctgatgacggctatggtgtgtcgtacatccttgtgggagagaacctcatcaatttccacatttcttccaagttctcttgccctgagacggattctcatcgctttggaaggcacctgaaagaagcaatgactgacatcatcactttgtttggtctcagttctaattccaaaaagtaattccactggagctgctgggaaggaaaacgagctcttctgatgcaaaccaaatgaaaaataggcattaatcctgaccttagctcgggatgaaacactgctcttaaaaaaactcagttttccttccagaaaatgtgggtgtttttttttcctagaacagtatctctcccctgtgaagcataaccccactacttccagacttgccctcccttgggggacatctgataaagtctcccctgatgtctccgcatcggcttggatttattaagggatgcaaatcttgttgagttaatgaaggaattagtagggttgtggcttcacacacagtggaatggaaatggtgtgctttctcagtggcaaccgaaggcctagtgcttaagggcatttagcatcatccaagcagggtaaacttttgttttgttaaaagaaaaatgtgttattcaagttggtgtccccagttgtagctaacacatctggaatgcactaaccaaaatgctgtgctttggagacctgcttttgtcaccgtgggtaaccgttcccgtctggtccagtagcctgtgtttgcctctccacatttgaagcaagcaggatgcaaggtcttcagttttactgaccttgtatgtcttcaagtcttcacaacccagtgccttaaaaatgaaaggccctaaatgtaagggagatggagagaaagatttattttgtagagtctttgggtggaattgtgggtatactgttcccttcacaattgactgagtatggataaccgtacataagcatttgctacaccccaccagccccctccccctcagaaacaccagttccttcccaagggcagctgtgccagactcccctcccgggactgccttcttgtcatcataagcaacaaaagaaataacaggcacatgtcataaaaggggagcaagggccgtgatggtcagataattcactcaagaataaaacatgacacgtgcctcaggaggatctctttcccaaagtgacagcaaggagggcagggcatcggccaccaagcggggactagcaagtgaggaaggggagggcagcccaccgtggtgaggagagagtggctccacgaccccaagggatggccttctcctcccacccggtgaggggaaagactcaccagagggtgatggagacagtatgccggctcaccttggtgaccagccaagatgtctcaagtgacagtgctaggtgttcacccagcctgtccttcagataggagtgccttcacgaaagcgtctcatggaccacaaagcaattatgcactgagtcatcttcagtatttaatgcaaaaatgaagcatcatggaatgaaattcccactgtctgtcatgacaagcttagctgtccattgttttaaattgtgtatttatttttttgaccacttggttctagttgggcctgactccttcagagtgctgcaccccgatagtacaacagcgatggctgaactgttggagtcgatggaaggtgcttgccggagaacacgtgcctttttttttttttttttttttgagatggagtttcactcttcctgggcgacagagcgagactccgtctaaaaaaaaaagcaaaaacaaaccaacaacaaaagcccctgactgtccgtcaagcaggcagcggggatgtagctctctctgccctgggcaagaatagcacttcccgttaaaagccagcagccggcgtcagtccctatcagagccagctagatcatgcactgttgaccactgagcaatctgtgttacactagagttcacagggcattttgagtgtagacgtgagtgcttaaacatatttgggtttctctctcaggttttaaatgtttcaaatgtaattgttgctcatcagtgcagttatcaatgcaattttatattccttgaggggagaaagaggggtcttattgtacatgtccaaggggggtgataagagtattatctgtttaatttaattggaacaaaccattgtcttaacgcagccatggtttgaatttgttatcttgggctgaccggtgcatgtaaatacagtatgctctttggatgtaaatcttagaaatgcagtgtgaatgtaggttatcattaataaaacattaaccccagtcta

SEQ ID NO: 284848 - DNA, 2382 bp, Artificial Sequence
  derived and/or modified sequence
ctccttctccttccaggtactctctgaagatggcagaagctcaccaagctgtggcctttcagttcacggtcactccggacgggattgacctgcggctgagccatgaagctcttagacaaatctatctctctggacttcattcctggaaaaagaagttcatcagattcaagaacggcatcatcactggcgtgtacccggcaagcccctccagttggcttatcgtggtggtgggcgtgatgacaacgatgtacgccaagatcgacccctcgttaggaataattgcaaaaatcaatcggactctggaaacggccaactgcatgtccagccagacgaagaacgtggtcagcggcgtgctgtttggcaccggcctgtgggtggccctcatcgtcaccatgcgctactccctgaaagtgctgctctcctaccacgggtggatgttcactgagcacggcaagatgagtcgtgccaccaagatctggatgggtatggtcaagatcttttcaggccgaaaacccatgttgtacagcttccagacatcgctgcctcgcctgccggtcccggctgtcaaagacactgtgaacaggtatctacagtcggtgaggcctcttatgaaggaagaagacttcaaacggatgacagcacttgctcaagattttgctgtcggtcttggaccaagattacagtggtatttgaagttaaaatcctggtgggctacaaattacgtgagcgactggtgggaggagtacatctacctccgaggacgagggccgctcatggtgaacagcaactattatgccatggatctgctgtatatccttccaactcacattcaggcagcaagagccggcaacgccatccatgccatcctgctttacaggcgcaaactggaccgggaggaaatcaaaccaattcgtcttttgggatccacgattccactctgctccgctcagtgggagcggatgtttaatacttcccggatcccaggagaggagacagacaccatccagcacatgagagacagcaagcacatcgtcgtgtaccatcgaggacgctacttcaaggtctggctctaccatgatgggcggctgctgaagccccgggagatggagcagcagatgcagaggatcctggacaatacctcggagcctcagcccggggaggccaggctggcagccctcaccgcaggagacagagttccctgggccaggtgtcgtcaggcctattttggacgtgggaaaaataagcagtctcttgatgctgtggagaaagcagcgttctttgtgacgttagatgaaactgaagaaggatacagaagtgaagacccggatacgtcaatggacagctacgccaaatctctactacacggccgatgttacgacaggtggtttgacaagtcgttcacgtttgttgtcttcaaaaacgggaagatgggcctcaacgctgaacactcctgggcagatgcgccgatcgtggcccacctttgggagtacgtcatgtccattgacagcctccagctgggctatgcggaggatgggcactgcaaaggcgacatcaatccgaacattccgtaccccaccaggctgcagtgggacatcccgggggaatgtcaagaggttatagagacctccctgaacaccgcaaatcttctggcaaacgacgtggatttccattccttcccattcgtagcctttggtaaaggaatcatcaagaaatgtcgcacgagcccagacgcctttgtgcagctggccctccagctggcgcactacaaggacatgggcaagttttgcctcacatacgaggcctccatgacccggctcttccgagaggggaggacggagaccgtgcgctcctgcaccactgagtcatgcgacttcgtgcgggccatggtggacccggcccagacggtggaacagaggctgaagttgttcaagttggcgtctgagaagcatcagcatatgtatcgcctcgccatgaccggctctgggatcgatcgtcacctcttctgcctttacgtggtgtctaaatatctcgctgtggagtcccctttccttaaggaagttttatctgagccttggagattatcaacaagccagacccctcagcagcaagtggagctgtttgacttggagaataacccagagtacgtgtccagcggagggggctttggaccggttgctgatgacggctatggtgtgtcgtacatccttgtgggagagaacctcatcaatttccacatttcttccaagttctcttgccctgagacggattctcatcgctttggaaggcacctgaaagaagcaatgactgacatcatcactttgtttggtctcagttctaattccaaaaagtaattccactggagctgctgggaaggaaaacgag

SEQ ID NO: 284849 - DNA, 2322 bp, Artificial Sequence
  derived and/or modified sequence
atggccgaggcccaccaggccgtggccttccagttcaccgtgacccccgacggcatcgacctgagactgagccacgaggccctgagacagatctacctgagcggcctgcacagctggaagaagaagttcatcagattcaagaacggcatcatcaccggcgtgtaccccgccagccccagcagctggctgatcgtggtggtgggcgtgatgaccaccatgtacgccaagatcgaccccagcctgggcatcatcgccaagatcaacagaaccctggagaccgccaactgcatgagcagccagaccaagaacgtggtgagcggcgtgctgttcggcaccggcctgtgggtggccctgatcgtgaccatgagatacagcctgaaggtgctgctgagctaccacggctggatgttcaccgagcacggcaagatgagcagagccaccaagatctggatgggcatggtgaagatcttcagcggcagaaagcccatgctgtacagcttccagaccagcctgcccagactgcccgtgcccgccgtgaaggacaccgtgaacagatacctgcagagcgtgagacccctgatgaaggaggaggacttcaagagaatgaccgccctggcccaggacttcgccgtgggcctgggccccagactgcagtggtacctgaagctgaagagctggtgggccaccaactacgtgagcgactggtgggaggagtacatctacctgagaggcagaggccccctgatggtgaacagcaactactacgccatggacctgctgtacatcctgcccacccacatccaggccgccagagccggcaacgccatccacgccatcctgctgtacagaagaaagctggacagagaggagatcaagcccatcagactgctgggcagcaccatccccctgtgcagcgcccagtgggagagaatgttcaacaccagcagaatccccggcgaggagaccgacaccatccagcacatgagagacagcaagcacatcgtggtgtaccacagaggcagatacttcaaggtgtggctgtaccacgacggcagactgctgaagcccagagagatggagcagcagatgcagagaatcctggacaacaccagcgagccccagcccggcgaggccagactggccgccctgaccgccggcgacagagtgccctgggccagatgcagacaggcctacttcggcagaggcaagaacaagcagagcctggacgccgtggagaaggccgccttcttcgtgaccctggacgagaccgaggagggctacagaagcgaggaccccgacaccagcatggacagctacgccaagagcctgctgcacggcagatgctacgacagatggttcgacaagagcttcaccttcgtggtgttcaagaacggcaagatgggcctgaacgccgagcacagctgggccgacgcccccatcgtggcccacctgtgggagtacgtgatgagcatcgacagcctgcagctgggctacgccgaggacggccactgcaagggcgacatcaaccccaacatcccctaccccaccagactgcagtgggacatccccggcgagtgccaggaggtgatcgagaccagcctgaacaccgccaacctgctggccaacgacgtggacttccacagcttccccttcgtggccttcggcaagggcatcatcaagaagtgcagaaccagccccgacgccttcgtgcagctggccctgcagctggcccactacaaggacatgggcaagttctgcctgacctacgaggccagcatgaccagactgttcagagagggcagaaccgagaccgtgagaagctgcaccaccgagagctgcgacttcgtgagagccatggtggaccccgcccagaccgtggagcagagactgaagctgttcaagctggccagcgagaagcaccagcacatgtacagactggccatgaccggcagcggcatcgacagacacctgttctgcctgtacgtggtgagcaagtacctggccgtggagagccccttcctgaaggaggtgctgagcgagccctggagactgagcaccagccagaccccccagcagcaggtggagctgttcgacctggagaacaaccccgagtacgtgagcagcggcggcggcttcggccccgtggccgacgacggctacggcgtgagctacatcctggtgggcgagaacctgatcaacttccacatcagcagcaagttcagctgccccgagaccgacagccacagattcggcagacacctgaaggaggccatgaccgacatcatcaccctgttcggcctgagcagcaacagcaagaagtag

SEQ ID NO: 284850 - protein, 756 aa, Artificial Sequence
  derived and/or modified sequence
MAEAHQAVAFQFTVTPDGIDLRLSHEALRQIYLSGLHSWKKKFIRFKNGIITGVYPASPSSWLIVVVGVMTTMYAKIDPSLGIIAKINRTLETANCMSSQTKNVVSGVLFGTGLWVALIVTMRYSLKVLLSYHGWMFTEHGKMSRATKIWMGMVKIFSGRKPMLYSFQTSLPRLPVPAVKDTVNRYLQSVRPLMKEEDFKRMTALAQDFAVGLGPRLQWYLKLKSWWATNYVSDWWEEYIYLRGRGPLMVNSNYYAMDLLYILPTHIQAARAGNAIHAILLYRRKLDREEIKPIRLLGSTIPLCSAQWERMFNTSRIPGEETDTIQHMRDSKHIVVYHRGRYFKVWLYHDGRLLKPREMEQQMQRILDNTSEPQPGEARLAALTAGDRVPWARCRQAYFGRGKNKQSLDAVEKAAFFVTLDETEEGYRSEDPDTSMDSYAKSLLHGRCYDRWFDKSFTFVVFKNGKMGLNAEHSWADAPIVAHLWEYVMSIDSLQLGYAEDGHCKGDINPNIPYPTRLQWDIPGECQEVIETSLNTANLLANDVDFHSFPFVAFGKGIIKKCRTSPDAFVQLALQLAHYKDMGKFCLTYEASMTRLFREGRTETVRSCTTESCDFVRAMVDPAQTVEQRLKLFKLASEKHQHMYRLAMTGSGIDRHLFCLYVVSKYLAVESPFLKEVLSEPWRLSTSQTPQQQVELFDLENNPEYVSSGGGFGPVADDGYGVSYILVGENLINFHISSKFSCPETGIISQGPSSDT

SEQ ID NO: 284851 - DNA, 2271 bp, Artificial Sequence
  derived and/or modified sequence
atggccgaagcccaccaagctgtcgcctttcaattcacagtgacgccagacggcatcgaccttaggttgagccacgaagcacttaggcagatttacctgtcagggcttcacagttggaagaagaagtttataaggttcaaaaatggcattattaccggcgtgtacccagccagccccagttcttggcttatcgtggtggttggtgtcatgacaacaatgtatgctaagatcgatccatccctcggtattatagccaagatcaatcgcacacttgagactgctaactgtatgtcgtcccagaccaagaacgtggtctcaggggtactattcggcaccggcctgtgggtcgcccttatcgtcaccatgcgctactctctgaaggtcctgcttagctatcatggatggatgtttacggaacacggaaaaatgagccgcgctacaaagatatggatggggatggttaagatcttttccggtcgcaaacccatgctgtacagtttccaaacatccttgcctaggttacctgttccagcagtaaaagatacagtcaaccgatatttacagagcgtgagacctcttatgaaggaggaagatttcaaaaggatgactgcactggctcaggacttcgcagttggactcggaccgaggctgcagtggtatcttaagctgaagagttggtgggcaactaattacgtgagcgactggtgggaggaatatatttacctgcgcggtaggggcccgctgatggtgaactccaattattatgctatggacctattgtatatcctgcctactcacatccaggcggcgcgggcaggcaatgcgatccatgcaattctgctgtaccggagaaaattagatcgtgaggaaatcaagcccatcagactgctaggctccactattcccctttgtagtgctcagtgggagcggatgtttaatacctcaagaattcccggagaggagacggatacaattcagcatatgcgggactcaaagcatatcgtggtctatcaccgaggtcgctattttaaggtttggctgtaccacgacgggagactgctcaagccccgtgagatggaacagcagatgcaaaggatcctggacaatacgtctgagccccagcccggggaagcaaggttggccgcattaacagccggcgaccgtgttccatgggctcgctgtagacaggcttactttggccggggaaagaacaagcagtctttggatgccgtagagaaggcagcattttttgtgaccctggacgaaaccgaggaaggatatcgatccgaggatcccgacacctctatggacagctatgcgaagtctctgttgcacggtcgctgttacgaccggtggtttgataaatcattcactttcgttgtgttcaaaaacggtaagatgggtctgaatgcagaacattcatgggctgacgccccaatcgtcgcacatttgtgggaatacgtgatgtctatcgatagtttgcaactcggctatgcagaggatgggcattgtaaaggggatatcaaccctaatatcccttaccctacacgcctccaatgggacatccccggggaatgtcaagaggtgatcgagacaagcctgaacacggccaacctcctcgccaatgatgtggattttcatagttttccattcgttgcattcggtaagggtattatcaagaagtgtcggacctccccagatgccttcgtccagcttgccctgcagctggcacactacaaagacatgggcaaattttgtctgacctatgaagcgagcatgacgaggctttttcgggagggacgcaccgagaccgtcaggtcttgcaccacagagtcttgcgacttcgtccgggctatggttgatcctgcacaaactgtggagcagcgcctcaaactttttaagctcgcctccgaaaagcatcagcatatgtaccggttggcaatgactggttccggcatcgaccggcatcttttttgcctgtacgtcgtgtcaaagtatctggccgttgaaagcccgttcctcaaggaagtgctgtccgaaccatggagactatcaacttcccagacaccacaacaacaggtggagcttttcgacctggagaacaatcctgagtatgtgtcctccggcggagggttcggccccgtagcagatgatggttatggagtctcttacatcctggtgggcgaaaacctgatcaattttcatatttcttcgaagttctcatgccctgagaccggaattatcagtcagggcccgtcctcggacacctag

SEQ ID NO: 284852 - DNA, 2271 bp, Artificial Sequence
  derived and/or modified sequence
atggctgaggcccatcaggcagtggctttccagttcactgtcacccccgacgggatagatctgaggttgtctcacgaggctctgagacagatctacctaagcggccttcattcatggaaaaaaaagttcattcgcttcaagaacgggattatcaccggagtgtaccctgcgtctccgagcagctggttgatcgtagtcgtgggcgtcatgacaacaatgtatgccaagatcgatccttctctagggatcattgccaagattaaccgcacattggaaacagccaactgcatgagttcccagaccaagaatgtggtctccggtgttctgttcggcacaggcctttgggtggcactgatcgtcaccatgcgatactccctaaaagtgttactgtcgtaccatggatggatgttcacggaacacggcaagatgagcagggctactaaaatttggatgggcatggtgaaaatattcagtggaagaaagcctatgctgtatagttttcagacttcactcccacgcctgcccgttccggcagtgaaggataccgtgaacagatacctccagagtgtgcgtcctcttatgaaggaagaagatttcaaacgcatgaccgcgctggcccaggacttcgcggtaggactcggtcctaggttacaatggtacctcaaattgaaatcatggtgggcaacaaactatgtcagcgattggtgggaggagtatatctacctgcgcgggcgaggcccactgatggtgaattcaaattattatgccatggatctattatatatactccccacacacatacaggcggccagggctggcaacgccattcatgcaatcctcttatacagacggaagctcgatagggaagaaataaagcctatccgattgttgggcagcacaatccccctgtgcagcgcgcagtgggagcgtatgtttaatacctcacgaatccctggtgaggagacagatacaatacaacacatgcgcgacagtaagcatatcgttgtgtaccaccggggaaggtactttaaggtctggctttaccacgacggtcgccttctgaagcctcgggaaatggaacaacaaatgcaaaggattctggacaatactagcgagccacagcctggtgaagccaggctggcagcactgactgccggagacagagtgccttgggcccgctgtaggcaagcctactttggaaggggcaagaataaacaaagcctggacgctgtagagaaggctgcgtttttcgtgaccctggacgaaaccgaagagggttatcgtagcgaggaccccgatactagtatggactcatatgccaagtctctgttgcatggccggtgctacgatagatggttcgataagtccttcaccttcgtggtgtttaaaaatggcaaaatgggactgaatgccgagcattcctgggctgacgctccaattgtggctcacttgtgggaatatgtaatgtccatcgattcccttcaattagggtatgccgaagacgggcattgtaagggcgacataaatccaaatattccttacccaacccggctccagtgggatattcctggagagtgtcaggaggtgatcgagacgtctctaaatacagccaatctcctcgctaatgacgtggactttcatagctttccttttgtcgcctttggcaagggtatcatcaaaaaatgcagaacatcgcccgacgccttcgtacagcttgcacttcagctggctcactacaaggacatggggaagttttgcctgacatacgaggccagtatgactaggctatttcgcgaaggaaggacagagaccgtgcgatcgtgcaccactgaaagttgcgatttcgtgcgcgccatggttgatccagcccagaccgtggagcagagattaaagctcttcaagcttgctagtgagaagcaccagcatatgtaccgactcgctatgactggatctggcatcgataggcatctgttctgcctctacgtggttagtaaatatctggctgttgagtctccatttttaaaagaggtgctgtctgaaccttggcgactgtccactagccagactccgcagcagcaggtggaactttttgatcttgagaataatcctgaatacgtcagctccggtggaggttttgggcccgtagccgatgacggctacggggtaagctatattctggtgggagagaacttgatcaattttcatataagctctaagttcagttgcccagagacgggcatcatcagtcaaggtccaagctctgatacatag

SEQ ID NO: 284853 - DNA, 2271 bp, Artificial Sequence
  derived and/or modified sequence
atggccgaggcccaccaggccgtggccttccagttcaccgtgaccccagatggcatcgacctgcggctgagccatgaggccctgcggcagatctacctgagcggcctgcacagctggaagaagaagttcatccgcttcaagaatggcatcatcaccggggtgtacccagccagccccagctcctggctgattgtggtggtgggcgtgatgaccaccatgtatgccaagattgaccccagcctgggcatcatcgccaagatcaacagaaccctggagacagccaactgcatgagcagccagaccaagaatgtggtgtctggagtgctgtttggcaccggcctgtgggtggccctgattgtgaccatgagatacagcctgaaggtgctgctgagctaccacggctggatgttcacagagcacggcaagatgagccgggccaccaagatctggatgggcatggtgaagatcttcagcggcaggaagcccatgctgtacagcttccagaccagcctgccccggctgcctgtgcctgctgtgaaggacacagtgaaccgctacctgcagagcgtgcggcccctgatgaaggaggaggacttcaagaggatgacagccctggcccaggactttgctgtgggcctgggcccccggctgcagtggtacctgaagctgaagtcctggtgggccaccaactacgtgtctgactggtgggaggagtacatctacctgcggggccggggccccctgatggtgaacagcaactactatgccatggacctgctgtacatcctgcccacccacatccaggccgcccgggctggaaatgccatccacgccatcctgctgtacagaaggaagctggaccgggaggagatcaagcccatccggctgctgggcagcaccatccccctgtgcagcgcccagtgggagaggatgttcaacaccagccgcatccctggagaggagacagacaccatccagcacatgagggacagcaagcacatcgtggtgtaccaccggggccgctacttcaaggtgtggctgtaccatgatggccgcctgctgaagccccgggagatggagcagcagatgcagaggatcctggacaacaccagcgagccccagcctggagaggcccggctggccgccctgacagctggggacagagtgccctgggcccgctgccggcaggcctacttcggccggggcaagaacaagcagagcctggatgctgtggagaaggccgccttctttgtgaccctggatgaaacagaggagggctacagaagtgaggaccctgacacctccatggacagctatgccaagagcctgctgcacggccgctgctatgaccgctggtttgacaagagcttcacctttgtggtgttcaagaatggcaagatgggcctgaatgctgagcacagctgggcagatgcccccatcgtggcccacctgtgggagtatgtgatgagcattgacagcctgcagctgggctatgcagaagatggccactgcaagggggacatcaaccccaacatcccctaccccacccggctgcagtgggacatccctggagagtgccaggaggtgattgagaccagcctgaacacagccaacctgctggccaatgatgtggacttccacagcttcccctttgtggccttcggcaagggcatcatcaagaagtgcaggaccagcccagatgcctttgtgcagctggccctgcagctggcccactacaaggacatgggcaagttctgcctgacctatgaggcctccatgaccaggctcttccgggagggccgcacagagaccgtgcgcagctgcaccacagagagctgtgactttgtgcgggccatggtggaccctgcccagacagtggagcagaggctgaagctgttcaagctggccagcgagaagcaccagcacatgtaccgcctggccatgactggaagtggcatcgacagacacctgttctgcctgtatgtggtgtccaagtacctggccgtggagagccccttcctgaaggaggtgctgtctgagccctggaggctgagcaccagccagaccccccagcagcaggtggagctgtttgacctggagaacaacccagaatatgtgagcagcggcggcggcttcggccctgtggctgatgatggctacggcgtgtcctacatcctggtgggagaaaatctcatcaacttccacatcagcagcaagttcagctgcccagagaccggcatcatcagccagggccccagcagtgacacctag

SEQ ID NO: 284854 - DNA, 2271 bp, Artificial Sequence
  derived and/or modified sequence
atggccgaggcccaccaggccgtggccttccagttcaccgtgacccccgacggcatcgaccttcgcctaagccacgaggctctccgacagatttatctgtcagggctgcactcctggaaaaaaaagtttattcggtttaagaatggaattatcactggagtgtaccctgcttctccttcctcttggcttatcgttgtcgttggagttatgacaactatgtacgctaaaatcgatccctcactggggatcattgcgaagatcaatagaacactcgagaccgctaattgtatgtcctcccaaaccaagaatgtagttagcggcgtcctgttcggtaccgggctgtgggtggcacttatcgtgacaatgcggtattctttgaaggtgttattgagctatcacggctggatgtttaccgagcacgggaaaatgtcccgcgccacaaaaatatggatgggcatggtcaagatctttagtggccgcaagcctatgttgtacagcttccagacaagcctcccccgtctgcccgtgcctgctgtaaaagacacagtgaaccgatatctgcagagcgtacggcctctgatgaaggaagaggattttaagcggatgacagccctggctcaagacttcgcagtggggttgggacccagactacagtggtaccttaaactgaagagttggtgggccactaattatgtgagcgactggtgggaagagtacatttatttgcggggaagaggtccactaatggttaattccaactactacgccatggatctattatacatattacctacacatatccaagccgcccgggcgggaaacgcaatacatgctatattgttgtaccgtcggaagttggacagggaggaaattaaaccgatcaggctgctcggatctaccatccctttatgctctgcacaatgggagcgaatgttcaacacatccagaataccaggcgaggaaaccgacaccattcaacacatgagagattctaagcatatcgtagtctaccaccgggggagatacttcaaagtgtggctctaccacgatggtcggcttctgaaacctcgggagatggagcagcagatgcagcggattctcgacaatacaagcgagccgcagcccggcgaagctcgactcgccgctcttaccgcgggggaccgggtcccctgggctcgatgccggcaggcatacttcggccgcggtaaaaataagcagtccctcgacgctgtggaaaaggcagccttctttgttaccctggacgaaaccgaggaaggctataggtcagaagatcctgacacctcgatggatagctacgcaaagtcacttctccacggtcgatgctatgacaggtggttcgataagtcatttactttcgtcgtatttaagaatggcaagatgggcctgaacgccgaacactcttgggccgacgctcccattgtggctcacctgtgggaatacgtgatgtctatcgattccttacagctcggctatgctgaggatggtcattgcaagggtgacattaacccgaacatcccctatccgactcggctgcagtgggacatacccggagagtgtcaagaagtaatcgagacctccttgaacacagccaacctgctggcaaatgatgtggatttccactctttcccatttgtcgcatttggcaaagggattatcaaaaaatgtaggacatcaccagacgcgttcgtgcagctggccctccagctggcacattataaagacatggggaaattttgcctgacgtacgaagctagcatgacccggctgttccgcgagggtcgtacagaaaccgtccgttcttgcaccaccgagagctgtgattttgtccgagccatggtcgaccctgcccagaccgttgaacagcggcttaagttgttcaaactcgccagcgagaagcaccaacacatgtaccgcctggccatgacaggctccggcatcgacaggcaccttttctgcctttacgttgtaagcaaatatctcgcagtggaatcccccttcctgaaagaagtcctgtccgagccatggcgactctcgacatcacagacccctcagcagcaagttgaactgttcgatttagagaataatcccgagtacgtgagcagtggcggtgggtttgggcctgtggcagacgacggctacggtgtaagttatatattggttggagaaaatctgatcaacttccatatcagcagcaaattttcctgtcccgaaactggcataatttctcagggtcctagcagcgacacctag

SEQ ID NO: 284855 - DNA, 2271 bp, Artificial Sequence
  derived and/or modified sequence
atggccgaggcccaccaggccgtggccttccagttcaccgtgacccctgatggtatcgatcttaggttgagccacgaggccctccggcagatctacctgtctggcctacactcctggaaaaagaaatttatacggttcaagaatgggattataactggcgtgtatccggccagtccatcctcttggctgatagtcgtagttggtgtgatgacaaccatgtatgctaagattgaccccagcctgggcatcatcgcgaagatcaatagaactttggagacagccaactgcatgtcctcacagactaagaatgtggtcagtggcgtcttgttcggtactggactatgggtagcactgattgttaccatgcggtacagcctcaaggtcttattgtcgtaccacgggtggatgtttaccgaacacggtaaaatgtcacgggccactaaaatctggatggggatggttaagattttttcgggccggaagcccatgttgtatagctttcagacaagtctgcctagactcccagtgcctgctgtgaaggatactgtgaatcggtatctccagagtgtgagacctctcatgaaagaagaggattttaagaggatgaccgctcttgctcaggattttgccgttgggcttggccctcggctgcagtggtacctgaaactcaagagctggtgggcaactaattacgtcagtgattggtgggaggaatacatctatttaaggggccggggcccgctaatggtgaattccaattattatgcaatggacctgctgtatatcttacctacgcatatacaggccgccagggcaggcaatgctatacacgccatcctgctttatcgacgcaagctagatcgcgaggaaatcaaaccaatccgactgcttggatctacaatcccactttgttccgcccagtgggagagaatgtttaacacatctaggatccccggggaggaaactgatacgattcagcacatgagggacagtaagcacattgttgtctatcacagaggaaggtacttcaaggtatggctataccacgacgggcggctcctcaagcctcgggagatggagcagcagatgcagaggatcctggacaacacctcggaacctcagcctggcgaagcacggctcgccgctctgacggctggcgatagagttccttgggcccggtgccgccaggcctattttggacggggcaagaataaacagtcactcgacgctgttgagaaggccgccttcttcgtaactctggacgagacagaagaaggttataggtccgaggaccccgacacctccatggatagctatgccaagtccctactgcacggccggtgctatgataggtggttcgataagagcttcacctttgtagtgtttaaaaatgggaagatgggactcaatgccgagcatagctgggccgacgcccctatcgtcgcccatctttgggaatatgtcatgtcaattgacagcctgcagcttgggtacgcggaggatggccactgcaagggggacatcaaccctaatatcccatacccaactcgcctgcagtgggatattcccggagagtgtcaggaggtgattgaaaccagtctgaacaccgctaatctgctggctaacgacgtcgatttccacagcttccctttcgtcgccttcggcaaggggatcatcaaaaaatgtaggacttcccccgatgcctttgttcaactcgctctccagttagcccactataaggacatgggcaagttttgtctgacctatgaagccagcatgacaaggctgtttagagaaggccggactgaaactgtcagaagctgtactactgaatcatgcgactttgtaagagcaatggtggaccccgctcagacagttgaacagcgcctcaagcttttcaaactcgcctctgagaaacatcagcacatgtatcgcctggcaatgaccggctctgggatcgataggcatctgttctgcctttacgtggtgagtaagtaccttgccgtggagtcacccttcctgaaggaggttctgtctgaaccttggcgcctgtcgacttcccagaccccccagcagcaggtcgagcttttcgacttggaaaacaacccagagtacgtgtcatccggtggggggtttggacctgtggcagatgacggatatggtgttagctatattctggtcggtgagaacctgattaactttcatatctccagtaagtttagttgtccagaaactgggataattagccagggtcccagctccgatacctag

SEQ ID NO: 284856 - DNA, 2271 bp, Artificial Sequence
  derived and/or modified sequence
atggcagaagctcatcaggctgtggccttccagttcacagtgacccctgatggaatagacctgcgactttctcatgaagcactcagacagatttatctctctggactccacagctggaagaaaaaattcatccggttcaagaacgggattattacaggcgtatatcctgcatccccaagtagctggcttatagtggtggtcggagtgatgacgaccatgtacgcaaaaatcgatccttcactcgggatcatcgctaaaatcaataggaccctggaaactgctaattgcatgagttcccagaccaagaatgtagtgtccggcgttctcttcggaacaggattgtgggtcgccttaattgtcacaatgagatacagcctgaaggtactattgtcctatcacggatggatgttcaccgaacacggcaaaatgagtcgtgcgacgaagatttggatgggcatggtgaaaatatttagcggcaggaagccaatgctctactcatttcagaccagtctccctcgactccccgtgcccgcagtgaaagacactgtcaacaggtacctccagtcagtgcgcccactgatgaaggaagaggactttaaaagaatgactgctctggcccaggacttcgcagttgggctgggccctcgactccagtggtaccttaaattgaaatcatggtgggcaactaactacgtgagtgactggtgggaggagtatatctacctgagggggcgaggcccacttatggtcaactctaattattatgctatggaccttttatacatactgcctacgcatatccaggcagctagggccggaaacgccatacatgcaatcctcttgtacagacggaaattggatagagaggagatcaagccgattcggctcctggggagcacaataccgttgtgcagcgcgcagtgggagcgaatgtttaatacatccagaatccccggagaagagactgacacaatccaacacatgagggattctaaacatatcgtggtctaccatcgtggcaggtacttcaaagtttggctataccacgatgggaggctgctgaagcctagagagatggagcagcagatgcagagaatcctagataacaccagcgagcctcagcccggtgaagccaggttggctgcccttacagccggagacagggtaccatgggctagatgccgccaagcatactttggaagaggtaaaaacaagcagtctctggacgctgtcgaaaaagcggctttttttgtcactctggatgagacagaggagggataccggagcgaagatccggacacctctatggactcttacgctaaaagcctgttgcatggtcggtgttacgaccgttggttcgacaagagtttcacgttcgtggtctttaagaacgggaagatgggacttaatgctgagcactcatgggcagacgctccaatagtggcccatctgtgggagtacgttatgtcgattgactccctccagctgggctacgctgaggacggacactgtaagggggatattaacccaaatatcccatatcccacccggctgcaatgggatattcctggggagtgccaggaggttattgagacttccttgaacacggcaaacctgctggcgaacgatgtagatttccattctttccctttcgtcgcttttggaaaagggatcattaaaaaatgtcgcacttctccagatgcatttgtccagctggcattgcagctagcccactataaagacatgggcaaattctgtctgacatatgaggccagtatgacacgcctttttcgggaggggcgaaccgagacggtgaggtcatgtactacagaaagctgcgatttcgtgagagccatggtggatcctgctcagacagttgaacagcgcctaaaattgttcaaactggcgagcgagaaacaccaacatatgtatcggctagctatgaccgggtcaggtatagaccggcacctgttttgtctttacgtggtgtccaagtacctcgctgtagagtctccatttctgaaagaggtcctctccgaaccgtggcgcctgagtacttcacagactccacagcagcaggttgagttgttcgatctggaaaataacccggagtatgtatctagcggcggagggttcggacccgtggccgacgacgggtatggcgtgagctacatcctggttggggagaatctcatcaactttcatataagcagtaagttttcttgcccagagactgggatcatttcacagggaccttcatctgatacatag

SEQ ID NO: 284857 - DNA, 2271 bp, Artificial Sequence
  derived and/or modified sequence
atggccgaggctcatcaagccgtggcatttcagtttaccgttacaccagacggcattgacctcagactgtcacacgaagctcttcggcagatatatttgtcggggctgcacagctggaagaaaaagttcattcggtttaagaatggcatcatcactggggtgtatcccgcttctccatctagttggcttattgtggtcgttggtgtgatgacaaccatgtatgccaagatcgaccccagtcttggaatcatcgccaagatcaatcgtaccctggagacagcaaattgtatgtcctcacagacgaaaaacgtggtgagcggagtcttgttcgggacgggactctgggtggcgctgattgtgacaatgcgctactcattaaaagtgcttctgagctaccacggatggatgttcacagaacatggaaagatgagccgagctaccaaaatttggatgggcatggtgaagattttctcaggaagaaagcccatgttgtatagttttcagacctctctgcccagactgcctgttccagccgtaaaagacaccgttaatcgctatctgcagtccgtaaggcccctgatgaaggaagaggacttcaagcgtatgacagccctggcacaggacttcgctgttggacttggccctagactccagtggtacctgaaattaaaatcctggtgggctacgaattacgtgagcgactggtgggaagagtatatctatctgagaggaagagggccactgatggtcaacagtaattattacgcaatggatcttctgtatatccttcccacgcacatccaggcagcacgggcaggtaatgccattcacgccattttgctctatagacggaaactcgatagagaggaaatcaaacccatacgactgctgggctctaccatccctctatgttcagcccagtgggagcgtatgtttaacactagccgcattccaggcgaggaaaccgacaccattcaacatatgagagactctaagcatattgtagtgtaccaccggggtcgctacttcaaagtgtggttgtatcacgacggacgcctcctgaaacctagggagatggagcagcagatgcagcgtatcctggacaacacgagcgaaccccaacctggggaggcaaggctcgctgctcttacagcaggtgacagggtgccgtgggctagatgtaggcaggcttattttggtcgcggtaaaaataaacagtcattggacgctgttgagaaagccgctttttttgtgaccctcgacgaaacggaggaaggctatcgctcagaggatcctgacacgagcatggatagttacgctaaatccttactccacggcaggtgctacgataggtggtttgacaagtcattcacctttgtggtgttcaagaatggaaagatgggtctgaacgctgagcactcgtgggcagatgctcctatcgtcgctcacctctgggagtacgttatgagtatagatagcctgcagctggggtacgcagaggacggccactgtaaaggtgacattaaccccaatattccctatcctaccaggttgcagtgggacatccccggagagtgccaagaagtaattgagaccagcctgaacacagctaacttattagcaaatgatgttgattttcactcctttccctttgtggcttttggcaaagggattattaagaagtgcagaacttctccagatgcattcgtgcaactggcactgcagctggctcattacaaagatatggggaagttctgtcttacttacgaggcatcgatgactcgcctcttcagagagggaagaaccgagacagtgagatcatgcaccacagagagctgcgattttgtacgtgcgatggtggatccagcacaaacggtcgagcagagactgaagttgttcaaactcgctagcgaaaaacatcaacacatgtatcgcctggcaatgaccgggagtgggatcgatcggcatctgttctgcctgtacgtggtgagcaagtatctggcagtggaaagcccttttctgaaggaggtccttagcgaaccctggcggctgtcaacatcccaaaccccacaacaacaggtcgagctgtttgatcttgagaataacccggagtacgtgtccagcgggggagggtttggccctgtcgcggacgacggttatggggtttcctatatcttagtcggggagaatctcattaacttccacatttcatcaaagttcagttgtcctgagacaggaattattagccagggaccctccagtgacacctag

SEQ ID NO: 284858 - DNA, 2635 bp, Artificial Sequence
  derived and/or modified sequence
ggacccgcctcagccaatccgctgctgccggcgtcgggtgcgctcggcctcgcccgcggccctccttccccggctcccgctcgccgctcgttcactccaccgccgccgccgccgccgccgctgccgctgccgctgccgcacctccgtagctgactcggtactctctgaagatggcagaagctcaccaagctgtggcctttcagttcacggtcactccggacgggattgacctgcggctgagccatgaagctcttagacaaatctatctctctggacttcattcctggaaaaagaagttcatcagattcaagaacggcatcatcactggcgtgtacccggcaagcccctccagttggcttatcgtggtggtgggcgtgatgacaacgatgtacgccaagatcgacccctcgttaggaataattgcaaaaatcaatcggactctggaaacggccaactgcatgtccagccagacgaagaacgtggtcagcggcgtgctgtttggcaccggcctgtgggtggccctcatcgtcaccatgcgctactccctgaaagtgctgctctcctaccacgggtggatgttcactgagcacggcaagatgagtcgtgccaccaagatctggatgggtatggtcaagatcttttcaggccgaaaacccatgttgtacagcttccagacatcgctgcctcgcctgccggtcccggctgtcaaagacactgtgaacaggtatctacagtcggtgaggcctcttatgaaggaagaagacttcaaacggatgacagcacttgctcaagattttgctgtcggtcttggaccaagattacagtggtatttgaagttaaaatcctggtgggctacaaattacgtgagcgactggtgggaggagtacatctacctccgaggacgagggccgctcatggtgaacagcaactattatgccatggatctgctgtatatccttccaactcacattcaggcagcaagagccggcaacgccatccatgccatcctgctttacaggcgcaaactggaccgggaggaaatcaaaccaattcgtcttttgggatccacgattccactctgctccgctcagtgggagcggatgtttaatacttcccggatcccaggagaggagacagacaccatccagcacatgagagacagcaagcacatcgtcgtgtaccatcgaggacgctacttcaaggtctggctctaccatgatgggcggctgctgaagccccgggagatggagcagcagatgcagaggatcctggacaatacctcggagcctcagcccggggaggccaggctggcagccctcaccgcaggagacagagttccctgggccaggtgtcgtcaggcctattttggacgtgggaaaaataagcagtctcttgatgctgtggagaaagcagcgttctttgtgacgttagatgaaactgaagaaggatacagaagtgaagacccggatacgtcaatggacagctacgccaaatctctactacacggccgatgttacgacaggtggtttgacaagtcgttcacgtttgttgtcttcaaaaacgggaagatgggcctcaacgctgaacactcctgggcagatgcgccgatcgtggcccacctttgggagtacgtcatgtccattgacagcctccagctgggctatgcggaggatgggcactgcaaaggcgacatcaatccgaacattccgtaccccaccaggctgcagtgggacatcccgggggaatgtcaagaggttatagagacctccctgaacaccgcaaatcttctggcaaacgacgtggatttccattccttcccattcgtagcctttggtaaaggaatcatcaagaaatgtcgcacgagcccagacgcctttgtgcagctggccctccagctggcgcactacaaggacatgggcaagttttgcctcacatacgaggcctccatgacccggctcttccgagaggggaggacggagaccgtgcgctcctgcaccactgagtcatgcgacttcgtgcgggccatggtggacccggcccagacggtggaacagaggctgaagttgttcaagttggcgtctgagaagcatcagcatatgtatcgcctcgccatgaccggctctgggatcgatcgtcacctcttctgcctttacgtggtgtctaaatatctcgctgtggagtcccctttccttaaggaagttttatctgagccttggagattatcaacaagccagacccctcagcagcaagtggagctgtttgacttggagaataacccagagtacgtgtccagcggagggggctttggaccggttgctgatgacggctatggtgtgtcgtacatccttgtgggagagaacctcatcaatttccacatttcttccaagttctcttgccctgagacggggattataagtcaaggaccaagttcagatacttgagacaaagtggaaagtctcagcatatggaaacaaggccttggaggagaccatggacatcaccaagttcatgtgctgggctggaaagaaaagcctgttgattttcacttgctgtgcatttattcatccattccattgcctcaatgctgagaacagtgcctgacacataaaagatgctcaataaatatgttaaaagt

SEQ ID NO: 284859 - DNA, 2496 bp, Artificial Sequence
  derived and/or modified sequence
ctccttctccttccaggtactctctgaagatggcagaagctcaccaagctgtggcctttcagttcacggtcactccggacgggattgacctgcggctgagccatgaagctcttagacaaatctatctctctggacttcattcctggaaaaagaagttcatcagattcaagaacggcatcatcactggcgtgtacccggcaagcccctccagttggcttatcgtggtggtgggcgtgatgacaacgatgtacgccaagatcgacccctcgttaggaataattgcaaaaatcaatcggactctggaaacggccaactgcatgtccagccagacgaagaacgtggtcagcggcgtgctgtttggcaccggcctgtgggtggccctcatcgtcaccatgcgctactccctgaaagtgctgctctcctaccacgggtggatgttcactgagcacggcaagatgagtcgtgccaccaagatctggatgggtatggtcaagatcttttcaggccgaaaacccatgttgtacagcttccagacatcgctgcctcgcctgccggtcccggctgtcaaagacactgtgaacaggtatctacagtcggtgaggcctcttatgaaggaagaagacttcaaacggatgacagcacttgctcaagattttgctgtcggtcttggaccaagattacagtggtatttgaagttaaaatcctggtgggctacaaattacgtgagcgactggtgggaggagtacatctacctccgaggacgagggccgctcatggtgaacagcaactattatgccatggatctgctgtatatccttccaactcacattcaggcagcaagagccggcaacgccatccatgccatcctgctttacaggcgcaaactggaccgggaggaaatcaaaccaattcgtcttttgggatccacgattccactctgctccgctcagtgggagcggatgtttaatacttcccggatcccaggagaggagacagacaccatccagcacatgagagacagcaagcacatcgtcgtgtaccatcgaggacgctacttcaaggtctggctctaccatgatgggcggctgctgaagccccgggagatggagcagcagatgcagaggatcctggacaatacctcggagcctcagcccggggaggccaggctggcagccctcaccgcaggagacagagttccctgggccaggtgtcgtcaggcctattttggacgtgggaaaaataagcagtctcttgatgctgtggagaaagcagcgttctttgtgacgttagatgaaactgaagaaggatacagaagtgaagacccggatacgtcaatggacagctacgccaaatctctactacacggccgatgttacgacaggtggtttgacaagtcgttcacgtttgttgtcttcaaaaacgggaagatgggcctcaacgctgaacactcctgggcagatgcgccgatcgtggcccacctttgggagtacgtcatgtccattgacagcctccagctgggctatgcggaggatgggcactgcaaaggcgacatcaatccgaacattccgtaccccaccaggctgcagtgggacatcccgggggaatgtcaagaggttatagagacctccctgaacaccgcaaatcttctggcaaacgacgtggatttccattccttcccattcgtagcctttggtaaaggaatcatcaagaaatgtcgcacgagcccagacgcctttgtgcagctggccctccagctggcgcactacaaggacatgggcaagttttgcctcacatacgaggcctccatgacccggctcttccgagaggggaggacggagaccgtgcgctcctgcaccactgagtcatgcgacttcgtgcgggccatggtggacccggcccagacggtggaacagaggctgaagttgttcaagttggcgtctgagaagcatcagcatatgtatcgcctcgccatgaccggctctgggatcgatcgtcacctcttctgcctttacgtggtgtctaaatatctcgctgtggagtcccctttccttaaggaagttttatctgagccttggagattatcaacaagccagacccctcagcagcaagtggagctgtttgacttggagaataacccagagtacgtgtccagcggagggggctttggaccggttgctgatgacggctatggtgtgtcgtacatccttgtgggagagaacctcatcaatttccacatttcttccaagttctcttgccctgagacggggattataagtcaaggaccaagttcagatacttgagacaaagtggaaagtctcagcatatggaaacaaggccttggaggagaccatggacatcaccaagttcatgtgctgggctggaaagaaaagcctgttgattttcacttgctgtgcatttattcatccattccattgcctcaatgctgagaacagtgcctgacacataaaagatgctcaataaatatgttaaaagtaa

SEQ ID NO: 284860 - DNA, 2271 bp, Artificial Sequence
  derived and/or modified sequence
atggccgaggcccaccaggccgtggccttccagttcaccgtgacccccgacggcatcgacctgagactgagccacgaggccctgagacagatctacctgagcggcctgcacagctggaagaagaagttcatcagattcaagaacggcatcatcaccggcgtgtaccccgccagccccagcagctggctgatcgtggtggtgggcgtgatgaccaccatgtacgccaagatcgaccccagcctgggcatcatcgccaagatcaacagaaccctggagaccgccaactgcatgagcagccagaccaagaacgtggtgagcggcgtgctgttcggcaccggcctgtgggtggccctgatcgtgaccatgagatacagcctgaaggtgctgctgagctaccacggctggatgttcaccgagcacggcaagatgagcagagccaccaagatctggatgggcatggtgaagatcttcagcggcagaaagcccatgctgtacagcttccagaccagcctgcccagactgcccgtgcccgccgtgaaggacaccgtgaacagatacctgcagagcgtgagacccctgatgaaggaggaggacttcaagagaatgaccgccctggcccaggacttcgccgtgggcctgggccccagactgcagtggtacctgaagctgaagagctggtgggccaccaactacgtgagcgactggtgggaggagtacatctacctgagaggcagaggccccctgatggtgaacagcaactactacgccatggacctgctgtacatcctgcccacccacatccaggccgccagagccggcaacgccatccacgccatcctgctgtacagaagaaagctggacagagaggagatcaagcccatcagactgctgggcagcaccatccccctgtgcagcgcccagtgggagagaatgttcaacaccagcagaatccccggcgaggagaccgacaccatccagcacatgagagacagcaagcacatcgtggtgtaccacagaggcagatacttcaaggtgtggctgtaccacgacggcagactgctgaagcccagagagatggagcagcagatgcagagaatcctggacaacaccagcgagccccagcccggcgaggccagactggccgccctgaccgccggcgacagagtgccctgggccagatgcagacaggcctacttcggcagaggcaagaacaagcagagcctggacgccgtggagaaggccgccttcttcgtgaccctggacgagaccgaggagggctacagaagcgaggaccccgacaccagcatggacagctacgccaagagcctgctgcacggcagatgctacgacagatggttcgacaagagcttcaccttcgtggtgttcaagaacggcaagatgggcctgaacgccgagcacagctgggccgacgcccccatcgtggcccacctgtgggagtacgtgatgagcatcgacagcctgcagctgggctacgccgaggacggccactgcaagggcgacatcaaccccaacatcccctaccccaccagactgcagtgggacatccccggcgagtgccaggaggtgatcgagaccagcctgaacaccgccaacctgctggccaacgacgtggacttccacagcttccccttcgtggccttcggcaagggcatcatcaagaagtgcagaaccagccccgacgccttcgtgcagctggccctgcagctggcccactacaaggacatgggcaagttctgcctgacctacgaggccagcatgaccagactgttcagagagggcagaaccgagaccgtgagaagctgcaccaccgagagctgcgacttcgtgagagccatggtggaccccgcccagaccgtggagcagagactgaagctgttcaagctggccagcgagaagcaccagcacatgtacagactggccatgaccggcagcggcatcgacagacacctgttctgcctgtacgtggtgagcaagtacctggccgtggagagccccttcctgaaggaggtgctgagcgagccctggagactgagcaccagccagaccccccagcagcaggtggagctgttcgacctggagaacaaccccgagtacgtgagcagcggcggcggcttcggccccgtggccgacgacggctacggcgtgagctacatcctggtgggcgagaacctgatcaacttccacatcagcagcaagttcagctgccccgagaccggcatcatcagccagggccccagcagcgacacctag

SEQ ID NO: 284861 - protein, 791 aa, Artificial Sequence
  derived and/or modified sequence
MQHAFIPASPAPIIVNTDTLDTIPYVNGTEIEYEFEEITLERGNSGLGFSIAGGTDNPHIGDDPGIFITKIIPGGAAAEDGRLRVNDCILRVNEVDVSEVSHSKAVEALKEAGSIVRLYVRRRRPILETVVEIKLFKGPKGLGFSIAGGVGNQHIPGDNSIYVTKIIDGGAAQKDGRLQVGDRLLMVNNYSLEEVTHEEAVAILKNTSEVVYLKVGKPTTIYMTDPYGPPDITHSYSPPMENHLLSGNNGTLEYKTSLPPISPGRYSPIPKHMLVDDDYTRPPEPVYSTVNKLCDKPASPRHYSPVECDKSFLLSAPYSHYHLGLLPDSEMTSHSQHSTATRQPSMTLQRAVSLEGEPRKVVLHKGSTGLGFNIVGGEDGEGIFVSFILAGGPADLSGELQRGDQILSVNGIDLRGASHEQAAAALKGAGQTVTIIAQYQPEDYARFEAKIHDLREQMMNHSMSSGSGSLRTNQKRSLYVRAMFDYDKSKDSGLPSQGLSFKYGDILHVINASDDEWWQARRVMLEGDSEEMGVIPSKRRVERKERARLKTVKFNAKPGVIDSKGDIPGLGDDGYGTKTLRGQEDLILSYEPVTRQEINYTRPVIILGPMKDRINDDLISEFPDKFGSCVPHTTRPKRDYEVDGRDYHFVISREQMEKDIQEHKFIEAGQYNDNLYGTSVQSVRFVAERGKHCILDVSGNAIKRLQVAQLYPIAIFIKPRSLEPLMEMNKRLTEEQAKKTYDRAIKLEQEFGEYFTAIVQGDTLEDIYNQCKLVIEEQSGPFIWIPSKEKL

SEQ ID NO: 284862 - DNA, 2376 bp, Artificial Sequence
  derived and/or modified sequence
atgcaacacgcttttatccctgcgtcgcctgcgcctattatcgtgaatactgacacactggacacaatcccttatgtgaatggaacggaaatcgagtatgagtttgaggagataaccctcgagcgcgggaattccggacttggattctccatcgcaggcggcacagacaacccgcacattggcgacgacccaggaattttcatcaccaaaattatcccaggaggggctgccgccgaagatgggagactccgggttaatgactgcatcttacgcgtaaatgaggtggatgtctccgaggtgtcacactccaaagcagtggaggccttgaaagaagccggctctatcgttagactatacgtccgacgccggcgtccgattctcgagaccgttgttgagataaaactgtttaagggaccaaagggactcggtttcagcatcgcaggaggcgtgggcaatcaacacatcccgggggacaactcaatctacgtgacaaagatcatcgatggtggcgctgcccagaaggatggccgcttgcaggtgggggatagactgttaatggtcaacaattactctctcgaggaggtgacccacgaggaagcggtcgcgatcctgaaaaatacaagcgaggttgtgtatctgaaggtgggcaagcctactactatatacatgacggacccatacggccctccagacattactcacagctattccccgcccatggaaaatcatctgttgagcggtaacaacggtacgttagagtacaagaccagcctgccaccaatctctccagggcggtactcccctattccaaaacacatgcttgttgatgatgattacaccagacctcctgagcccgtatactctaccgtcaacaaactatgcgacaaacccgcatcaccgcgtcattacagcccagtagagtgcgacaagagctttctcctctcggcaccctattcccactaccacctggggctcctgccagacagtgagatgacttcacatagccagcacagtactgctacacgccagccttcaatgacactgcagcgcgcagtgtctttggaaggcgagcctagaaaggtggtcctgcataagggaagcacaggtttggggtttaacattgtcggcggagaggatggtgaaggcatcttcgtgtccttcattctggcaggaggccctgcagacctctcaggagaactgcagagaggtgaccagatcctgtccgttaacggcatcgacctgcgcggagcctcccatgagcaggcagcagccgctctcaagggagcaggacagaccgttaccataatagcccagtaccaaccggaagactacgcccggttcgaggccaagattcatgatttaagggagcagatgatgaaccacagcatgtctagcggcagcggcagcctgagaacaaatcagaaacgctccctgtacgtgcgggctatgtttgattatgacaagtcaaaagatagtgggttaccctcacagggcctctcgttcaagtatggggacatcctgcatgtgataaatgccagcgacgatgagtggtggcaggccagaagagtgatgctcgaaggcgattctgaagaaatgggcgttatccctagcaaacgcagagtcgagaggaaagaaagagcaaggctgaagaccgtgaagttcaacgcgaagccaggcgtaattgattctaagggagacatccccggtcttggggatgatggatatggcactaaaacgttgagggggcaagaagaccttatccttagttacgagcccgtgacccggcaggagattaactacactagaccggtgattattttgggccctatgaaagacagaatcaatgatgatctgatcagcgagttccccgataaatttgggagctgtgtgccacacactactagaccaaaacgggactatgaggtcgacgggagggattatcattttgtgatctcccgggaacagatggaaaaagacatacaggagcacaaatttattgaggcgggccagtacaatgataacctctatgggaccagcgtgcagagcgtgagattcgtggctgaaaggggcaaacactgcatcctagacgttagcggcaatgcaatcaagaggctccaggtagcgcagctgtatcctattgccattttcatcaagcccagaagtttggagccccttatggagatgaataagagactcaccgaagagcaggctaaaaaaacgtatgacagggccatcaagcttgagcaggagtttggtgagtatttcactgccatcgttcagggtgatacactagaagatatctataatcagtgcaagctggtgatcgaggagcaatccggcccattcatctggatcccatctaaagaaaagctatag

SEQ ID NO: 284863 - DNA, 1863 bp, Artificial Sequence
  derived and/or modified sequence
atggtgaacaactatagcctggaagaggtgacccatgaggaggcagtggccatcctgaaaaacactagtgaagttgtttatctgaaagtgggaaaacccaccacaatatacatgaccgacccttacggtccccccgacatcactcactcctacagtccaccgatggaaaatcacctgctgtcaggtaataacgggacgctcgagtacaaaacatccctgcctcccatcagcccgggaaggtattcacccatccctaagcacatgctggtcgatgacgattatacccggcctccagaacccgtgtacagtaccgtgaacaaactctgtgacaagccagcatcaccaaggcactactcccctgttgagtgtgacaagtcctttcttctgtctgccccatattcccactaccacctgggacttctgcctgactctgaaatgacatcccatagtcagcatagcacagcaactaggcagccctccatgacgctccagagggctgtctccctggagggggaaccccgtaaagtcgtattacacaagggatcgactgggttgggattcaacatagtgggaggggaggatggggagggaatttttgtttcctttatacttgccggcggtcccgctgacctgagtggcgagctgcagagaggggatcagatacttagcgttaatggcatagatctacggggggcctcccatgagcaggccgccgccgccctcaagggtgccggacagacggtcacaataattgcccagtaccaacctgaagactatgccagattcgaagctaaaattcacgaccttcgggagcaaatgatgaatcactcgatgagcagcgggagtggatcgctgagaaccaatcaaaaaaggtcattgtatgtgcgggctatgtttgattacgataagtcaaaggactctggtttgcctagccagggcctctcatttaagtacggcgacattctgcatgtcatcaatgcctctgatgatgaatggtggcaagccaggagggtcatgttagagggtgactcagaggagatgggagtcatccccagcaagagaagggttgagagaaaagagagggccagattgaaaaccgtcaaatttaatgcgaagccaggggtgattgactctaaaggagacattccaggactcggcgatgatggctatggcacaaaaaccctgaagcacgtaagtagcaacgcctcagactctgagagcagctaccgcggacaggaagacttgatactgtcgtatgaacctgtgacacggcaggaaattaattacacgaggcctgtcatcattctgggaccgatgaaggatagaattaacgatgacttgatctccgaattccccgataagttcgggagctgtgtcccacacactacacgtccaaaacgtgactatgaagtggacggtcgcgactaccacttcgtgatctctcgggaacagatggaaaaggatatccaagaacacaagtttatcgaagctgggcagtataacgacaatctgtatggcactagtgtgcagtctgtccgcttcgtggcagagcggggaaaacactgcatcttggatgtgtctggcaacgccattaagcggctacaagtggcacagctgtatcctattgccattttcatcaaaccccggtccctcgaacctttgatggaaatgaataagcgccttactgaggagcaggcgaaaaagacctatgaccgcgccatcaaattggagcaggagttcggcgaatacttcactgcaatcgtgcagggggatacacttgaagacatctacaatcaatgcaagctggtgatcgaagagcagtcgggaccattcatctggattccaagtaaagaaaagctgtag

SEQ ID NO: 284864 - DNA, 2376 bp, Artificial Sequence
  derived and/or modified sequence
atgcagcacgccttcatcccagccagccctgcccccatcatcgtgaacacagacaccctggacaccatcccctacgtgaatggaacagaaattgaatatgaatttgaggagatcaccctggagcggggcaacagcggcctgggcttcagcattgctgggggcacagacaacccccacatcggagatgaccccggcatcttcatcaccaagatcatccctggaggagctgctgctgaagatggccgcctgcgggtgaatgactgcatcctgcgggtgaatgaggtggatgtgtctgaggtgagccacagcaaggctgtggaggccctgaaggaggccggcagcatcgtgcggctgtatgtgagaagaagaagacccatcctggagaccgtggtggagatcaagctgttcaagggccccaagggcctgggcttcagcattgctggaggagtgggcaaccagcacatccctggggacaacagcatctacgtgaccaagatcattgatggaggagctgcccagaaggatggccgcctgcaggtgggggaccggctgctgatggtgaacaactacagcctggaggaggtgacccatgaggaggccgtggccatcctgaagaacaccagcgaggtggtgtacctgaaggtgggcaagcccaccaccatctacatgacagacccctacggccccccagacatcacccacagctacagcccccccatggagaaccacctgctgagcggcaacaacggcaccctggagtacaagaccagcctgccccccatcagccctggccgctacagccccatccccaagcacatgctggtggatgatgactacacccggcccccagagcctgtgtacagcacagtgaacaagctgtgtgacaagccagccagccccaggcactacagccctgtggagtgtgacaagagcttcctgctgagcgccccctacagccactaccacctgggcctgctgcctgattctgagatgaccagccacagccagcacagcacagccacccggcagcccagcatgaccctgcagagagctgtgtccctggagggggagcccaggaaggtggtgctgcacaagggcagcacaggcctgggcttcaacatcgtgggcggggaggatggagagggcatctttgtgtccttcatcctggccggcggccctgctgacctgtctggagagctgcagagaggagaccagatcctgtctgtgaatggcatcgacctgcggggggccagccatgagcaggccgccgccgccctgaagggagctggccagacagtgaccatcatcgcccagtaccagcctgaggactatgccaggtttgaggccaagatccatgacctgcgggagcagatgatgaaccacagcatgagcagcggcagcggcagcctgcggaccaaccagaagaggagcctgtatgtgcgggccatgtttgattatgacaagagcaaggacagcggcctgcccagccagggcctgtccttcaagtatggagacatcctgcacgtgatcaatgccagtgatgatgagtggtggcaggccaggagagtgatgctggagggggacagcgaggagatgggcgtcatccccagcaagagaagagtggagaggaaggagcgggcccggctgaagacagtgaagttcaatgccaagccaggagtgattgacagcaagggggacatccctggcctgggagatgatggctacggcaccaagaccctgcggggccaggaggacctgatcctgtcctatgagcctgtgacccggcaggagatcaactacaccaggcctgtgatcatcctgggccccatgaaggaccgcatcaatgatgacctgatcagcgagttcccagacaagtttggcagctgtgtgccccacaccacccggcccaagagggactatgaggtggatggccgggactaccactttgtgatcagccgggagcagatggagaaggacatccaggagcacaagttcatcgaggccggccagtacaatgacaacctgtatggcacctctgtgcagagcgtgcgctttgtggccgagcggggcaagcactgcatcctggatgtgtctggaaatgccatcaagaggctgcaggtggcccagctgtaccccatcgccatcttcatcaagcccaggagcctggagcccctgatggagatgaacaagaggctgacagaggagcaggccaagaagacctatgaccgggccatcaagctggagcaggagtttggagagtacttcaccgccatcgtgcagggcgacaccctggaggacatctacaaccagtgcaagctggtgattgaggagcagagcggccccttcatctggatccccagcaaggagaagctgtag

SEQ ID NO: 284865 - DNA, 1863 bp, Artificial Sequence
  derived and/or modified sequence
atggtgaacaactacagcctggaggaggtgacccatgaggaggccgtggccatcctgaagaacaccagcgaggtggtgtacctgaaggtgggcaagcccaccaccatctacatgacagacccctacggccccccagacatcacccacagctacagcccccccatggagaaccacctgctgagcggcaacaacggcaccctggagtacaagaccagcctgccccccatcagccctggccgctacagccccatccccaagcacatgctggtggatgatgactacaccaggcctcctgagcctgtgtacagcacagtgaacaagctgtgtgacaagccagccagccccaggcactacagccctgtggagtgtgacaagagcttcctgctgagcgccccctacagccactaccacctgggcctgctgcctgacagcgagatgaccagccacagccagcacagcacagccacccggcagcccagcatgaccctgcagagagctgtgtccctggagggggagcccaggaaggtggtgctgcacaagggcagcacaggcctgggcttcaacatcgtgggcggagaagatggagagggcatctttgtgtccttcatcctggccggcggccctgctgacctgagcggggagctgcagagaggagaccagatcctgtctgtgaatggaattgacctgcggggggccagccatgagcaggccgctgctgccctgaagggggccggccagacagtgaccatcatcgcccagtaccagccagaagattatgccaggtttgaggccaagatccatgacctgcgggagcagatgatgaaccacagcatgagcagcggcagcggcagcctgcggaccaaccagaagaggagcctgtatgtgcgggccatgtttgattatgacaagagcaaggacagcggcctgcccagccagggcctgtccttcaagtacggggacatcctgcacgtgatcaatgccagtgatgatgagtggtggcaggcccggcgggtgatgctggagggggacagcgaggagatgggcgtcatccccagcaagagaagagtggagaggaaggagcgggcccggctgaagacagtgaagttcaatgccaagccaggagtcatcgacagcaaaggagacatccctggcctgggagatgatggctacggcaccaagaccctgaagcacgtgagcagcaatgccagtgacagcgagagcagctaccggggccaggaggacctgatcctgtcctatgagcctgtgacccggcaggagatcaactacaccaggcctgtgatcatcctgggccccatgaaggaccgcatcaatgatgacctgatcagcgagttcccagacaagtttggcagctgtgtgccccacaccacccggcccaagagggactatgaggtggatggccgggactaccacttcgtcatcagccgggagcagatggagaaggacatccaggagcacaagttcattgaagctggccagtacaatgacaacctgtatggcacctctgtgcagagcgtgcgctttgtggccgagcggggcaagcactgcatcctggatgtgtctggaaatgccatcaagaggctgcaggtggcccagctgtaccccatcgccatcttcatcaagcccaggagcctggagcccctgatggagatgaacaagaggctgacagaggagcaggccaagaagacctatgaccgggccatcaagctggagcaggagtttggagagtacttcaccgccatcgtgcagggcgacaccctggaggacatctacaaccagtgcaagctggtgattgaggagcagagcggccccttcatctggatccccagcaaggagaagctgtag

SEQ ID NO: 284866 - DNA, 2376 bp, Artificial Sequence
  derived and/or modified sequence
atgcagcacgccttcatccccgccagccccgcccccatcatcgtgaataccgacaccctggataccattccctatgttaatggaactgaaatcgagtacgaattcgaagagataacactggaacggggtaatagcggcctgggtttctctatagctggaggcaccgacaatcctcacattggagacgatcccggcattttcataaccaaaattatccctggcggcgccgctgcagaggatgggagactcagggtaaacgattgtatcctccgcgtgaacgaagtggatgtgagtgaggtgagccatagcaaggcagtggaggcactcaaggaggccggttcaatcgttcggctctacgtgagaagacggagaccaatcttggagacagtggtggagattaagcttttcaagggccccaagggccttggcttctctattgccggcggcgtaggcaatcagcacattcccggagacaatagcatctatgtgaccaaaattatagacggaggggcggcacagaaagatggcagacttcaggtgggagaccgtctacttatggttaacaattattcactggaggaagtcacacacgaggaggcggtggctattctcaagaatacaagcgaggttgtgtacttgaaggtcgggaagcccacgactatctatatgacagacccctatggacctcccgacataacacacagctatagtcccccaatggagaaccacctgctctctggaaacaatgggacgctggagtacaagacctccttacctcccattagccccggacgttacagccctatcccgaagcatatgttggttgacgacgactatacacggccacctgagcctgtgtactccacagtcaataagctctgcgataaacctgcatcgcctcggcactacagtcccgtggagtgtgataagtcttttttgctgagcgcaccttacagccattaccacctgggcttgctccctgactcggaaatgacatcgcactctcagcacagtaccgcgaccaggcaaccaagcatgacgctacagagggcagtcagccttgaaggagagccgagaaaggttgtgttacacaagggctctactggcctcggtttcaatatcgtggggggcgaagacggcgagggaattttcgtgtcattcattctggcaggcgggccagccgatttgagtggagaactgcaacggggagaccagattctttctgtgaatggaattgatcttagaggcgcctcccatgagcaagcagccgcagcactcaagggcgccggacagacagtcactatcatagcccagtaccagcctgaggattatgccagatttgaagcaaagatccacgatcttcgtgaacagatgatgaatcattcaatgagttcaggaagcgggtcactcagaactaatcaaaagcggtcactttatgtgcgagctatgttcgattatgacaagtcgaaggacagcggccttccctcgcaggggctcagttttaagtatggggatatccttcacgtaattaacgcctcagacgacgaatggtggcaggctagaagagtgatgctggaaggtgatagcgaggaaatgggggtgatcccatccaagcgccgggtggagaggaaagaaagagcaagactgaaaacggtcaaatttaacgccaagccaggagtcatcgactccaagggagacatccccggccttggggacgacggctacgggaccaagacccttcgagggcaggaggatctcatcctttcctatgagcctgttacccgccaggagatcaactacacaaggcccgtcatcatacttggaccaatgaaagataggatcaatgatgatcttatcagtgagttccctgataagtttggctcttgcgtgcctcacacaaccaggcctaagcgtgactacgaggtcgatggccgggactatcattttgtaatcagtagggaacagatggagaaagacatacaggaacataagtttatcgaggctggccagtataatgacaacctgtatggaacatcagtgcagagcgttaggtttgtggccgagcggggcaagcattgtatcctggatgtgtcaggcaacgcaattaaaagactacaggtggcgcagctgtacccaatcgccatctttatcaagcctcggtccctggagccgctgatggagatgaataaacggcttaccgaagagcaggccaagaaaacttatgaccgcgctattaaactggagcaagagttcggtgaatacttcacggctatagtgcagggggatactttggaagacatctacaaccagtgtaaactcgtgatcgaggaacagagcggcccctttatctggatccctagcaaggagaagctctag

SEQ ID NO: 284867 - DNA, 1863 bp, Artificial Sequence
  derived and/or modified sequence
atggtgaacaactacagcctggaggaggtgacccacgaggaggccgtcgccatcctcaagaacacatcagaagtagtttacctcaaagtgggaaaacccacgactatttacatgacagatccctatggtccccccgatatcactcactcctattcacctccaatggaaaatcatctcttgtccgggaacaacgggactttggagtacaagacctccttgccccccatcagccccggacgatatagccccattcccaagcatatgttagtggatgatgactatacccggcctccggaacccgtgtattccaccgtcaacaagctatgcgacaagcccgccagtcccagacattactctcctgtggaatgcgataaatcattcctgctaagcgctccctactcccattaccatttgggactgctgcccgactccgagatgacctcccattctcaacacagcacagccacaaggcagccctctatgaccctccagagggctgtgtctctcgagggggaacccaggaaagtggtcttgcacaaaggtagcaccgggctggggtttaacattgtgggaggcgaggacggcgagggaattttcgtgtcctttatactggcaggtggccctgctgatttatctggcgagctgcaaaggggggaccagattcttagcgtcaatggaatcgatctacgcggtgcttcgcacgagcaagccgctgcggctctaaagggagcgggtcagacagtaactataattgcacaatatcaaccggaggactatgccagattcgaggccaagatccacgacctgcgggagcagatgatgaaccattctatgagttctggctctggctctttacgcacaaaccaaaagaggagcctgtacgtgcgggcaatgtttgattacgataagagcaaggactccggactcccaagccagggcctctcctttaagtatggggatattctgcacgtgatcaatgccagcgacgatgagtggtggcaggctaggcgcgtgatgctagaaggtgacagtgaggagatgggcgtgattccaagtaagcggagagtggagaggaaggaacgggctcgcttgaaaacagtgaagtttaatgccaaacccggcgtcatcgactctaagggcgacatccctggtcttggcgatgatggctacgggaccaagacactgaaacatgtttcttctaacgctagtgattctgaaagttcttaccggggccaggaggatctgatattgagctacgagcccgtaactagacaggagattaattatactcgccccgtgatcattctgggccccatgaaagatcgtatcaacgacgacctaattagcgaattccctgacaagttcggctcttgcgtgccacacacaactaggcctaagcgagactatgaggtagacggaagagactaccacttcgtcatctcacgggaacaaatggagaaagatattcaggaacataaattcatcgaggccggtcagtacaacgataacctgtacggcacttcagtacagtctgtgagattcgtggccgagagaggcaaacattgcatcctcgatgtttcaggaaacgctatcaagcggctccaggttgcccaactctacccgatcgccattttcatcaagccgcggagcctcgaacccttgatggagatgaacaaacgtctgactgaggaacaagcgaaaaagacctacgaccgagccattaagctagagcaggagttcggcgaatacttcactgctattgtgcagggcgacacgctagaggatatctataaccaatgcaagctggtgatcgaagagcagtccgggcccttcatttggattccttctaaagaaaagctctag

SEQ ID NO: 284868 - DNA, 2376 bp, Artificial Sequence
  derived and/or modified sequence
atgcagcacgcctttattcccgcttctcctgcccctatcattgttaatactgatacactggacaccatcccatacgtcaacgggacagaaatcgaatatgagtttgaagagattacattggagcggggaaactctggcctgggattttcaattgcaggcggaaccgataaccctcacatcggggacgaccctggcatttttatcacaaagatcatccctggtggcgctgccgctgaggacgggcgtctgagagtgaacgactgcattcttagggtgaatgaggttgatgtctccgaagtgagccacagtaaagcagtggaggcactcaaggaggctggctccatagttaggctgtacgtgagaaggcggaggcctattttggagacagtcgtggagattaagctctttaaaggcccaaagggcttgggattctcaattgccggtggcgtgggcaatcagcatatcccaggtgataattcaatttacgttactaaaatcatcgatggtggagccgctcaaaaagacggacgactgcaggtcggcgatcggctactgatggtaaataactactccttagaggaagtcacccacgaagaggcggtcgccatccttaagaatacctccgaagtggtgtacttaaaggtgggcaagccaacgaccatctatatgactgatccatacgggccaccagacattacacactcctacagtccgccaatggagaaccatttgttatcgggtaataacggtacactggaatacaagactagtcttccccctatcagccccggtcgatactctcctattcccaagcatatgttggtagacgacgactatactaggccgcctgagccagtgtattccaccgtgaataaattgtgtgacaaaccagcttctcccagacattactctcctgtggaatgcgataagtcgttcctgctcagcgctccttacagccactaccacctgggactgttaccagattccgagatgacaagccactctcagcattccaccgccaccaggcagccatcaatgactctgcaaagggcggtaagcctcgaaggagagcctcgaaaggtcgtgctgcacaaaggctccaccggattggggtttaatatcgtcggaggggaggacggcgaaggtatttttgtgagtttcattcttgccggtggacccgctgacctctcgggggagttgcagcggggagaccaaattttgagcgtaaacgggattgatctacggggagcctcccacgagcaagcagcggcagcactaaaaggcgctggtcagaccgttacgatcattgcccaataccaaccagaggattacgctcgattcgaagctaagatacatgatctgcgcgagcagatgatgaaccatagcatgtcttcaggaagcggtagtctgcgaactaatcaaaagaggagtctttatgtgcgggcaatgttcgactatgacaaaagcaaggatagtggattaccaagtcagggacttagcttcaaatacggcgacatattgcacgtgattaacgctagtgacgatgagtggtggcaggcaagacgtgtcatgctggagggagacagcgaggagatgggagtaatcccttcgaaaaggagggtagagcgaaaagaaagagcccgacttaagacagtgaagttcaacgccaagcctggagtgattgacagcaaaggtgatatccccggactaggcgatgacgggtatggcaccaaaaccctcagaggccaggaggatctcattctttcgtacgagccggtgactcggcaggaaattaattatactaggccagtgattatcctgggtccaatgaaagatcggattaacgatgacctgatctctgagttcccggataagttcgggtcatgcgtcccccatacaaccagacccaagcgcgactacgaagtcgacggcagagactatcactttgtgatatcacgggagcagatggagaaagacatccaggaacacaagttcattgaggctggccagtataacgataacttgtacggtacatccgtgcagtccgtgcgcttcgtcgccgagcgcggaaaacattgcatcctggacgtttctgggaacgccatcaagcgtctgcaagttgcccagttgtatcccatagcgatcttcattaagcccagatctctagagcccctgatggaaatgaacaaacgcctcactgaagaacaggcaaaaaagacatacgaccgcgctattaaattagagcaagaattcggcgaatacttcacagccatcgtgcaaggggatacccttgaggatatttacaatcagtgcaaactcgttatcgaggaacagagtggtccctttatctggattccctccaaagagaagctatag

SEQ ID NO: 284869 - DNA, 1863 bp, Artificial Sequence
  derived and/or modified sequence
atggtaaacaactattcactggaagaggtcacacatgaggaagccgtcgctatattgaagaatacttccgaagtggtgtatctgaaggttggtaaacccactaccatctatatgactgacccctatggacctcctgacattactcattcctatagtccgcctatggagaaccacctgcttagcggtaacaatggtaccctggagtacaagaccagccttccaccaatttcccctggtagatattcacccatccccaaacacatgctggtcgacgatgactacacacggccacctgagcccgtctattctaccgtgaataaactgtgcgataaacccgcttcaccgcgtcattattcacccgtggagtgcgacaaatcattcctgctatccgccccatattctcattatcacctgggactgttacccgatagcgagatgacctctcacagtcagcactctaccgctactcggcaaccctccatgaccctgcagcgagcagtctccctggagggggagcctcgaaaagtggtcctgcacaaggggtcaacaggcctgggttttaacattgtgggcggagaggacggagaaggcatattcgtctcctttattctggctggagggccagcggatctgagtggagaactgcagagaggggaccaaatcctatctgtaaacggcatcgacctgagaggcgcaagtcatgagcaggccgcagcagccctgaaaggcgctgggcagacggtgactatcatcgctcagtaccagcctgaagactatgccagatttgaggctaagatccatgatctgcgggagcagatgatgaatcactcgatgtcgagtggtagtggctctcttaggaccaatcaaaagcgtagcttgtacgtcagggccatgtttgactatgacaaatctaaggactctggcctcccgtcccagggtctgagtttcaagtatggagacatcttgcatgtgattaacgcctccgacgacgagtggtggcaggcaaggagggtcatgctcgaaggcgactctgaggagatgggcgtcatcccttccaagcgacgcgtggagcgcaaggagcgggcacgtctcaaaaccgtgaagttcaacgcaaaacccggagtgattgatagtaaaggcgatattccgggactgggagacgacggttatggcacaaaaaccttgaagcacgtctcttccaacgcaagtgattctgagtcctcgtaccggggacaagaagacctgatcctgtcctacgaacccgtcactcgccaggagattaattacacccgcccagtgattatcttgggccctatgaaagaccgcattaatgatgatctcatctccgagttcccggataaattcgggtcctgcgtcccacataccactcggcctaaaagggactatgaggtggacgggagggattaccactttgtcatcagcagggagcagatggaaaaggacatccaggaacataaattcatcgaagcaggtcagtacaacgacaatttgtacggcaccagtgtccagtccgtccgctttgttgcggagagggggaagcactgcatcctggacgtgtccggcaacgctatcaaacgactccaggtggctcagctgtatccgattgctattttcatcaagcctcggagcctcgagccactgatggagatgaataagcgattaaccgaggaacaggccaagaaaacttacgatagagccattaaactcgagcaagaatttggcgagtacttcacagctattgtacagggagataccctcgaggacatctataaccagtgcaagctggtgatcgaggagcaatccggacctttcatttggattccctccaaagagaaattatag

SEQ ID NO: 284870 - DNA, 2376 bp, Artificial Sequence
  derived and/or modified sequence
atgcagcacgccttcatccccgccagccccgcccccatcatcgtgaacaccgacaccctggacaccatcccctacgtgaacggcaccgagatcgagtacgagttcgaggagatcaccctggagagaggcaacagcggcctgggcttcagcatcgccggcggcaccgacaacccccacatcggcgacgaccccggcatcttcatcaccaagatcatccccggcggcgccgccgccgaggacggcagactgagagtgaacgactgcatcctgagagtgaacgaggtggacgtgagcgaggtgagccacagcaaggccgtggaggccctgaaggaggccggcagcatcgtgagactgtacgtgagaagaagaagacccatcctggagaccgtggtggagatcaagctgttcaagggccccaagggcctgggcttcagcatcgccggcggcgtgggcaaccagcacatccccggcgacaacagcatctacgtgaccaagatcatcgacggcggcgccgcccagaaggacggcagactgcaggtgggcgacagactgctgatggtgaacaactacagcctggaggaggtgacccacgaggaggccgtggccatcctgaagaacaccagcgaggtggtgtacctgaaggtgggcaagcccaccaccatctacatgaccgacccctacggcccccccgacatcacccacagctacagcccccccatggagaaccacctgctgagcggcaacaacggcaccctggagtacaagaccagcctgccccccatcagccccggcagatacagccccatccccaagcacatgctggtggacgacgactacaccagaccccccgagcccgtgtacagcaccgtgaacaagctgtgcgacaagcccgccagccccagacactacagccccgtggagtgcgacaagagcttcctgctgagcgccccctacagccactaccacctgggcctgctgcccgacagcgagatgaccagccacagccagcacagcaccgccaccagacagcccagcatgaccctgcagagagccgtgagcctggagggcgagcccagaaaggtggtgctgcacaagggcagcaccggcctgggcttcaacatcgtgggcggcgaggacggcgagggcatcttcgtgagcttcatcctggccggcggccccgccgacctgagcggcgagctgcagagaggcgaccagatcctgagcgtgaacggcatcgacctgagaggcgccagccacgagcaggccgccgccgccctgaagggcgccggccagaccgtgaccatcatcgcccagtaccagcccgaggactacgccagattcgaggccaagatccacgacctgagagagcagatgatgaaccacagcatgagcagcggcagcggcagcctgagaaccaaccagaagagaagcctgtacgtgagagccatgttcgactacgacaagagcaaggacagcggcctgcccagccagggcctgagcttcaagtacggcgacatcctgcacgtgatcaacgccagcgacgacgagtggtggcaggccagaagagtgatgctggagggcgacagcgaggagatgggcgtgatccccagcaagagaagagtggagagaaaggagagagccagactgaagaccgtgaagttcaacgccaagcccggcgtgatcgacagcaagggcgacatccccggcctgggcgacgacggctacggcaccaagaccctgagaggccaggaggacctgatcctgagctacgagcccgtgaccagacaggagatcaactacaccagacccgtgatcatcctgggccccatgaaggacagaatcaacgacgacctgatcagcgagttccccgacaagttcggcagctgcgtgccccacaccaccagacccaagagagactacgaggtggacggcagagactaccacttcgtgatcagcagagagcagatggagaaggacatccaggagcacaagttcatcgaggccggccagtacaacgacaacctgtacggcaccagcgtgcagagcgtgagattcgtggccgagagaggcaagcactgcatcctggacgtgagcggcaacgccatcaagagactgcaggtggcccagctgtaccccatcgccatcttcatcaagcccagaagcctggagcccctgatggagatgaacaagagactgaccgaggagcaggccaagaagacctacgacagagccatcaagctggagcaggagttcggcgagtacttcaccgccatcgtgcagggcgacaccctggaggacatctacaaccagtgcaagctggtgatcgaggagcagagcggccccttcatctggatccccagcaaggagaagctgtag

SEQ ID NO: 284871 - DNA, 1863 bp, Artificial Sequence
  derived and/or modified sequence
atggtgaacaactacagcctggaggaggtgacccacgaggaggccgtggccatcctgaagaacaccagcgaggtggtgtacctgaaggtgggcaagcccaccaccatctacatgaccgacccctacggcccccccgacatcacccacagctacagcccccccatggagaaccacctgctgagcggcaacaacggcaccctggagtacaagaccagcctgccccccatcagccccggcagatacagccccatccccaagcacatgctggtggacgacgactacaccagaccccccgagcccgtgtacagcaccgtgaacaagctgtgcgacaagcccgccagccccagacactacagccccgtggagtgcgacaagagcttcctgctgagcgccccctacagccactaccacctgggcctgctgcccgacagcgagatgaccagccacagccagcacagcaccgccaccagacagcccagcatgaccctgcagagagccgtgagcctggagggcgagcccagaaaggtggtgctgcacaagggcagcaccggcctgggcttcaacatcgtgggcggcgaggacggcgagggcatcttcgtgagcttcatcctggccggcggccccgccgacctgagcggcgagctgcagagaggcgaccagatcctgagcgtgaacggcatcgacctgagaggcgccagccacgagcaggccgccgccgccctgaagggcgccggccagaccgtgaccatcatcgcccagtaccagcccgaggactacgccagattcgaggccaagatccacgacctgagagagcagatgatgaaccacagcatgagcagcggcagcggcagcctgagaaccaaccagaagagaagcctgtacgtgagagccatgttcgactacgacaagagcaaggacagcggcctgcccagccagggcctgagcttcaagtacggcgacatcctgcacgtgatcaacgccagcgacgacgagtggtggcaggccagaagagtgatgctggagggcgacagcgaggagatgggcgtgatccccagcaagagaagagtggagagaaaggagagagccagactgaagaccgtgaagttcaacgccaagcccggcgtgatcgacagcaagggcgacatccccggcctgggcgacgacggctacggcaccaagaccctgaagcacgtgagcagcaacgccagcgacagcgagagcagctacagaggccaggaggacctgatcctgagctacgagcccgtgaccagacaggagatcaactacaccagacccgtgatcatcctgggccccatgaaggacagaatcaacgacgacctgatcagcgagttccccgacaagttcggcagctgcgtgccccacaccaccagacccaagagagactacgaggtggacggcagagactaccacttcgtgatcagcagagagcagatggagaaggacatccaggagcacaagttcatcgaggccggccagtacaacgacaacctgtacggcaccagcgtgcagagcgtgagattcgtggccgagagaggcaagcactgcatcctggacgtgagcggcaacgccatcaagagactgcaggtggcccagctgtaccccatcgccatcttcatcaagcccagaagcctggagcccctgatggagatgaacaagagactgaccgaggagcaggccaagaagacctacgacagagccatcaagctggagcaggagttcggcgagtacttcaccgccatcgtgcagggcgacaccctggaggacatctacaaccagtgcaagctggtgatcgaggagcagagcggccccttcatctggatccccagcaaggagaagctgtag

SEQ ID NO: 284872 - DNA, 2789 bp, Artificial Sequence
  derived and/or modified sequence
aacaatgtgaacaagctatgcaacatgcatttattccggccagtcctgctcctataattgtcaacacagatactttggacacaattccttatgtcaatgggacagaaattgaatatgaatttgaagaaattacactggagagggggaattctggcctgggattcagtattgctggggggacagataatccccacattggagatgaccctggcatatttattacgaagattataccaggaggtgctgcagcagaggatggcagactcagggtcaatgattgtatcttgcgggtgaatgaggttgatgtgtcagaggtttcccacagtaaagcggtggaagccctgaaggaagcagggtctatcgttcggctgtatgtgcgtagaagacgacctattttggagaccgttgtggaaatcaaactgttcaaaggccctaaaggtttaggcttcagtattgcaggaggtgtggggaaccaacacattcctggagacaacagcatttatgtaactaaaattatagatggaggagctgcacaaaaagatggaaggttgcaagtaggagatagactactaatggtaaacaactacagtttagaagaagtaacacacgaagaggcagtagcaatattaaagaacacatcagaggtagtttatttaaaagttggcaaacccactaccatttatatgactgatccttatggtccacctgatattactcactcttattctccaccaatggaaaaccatctactctctggcaacaatggcactttagaatataaaacctccctgccacccatctctccaggaaggtactcaccaattccaaagcacatgcttgttgacgacgactacaccaggcctccggaacctgtttacagcactgtgaacaaactatgtgataagcctgcttctcccaggcactattcccctgttgagtgtgacaaaagcttcctcctctcagctccctattcccactaccacctaggcctgctacctgactctgagatgaccagtcattcccaacatagcaccgcaactcgtcagccttcaatgactctccaacgggccgtctccctggaaggagagcctcgcaaggtagtcctgcacaaaggctccactggcctgggcttcaacattgtcggtggggaagatggagaaggtatttttgtgtccttcattctggctggtggaccagcagacctaagtggggagctccagagaggagaccagatcctatcggtgaatggcattgacctccgtggtgcatcccacgagcaggcagctgctgcactaaagggggctggacagacagtgacgattatagcacaatatcaacctgaagattacgctcgatttgaggccaaaatccatgacctacgagagcagatgatgaaccacagcatgagctccgggtccggatccctgcgaaccaatcagaaacgctccctctacgtcagagccatgttcgactacgacaagagcaaggacagtgggctgccaagtcaaggacttagttttaaatatggagatattctccacgttatcaatgcctctgatgatgagtggtggcaagccaggagagtcatgctggagggagacagtgaggagatgggggtcatccccagcaaaaggagggtggaaagaaaggaacgtgcccgattgaagacagtgaagtttaatgccaaacctggagtgattgattcgaaaggggacatccccggattaggtgacgacggttatggaacaaagactctgagaggacaagaagacctcattctttcctatgagcctgttacaaggcaggaaataaactacacccggccggtgattatcctggggcccatgaaggatcggatcaatgacgacttgatatctgaattccctgataaatttggctcctgtgtgcctcatactacgaggccaaagcgagactacgaggtggatggcagagactatcactttgtcatttccagagaacaaatggagaaagatatccaagagcacaagtttatagaagccggccagtacaatgacaatttatatggaaccagtgtgcagtctgtgagatttgtagcagaaagaggcaaacactgtatacttgatgtatcaggaaatgctatcaagcggttacaagttgcccagctctatcccattgccatcttcataaaacccaggtctctggaacctcttatggagatgaataagcgtctaacagaggaacaagccaagaaaacctatgatcgagcaattaagctagaacaagaatttggagaatattttacagctattgtccaaggagatactttagaagatatatataaccaatgcaagcttgttattgaagagcaatctgggcctttcatctggattccctcaaaggaaaagttataaattagctactgcgcctctgacaacgacagaagagcatttagaagaacaaaatatatataacatactacttggaggcttttatgtttttgttgcatttatgtttttgcagtcaatgtgaattcttacgaatgtacaacacaaactgtatgaagccatgaaggaaacagaggggccaaagggtgggacagaaaagacattgcagtatgaaggaaggctttggtttgctcaaagtgccaggtgtagggatgaacctctgacgggctttctgcccaagagatgagatgagagcctcctcaccccagcagatgtccagagctgatttagctgcagagctctctgtgtcttttgctttaaagaaaaattgccagcactcgaacctcatcagccttcccatta

SEQ ID NO: 284873 - DNA, 2831 bp, Artificial Sequence
  derived and/or modified sequence
aacaatgtgaacaagctatgcaacatgcatttattccggccagtcctgctcctataattgtcaacacagatactttggacacaattccttatgtcaatgggacagaaattgaatatgaatttgaagaaattacactggagagggggaattctggcctgggattcagtattgctggggggacagataatccccacattggagatgaccctggcatatttattacgaagattataccaggaggtgctgcagcagaggatggcagactcagggtcaatgattgtatcttgcgggtgaatgaggttgatgtgtcagaggtttcccacagtaaagcggtggaagccctgaaggaagcagggtctatcgttcggctgtatgtgcgtagaagacgacctattttggagaccgttgtggaaatcaaactgttcaaaggccctaaaggtttaggcttcagtattgcaggaggtgtggggaaccaacacattcctggagacaacagcatttatgtaactaaaattatagatggaggagctgcacaaaaagatggaaggttgcaagtaggagatagactactaatggtaaacaactacagtttagaagaagtaacacacgaagaggcagtagcaatattaaagaacacatcagaggtagtttatttaaaagttggcaaacccactaccatttatatgactgatccttatggtccacctgatattactcactcttattctccaccaatggaaaaccatctactctctggcaacaatggcactttagaatataaaacctccctgccacccatctctccaggaaggtactcaccaattccaaagcacatgcttgttgacgacgactacaccaggcctccggaacctgtttacagcactgtgaacaaactatgtgataagcctgcttctcccaggcactattcccctgttgagtgtgacaaaagcttcctcctctcagctccctattcccactaccacctaggcctgctacctgactctgagatgaccagtcattcccaacatagcaccgcaactcgtcagccttcaatgactctccaacgggccgtctccctggaaggagagcctcgcaaggtagtcctgcacaaaggctccactggcctgggcttcaacattgtcggtggggaagatggagaaggtatttttgtgtccttcattctggctggtggaccagcagacctaagtggggagctccagagaggagaccagatcctatcggtgaatggcattgacctccgtggtgcatcccacgagcaggcagctgctgcactaaagggggctggacagacagtgacgattatagcacaatatcaacctgaagattacgctcgatttgaggccaaaatccatgacctacgagagcagatgatgaaccacagcatgagctccgggtccggatccctgcgaaccaatcagaaacgctccctctacgtcagagccatgttcgactacgacaagagcaaggacagtgggctgccaagtcaaggacttagttttaaatatggagatattctccacgttatcaatgcctctgatgatgagtggtggcaagccaggagagtcatgctggagggagacagtgaggagatgggggtcatccccagcaaaaggagggtggaaagaaaggaacgtgcccgattgaagacagtgaagtttaatgccaaacctggagtgattgattcgaaaggggacatccccggattaggtgacgacggttatggaacaaagactctgaaacatgtttcttctaatgccagcgatagcgaaagtagctaccgaggacaagaagacctcattctttcctatgagcctgttacaaggcaggaaataaactacacccggccggtgattatcctggggcccatgaaggatcggatcaatgacgacttgatatctgaattccctgataaatttggctcctgtgtgcctcatactacgaggccaaagcgagactacgaggtggatggcagagactatcactttgtcatttccagagaacaaatggagaaagatatccaagagcacaagtttatagaagccggccagtacaatgacaatttatatggaaccagtgtgcagtctgtgagatttgtagcagaaagaggcaaacactgtatacttgatgtatcaggaaatgctatcaagcggttacaagttgcccagctctatcccattgccatcttcataaaacccaggtctctggaacctcttatggagatgaataagcgtctaacagaggaacaagccaagaaaacctatgatcgagcaattaagctagaacaagaatttggagaatattttacagctattgtccaaggagatactttagaagatatatataaccaatgcaagcttgttattgaagagcaatctgggcctttcatctggattccctcaaaggaaaagttataaattagctactgcgcctctgacaacgacagaagagcatttagaagaacaaaatatatataacatactacttggaggcttttatgtttttgttgcatttatgtttttgcagtcaatgtgaattcttacgaatgtacaacacaaactgtatgaagccatgaaggaaacagaggggccaaagggtgggacagaaaagacattgcagtatgaaggaaggctttggtttgctcaaagtgccaggtgtagggatgaacctctgacgggctttctgcccaagagatgagatgagagcctcctcaccccagcagatgtccagagctgatttagctgcagagctctctgtgtcttttgctttaaagaaaaattgccagcactcgaacctcatcagccttcccatta

SEQ ID NO: 284874 - protein, 244 aa, Artificial Sequence
  derived and/or modified sequence
MDTESNRRANLALPQEPSSVPAFEVLEISPQEVSSGRLLKSASSPPLHTWLTVLKKEQEFLGVTQILTAMICLCFGTVVCSVLDISHIEGDIFSSFKAGYPFWGAIFFSISGMLSIISERRNATYLVRGSLGANTASSIAGGTGITILIINLKKSLAYIHIHSCQKFFETKCFMASFSTEIVVMMLFLTILGLGSAVSLTICGAGEELKGNKVPEDRVYEELNIYSATYSELEDPGEMSPPIDL

SEQ ID NO: 284875 - protein, 41 aa, Artificial Sequence
  derived and/or modified sequence
MDTESNRRANLALPQEPSSVPAFEVLEISPQEVSSGRLLKS

SEQ ID NO: 284876 - DNA, 1152 bp, Artificial Sequence
  derived and/or modified sequence
aacccatttcaactgcctattcagagcatgcagtaagaggaaatccaccaagtctcaatataataatattctttattcctggacagctcggttaatgaaaaaatggacacagaaagtaataggagagcaaatcttgctctcccacaggagccttccagtgtgcctgcatttgaagtcttggaaatatctccccaggaagtatcttcaggcagactattgaagtcggcctcatccccaccactgcatacatggctgacagttttgaaaaaagagcaggagttcctgggggtaacacaaattctgactgctatgatatgcctttgttttggaacagttgtctgctctgtacttgatatttcacacattgagggagacattttttcatcatttaaagcaggttatccattctggggagccatatttttttctatttctggaatgttgtcaattatatctgaaaggagaaatgcaacatatctggtgagaggaagcctgggagcaaacactgccagcagcatagctgggggaacgggaattaccatcctgatcatcaacctgaagaagagcttggcctatatccacatccacagttgccagaaattttttgagaccaagtgctttatggcttccttttccactgaaattgtagtgatgatgctgtttctcaccattctgggacttggtagtgctgtgtcactcacaatctgtggagctggggaagaactcaaaggaaacaaggttccagaggatcgtgtttatgaagaattaaacatatattcagctacttacagtgagttggaagacccaggggaaatgtctcctcccattgatttataagaatcacgtgtccagaacactctgattcacagccaaggatccagaaggccaaggtcttgttaaggggctactggaaaaatttctattctctccacagcctgctggttttacattagatttattcgcctgataagaatattttgtttctgctgcttctgtccaccttaatattctccttctatttgtagatatgatagactcctatttttcttgttttatattatgaccacacacatctctgctggaaagtcaacatgtagtaagcaagatttaactgtttgattataactgtgcaaatacagaaaaaaagaaggc

SEQ ID NO: 284877 - DNA, 541 bp, Artificial Sequence
  derived and/or modified sequence
ttcagttttgggtctatgtgtgaaaccaagcatgccttaaacaaggaagacaagcttttcaaaggtgcaattggataacttctgccatagaaatggctgaattgggacacaagtggggacaattccagaagaagggcacatctctttcttttctgcagttctttctcaccttctcaactcctactaaaatgtctcattttcaggttctgtaaatcctgctagtctcaggcaaaattatgctccaggagtctcaaattttcttatttcatattagtctttatttagtagacttcttaatttttctattcatcacaagtaaaagcctgttgatcttaatcagccaagaaacttatctgtctggcaaatgacttatgtataaagagaatcatcaatgtcatgagctcggttaatgaaaaaatggacacagaaagtaataggagagcaaatcttgctctcccacaggagccttccagtgtgcctgcatttgaagtcttggaaatatctccccaggaagtatcttcaggcagactattgaagtcgg

SEQ ID NO: 284878 - protein, 662 aa, Artificial Sequence
  derived and/or modified sequence
MRPQILLLLALLTLGLAAQHQDKVPCKMVDKKVSCQVLGLLQVPSVLPPDTETLDLSGNQLRSILASPLGFYTALRHLDLSTNEISFLQPGAFQALTHLEHLSLAHNRLAMATALSAGGLGPLPRVTSLDLSGNSLYSGLLERLLGEAPSLHTLSLAENSLTRLTRHTFRDMPALEQLDLHSNVLMDIEDGAFEGLPRLTHLNLSRNSLTCISDFSLQQLRVLDLSCNSIEAFQTASQPQAEFQLTWLDLRENKLLHFPDLAALPRLIYLNLSNNLIRLPTGPPQDSKGIHAPSEGWSALPLSAPSGNASGRPLSQLLNLDLSYNEIELIPDSFLEHLTSLCFLNLSRNCLRTFEARRLGSLPCLMLLDLSHNALETLELGARALGSLRTLLLQGNALRDLPPYTFANLASLQRLNLQGNRVSPCGGPDEPGPSGCVAFSGITSLRSLSLVDNEIELLRAGAFLHTPLTELDLSSNPGLEVATGALGGLEASLEVLALQGNGLMVLQVDLPCFICLKRLNLAENRLSHLPAWTQAVSLEVLDLRNNSFSLLPGSAMGGLETSLRRLYLQGNPLSCCGNGWLAAQLHQGRVDVDATQDLICRFSSQEEVSLSHVRPEDCEKGGLKNINLIIILTFILVSAILLTTLAACCCVRRQKFNQQYKA

SEQ ID NO: 284879 - protein, 186 aa, Artificial Sequence
  derived and/or modified sequence
MRPQILLLLALLTLGLAAQHQDKVPCKMVDKKVSCQVLGLLQVPSVLPPDTETLDLSGNQLRSILASPLGFYTALRHLDLSTNEISFLQPGAFQALTHLEHLSLAHNRLAMATALSAGGLGPLPRVTSLDLSGNSLYSGLLERLLGEAPSLHTLSLAENSLTRLTRHTFRDMPALEQLDLHSNVLM

SEQ ID NO: 284880 - DNA, 1989 bp, Artificial Sequence
  derived and/or modified sequence
atgagaccccagatcctgctgctgctggccctgctgaccctgggcctggccgcccagcaccaggacaaggtgccctgcaagatggtggacaagaaggtgagctgccaggtgctgggcctgctgcaggtgcccagcgtgctgccccccgacaccgagaccctggacctgagcggcaaccagctgagaagcatcctggccagccccctgggcttctacaccgccctgagacacctggacctgagcaccaacgagatcagcttcctgcagcccggcgccttccaggccctgacccacctggagcacctgagcctggcccacaacagactggccatggccaccgccctgagcgccggcggcctgggccccctgcccagagtgaccagcctggacctgagcggcaacagcctgtacagcggcctgctggagagactgctgggcgaggcccccagcctgcacaccctgagcctggccgagaacagcctgaccagactgaccagacacaccttcagagacatgcccgccctggagcagctggacctgcacagcaacgtgctgatggacatcgaggacggcgccttcgagggcctgcccagactgacccacctgaacctgagcagaaacagcctgacctgcatcagcgacttcagcctgcagcagctgagagtgctggacctgagctgcaacagcatcgaggccttccagaccgccagccagccccaggccgagttccagctgacctggctggacctgagagagaacaagctgctgcacttccccgacctggccgccctgcccagactgatctacctgaacctgagcaacaacctgatcagactgcccaccggccccccccaggacagcaagggcatccacgcccccagcgagggctggagcgccctgcccctgagcgcccccagcggcaacgccagcggcagacccctgagccagctgctgaacctggacctgagctacaacgagatcgagctgatccccgacagcttcctggagcacctgaccagcctgtgcttcctgaacctgagcagaaactgcctgagaaccttcgaggccagaagactgggcagcctgccctgcctgatgctgctggacctgagccacaacgccctggagaccctggagctgggcgccagagccctgggcagcctgagaaccctgctgctgcagggcaacgccctgagagacctgcccccctacaccttcgccaacctggccagcctgcagagactgaacctgcagggcaacagagtgagcccctgcggcggccccgacgagcccggccccagcggctgcgtggccttcagcggcatcaccagcctgagaagcctgagcctggtggacaacgagatcgagctgctgagagccggcgccttcctgcacacccccctgaccgagctggacctgagcagcaaccccggcctggaggtggccaccggcgccctgggcggcctggaggccagcctggaggtgctggccctgcagggcaacggcctgatggtgctgcaggtggacctgccctgcttcatctgcctgaagagactgaacctggccgagaacagactgagccacctgcccgcctggacccaggccgtgagcctggaggtgctggacctgagaaacaacagcttcagcctgctgcccggcagcgccatgggcggcctggagaccagcctgagaagactgtacctgcagggcaaccccctgagctgctgcggcaacggctggctggccgcccagctgcaccagggcagagtggacgtggacgccacccaggacctgatctgcagattcagcagccaggaggaggtgagcctgagccacgtgagacccgaggactgcgagaagggcggcctgaagaacatcaacctgatcatcatcctgaccttcatcctggtgagcgccatcctgctgaccaccctggccgcctgctgctgcgtgagaagacagaagttcaaccagcagtacaaggcctag

SEQ ID NO: 284881 - DNA, 561 bp, Artificial Sequence
  derived and/or modified sequence
atgagaccccagatcctgctgctgctggccctgctgaccctgggcctggccgcccagcaccaggacaaggtgccctgcaagatggtggacaagaaggtgagctgccaggtgctgggcctgctgcaggtgcccagcgtgctgccccccgacaccgagaccctggacctgagcggcaaccagctgagaagcatcctggccagccccctgggcttctacaccgccctgagacacctggacctgagcaccaacgagatcagcttcctgcagcccggcgccttccaggccctgacccacctggagcacctgagcctggcccacaacagactggccatggccaccgccctgagcgccggcggcctgggccccctgcccagagtgaccagcctggacctgagcggcaacagcctgtacagcggcctgctggagagactgctgggcgaggcccccagcctgcacaccctgagcctggccgagaacagcctgaccagactgaccagacacaccttcagagacatgcccgccctggagcagctggacctgcacagcaacgtgctgatgtag

SEQ ID NO: 284882 - DNA, 1989 bp, Artificial Sequence
  derived and/or modified sequence
atgaggccacagattctgctgctactagcactattaacactaggcctggcggcccagcatcaggacaaggtgccatgcaaaatggtggacaagaaagtctcctgtcaggtactaggactgttgcaggtcccctcggtgctcccgccagatactgagaccctggacctttccggcaaccagcttcgaagcattctagcgagcccgctgggtttctacaccgccctcagacacctggacctctccaccaacgagatcagctttctgcagccaggcgctttccaggcattaacccatctggagcacctatccctggcccacaaccggctcgcaatggccaccgctctgtccgccggcgggcttggaccgctcccgagggtaacctctctcgacctgagtggaaacagcctttactcgggccttctggaacgcctgctgggggaggcccccagcctgcatacactatccctcgcagaaaattccctgacaaggttgactcgacacacatttagggatatgcctgccctcgaacaactggatctgcatagcaacgtgttgatggatatcgaggatggggcctttgagggcctgccaagactcacacacctgaatttgtctcgtaattccttaacttgcatttccgattttagtctgcaacagcttagggttctggacttaagctgcaattctatagaggccttccagactgctagtcagcctcaggccgaattccagctgacctggttagacctccgtgagaacaagctccttcactttcccgatctcgccgcactgccccgactcatttacctgaatctgagcaataatctgattagattaccaaccggtcctcctcaggatagtaaagggatccacgctcctagcgagggatggtccgcacttcctcttagtgctccaagcggaaacgcctctgggagacctctcagccagcttcttaatctggacttatcatataacgagatcgagctcatcccagatagcttcctcgagcacctgactagcttgtgctttctcaatctctctcgcaattgcttgcgcacatttgaggcccgaagactgggctccttaccgtgcctgatgctgctggacctatcacacaacgcacttgagacattggagctcggtgcaagggcactgggttccttacgtactttactactgcaagggaacgctctgagggaccttccaccctatacatttgcgaaccttgctagcctccaacgactgaatctacaaggaaatagagtctccccctgcggcgggccagacgagcccgggccatccggctgcgtggcattttcaggtatcacatctctacgaagcctcagcctggtggataatgaaatcgagttgcttagggccggagcattcttacatactcccctcacggagttggacctgtcttcaaaccccggactggaagttgccaccggggccctgggggggctggaggcgtccctggaggtgttggccttacagggaaacgggctgatggtactgcaggtagacctcccttgttttatctgcctgaaacggttgaatttagccgagaatcgcttgtctcatttaccggcatggacccaggccgtgtctctagaggtgctggacctgcgtaataattccttctctcttctgccaggctccgccatgggcgggctggaaacttccctccggaggttatacttacaggggaatcccctgtcatgttgcggtaacggctggttagcagctcagttacaccagggaagagtggacgttgatgccacgcaggatctgatatgcagattctcttcgcaggaggaagtcagtctgagtcacgtacgcccagaagattgcgagaaaggaggcctgaagaacatcaacttaattatcatactcacctttattcttgtctctgccatcctgctgactaccctggctgcctgttgctgcgttcgtaggcagaaattcaatcagcagtataaggcttag

SEQ ID NO: 284883 - DNA, 1989 bp, Artificial Sequence
  derived and/or modified sequence
atgaggccacagattctcctgctgctcgcacttttgacacttggcctcgccgctcagcatcaggataaggtaccctgcaagatggttgacaagaaggtgtcctgccaggtactagggttgctgcaagtgcccagcgtcctgccaccagacacggaaaccctggacctgagcggtaaccaactcagaagcatcttggcctctccactgggattctacaccgctctcagacatctggacttatctaccaacgagatttcattccttcagccaggggcttttcaagccttgacccacttggagcacctgtccctggcccataacaggttggctatggccactgcactgagcgccggagggttgggccctcttccacgcgtgacctcgctagacctgagtggtaattccctctatagcggcctgctggagcgcctgcttggcgaggctccttctctgcataccctgtcactggcagagaatagcctgactagattaactcgccatacattccgagacatgccagctctcgagcagttagatctgcacagcaacgtcctgatggatatcgaagacggcgcgttcgagggacttcccagactaactcatctgaaccttagccgcaatagtctgacatgcatctccgacttctctctccagcagctgcgggtgctggacctgtcatgtaatagcattgaggcatttcagaccgcctcacagcctcaggcagagtttcagctcacctggctggacctaagagagaataagctattgcatttcccagatctcgcagcacttccccggctgatttaccttaatttatctaataacctcatcagattgcctaccgggcccccacaggacagtaaagggatccatgccccgagcgaaggctggagcgctctgcctctgagcgccccatctggcaatgcaagcgggcgtccattgagccagctgctgaacctcgatcttagctataatgagattgaattgattcctgatagcttcctcgagcatttgacatccctatgttttcttaatctgtccagaaactgtctccgcacattcgaggcacgccggctaggctcccttccttgtctgatgctgctggacctcagccacaatgctcttgaaaccctagagctgggcgctcgggctctggggtccttgagaaccctgctccttcagggcaatgccctccgggatctccccccttacacctttgctaacctcgcttcactgcagaggctgaatctgcagggaaacagggtaagtccatgcggcgggcccgacgaacctggtccgtcaggttgcgtcgctttttccggaattacaagcctgcggtcacttagcttagtcgacaatgagatcgagttattgagagcaggagcattcctccatactccgcttaccgagttggatctcagttccaatcctggcctcgaggtggccaccggagcacttggaggcctggaggcatcgcttgaggtcctcgccctgcagggtaacggcctgatggtgctgcaggtcgatctcccatgctttatctgtttaaaaaggttgaatctcgctgagaaccggctgtctcatttaccagcctggacccaagccgtttctctggaagtgctggacctcaggaacaactccttttcactcctgccgggcagtgccatggggggcctagaaaccagcctgaggcggctgtatctgcagggcaaccccttgtcgtgctgcggtaacggatggctggcagcccagcttcaccagggcagggtcgacgttgatgcgacacaagatctcatctgtcgattctcctctcaggaggaggtgtcactgagccacgttaggccggaggactgtgaaaagggcggattaaagaacattaatttgattatcatcctcacatttattctggtgtctgccatactactgacaaccctagctgcctgctgctgcgtaagaaggcaaaaattcaatcagcagtacaaggcctag

SEQ ID NO: 284884 - DNA, 1989 bp, Artificial Sequence
  derived and/or modified sequence
atgaggccccagattctactgctgcttgctttgctgaccctcggcttagctgctcaacatcaggacaaagtgccttgcaaaatggttgataaaaaggtctcctgccaggtactgggcttacttcaggtgccatctgtgctgccccccgacactgaaacccttgacttatccggaaaccagctgagatcaatcctcgcatcaccactgggcttctatactgcgcttcgccaccttgatctctccacaaacgaaatttcattcctgcaaccaggagccttccaggctctgacacatcttgagcacctttctttagctcacaaccggctagccatggccaccgcgctatcagctggagggcttggcccactgccacgggtgacatcgttagacctgtcaggcaactccctatacagcggattattagaacgcctgctgggggaagccccatcattgcacacattatccttagctgagaactccttgaccagattgacccggcacacatttcgcgatatgcctgctctggagcagcttgatctgcatagcaacgttctcatggacatcgaggatggcgcgttcgaggggttgccgcggttaacccatctgaacctgtcaaggaattctctcacctgcatcagcgacttctctctgcaacaactccgagtactcgatctgagctgtaacagcatcgaagcgttccaaactgcatcccaaccccaagccgagttccaattgacatggctcgacctgagggaaaataagctcctgcacttccccgaccttgcagcacttccccggctgatttatctgaatctctctaacaacctcatcagactgcctacagggccaccccaggactctaagggcattcatgcaccctccgagggctggagcgccctgcccctgtcagcccccagcggtaatgcctcaggaagacccctcagccaactgctgaacctcgatctgagttacaatgagatcgaactgatcccagacagtttcctcgaacacctcactagcctctgttttctcaatctgagccgcaattgtctgcggaccttcgaggcccgccgcctggggtcattgccctgtctgatgctgttggacctgtctcacaatgccctggaaactctggaactcggtgcaagagcccttggctcactgcgcacattgttgctccagggcaatgctttgcgggacttgcccccttatacttttgcaaatcttgccagcttgcagagactgaacctgcagggtaatcgagtgagcccctgcggcgggccagatgagcccggaccctcaggatgtgtggccttcagcgggataaccagcctccgctctctcagtcttgtggataacgaaatcgaactgctgagggctggcgcatttctacacactcctctaaccgagttggatctgagttctaaccctggtttggaagtggccacaggtgcgctgggagggctcgaggcttcacttgaagtcctggccctccaagggaacggcctcatggtactgcaggtcgacctgccttgctttatatgcctaaaaaggctgaatctggcggagaatcggctgtctcatcttcccgcctggacacaggctgtgtcactagaggtgctagatctgagaaacaatagtttcagcctcctgccaggtagtgccatgggtggcctcgaaacatctctgcgccgcctgtatctgcaaggaaacccgttgtcatgctgcggcaacggatggctggctgctcagttgcaccagggccgtgtggatgtggatgccactcaggatctgatttgcaggttttcctctcaggaagaagtgagcctgtcgcacgtccggcctgaggattgtgaaaaaggcggactcaaaaatattaatctcattataatactgacattcattctcgtgtccgctatacttctcactaccctagcggcgtgttgttgcgtccgccgtcagaaatttaaccagcagtataaagcatag

SEQ ID NO: 284885 - DNA, 561 bp, Artificial Sequence
  derived and/or modified sequence
atgaggccacagatcctcctgctgctcgccctgcttacccttggactcgctgcgcagcaccaagataaagtgccatgcaagatggtggataagaaggtgtcgtgtcaggtgctgggcttgcttcaggtcccgagtgtgctgcctccagacacagagaccctggaccttagtggcaatcagctgcgttctattctcgcgagcccgttgggcttctataccgccctgcgtcaccttgatctctctaccaacgagatctcctttctgcagcctggagccttccaggctctgacccatctcgagcacttatccctcgcccacaataggttggcaatggcaaccgcactctctgccgggggcttgggacctctgccccgggtgaccagtttggatctttccggaaactccttatattcaggcctgttggagagactcctgggtgaggccccctctttacataccctctccttggctgaaaattccctgacccgccttaccagacacacctttcgggatatgccagccctggagcagctcgatctccacagtaacgtgctcatgtag

SEQ ID NO: 284886 - DNA, 4207 bp, Artificial Sequence
  derived and/or modified sequence
ggtggggcagctgagcggcctgctcctcctcgggccgtgaccccggggtctggcgcggggtgggacccgggggcgggtttgcgcaaaatgtgccgagactgcccgggagaggagctgcggccgcgctgagccagagccatgagaccccagatcctgctgctcctggccctgctgaccctaggcctggctgcacaacaccaagacaaagtgccctgtaagatggtggacaagaaggtctcgtgccaggttctgggcctgctccaggtcccctcggtgctcccgccagacactgagacccttgatctatctgggaaccagctgcggagtatcctggcctcacccctgggcttctacacagcacttcgtcacctggacctgagcaccaatgagatcagcttcctccagccaggagccttccaggccctgacccacctggagcacctcagcctggctcacaaccggctggcgatggccactgcgctgagtgctggtggcctgggccccctgccacgcgtgacctccctggacctgtctgggaacagcctgtacagcggcctgctggagcggctgctgggggaggcacccagcctgcataccctctcactggcggagaacagtctgactcgcctcacccgccacaccttccgggacatgcctgcgctggagcagcttgacctgcatagcaacgtgctgatggacatcgaggatggcgccttcgagggtctgccccgcctgacccatctcaacctctccaggaattccctcacctgcatctccgacttcagcctccagcagctgcgggtgctagacctgagctgcaacagcatcgaggcctttcagacggcctcccagccccaggctgagttccagctcacctggcttgacctgcgggagaacaaactgctccatttccccgacctggccgcgctcccgagactcatctacctgaacttgtccaacaacctcatccggctccccacagggccaccccaggacagcaagggcatccacgcaccttccgagggctggtcagccctgcccctctcagcccccagcgggaatgccagcggccgccccctttcccagctcttgaatctggatttgagctacaatgagattgagctcatccccgacagctttcttgagcacctgacctccctgtgcttcctgaacctcagcagaaactgcttgcggacctttgaggcccggcgcttaggctccctgccctgcctgatgctccttgacttaagccacaatgccctggagacactggaactgggcgccagagccctggggtctctgcggacgctgctcctacagggcaatgccctgcgggacctgcccccatacacctttgccaatctggccagcctgcagcggctcaacctgcaggggaaccgagtcagcccctgtggggggccagatgagcctggcccctccggctgtgtggccttctccggcatcacctccctccgcagcctgagcctggtggataatgagatagagctgctcagggcaggggccttcctccacaccccactgactgagctggacctttcttccaatcctgggctggaggtggccacgggggccttgggaggcctggaggcctccttggaggtcctggcactgcagggcaacgggctgatggtcctgcaggtggacctgccctgcttcatctgcctcaagcggctcaatcttgccgagaaccgcctgagccaccttcccgcctggacacaggctgtgtcactggaggtgctggacctgcgaaacaacagcttcagcctcctgccaggcagtgccatgggtggcctggagaccagcctccggcgcctctacctgcaggggaatccactcagctgctgcggcaatggctggctggcagcccagctgcaccagggccgtgtggacgtggacgccacccaggacctgatctgccgcttcagctcccaggaggaggtgtccctgagccacgtgcgtcctgaggactgtgagaaggggggactgaagaacatcaacctcatcatcatcctcaccttcatactggtctctgccatcctcctcaccacgctggccgcctgctgctgcgtccgccggcagaagtttaaccaacagtataaagcctaaagaagccgggagacactctaggtcagtgggggagcctgaggtacagagaagagtgaggactgactcaaggtcacacagtgatccgggatcccagaactctggtctccaaattacagcccaggacacctttctctgccgcctgctgcatcagtgggtgacccccttcccgggctgcactttgggtccagctgtggaagccagaagttgggcggtttcagggacagccgagaataatgttgacctgtcagatcaacaaatcttcactgagcatgtattttgtgccacaccctgctctgggcactgggaatgctgggaaatgagatacattcccgccctcaagaatctcccagtctggtaggagagagtgctgcagagccacgtggccgccacgcagtgtgcttagggcctgaggtgtgaaagcccagggctccagagctcggcaggccccgctggtttggtgcggtgagtcctgccccggctgtgccagggtgagggagggccaagcccaggaggatttgtctgagacatttccaagcagactgtttgtcacgtcttctgagaatgactttcagtctctctgaaaatgaaaagcttaggaccagaagagagaattggagctgtacgagtgtgtctcggatctggtgttgttaggtgggccacggcggctccagcagggtctggttaaggggtccagcccagcactggaccattccgtctcctgctctggacttgccctctcccttcctggcactctcatgttgcataccctgaccccagtgctgctctaagcaccgtccctgcccagccccacttctccatcgcagccccaccttggctgctgagccaggagctaaaaccttagatatctggttctgttttgcacccagcttggcagatgtggatttgaatccaagccttgtgtctgcccctatgtgacagctctatattttatccccgttttataaaagaggaaactgaagttctgaaaatctccttccagggccccagctaactaatgccataggtgagattcaaaccttcatccttctgtctccagggcctgatctttaccactgcaggggctgcaggccgttaagtggacaggaagtggccccacatagcccgagcagggtctggaagcatcctgtgctgtgcacacctgctctctcctctctcccaggcaggcagctgcaggcgctctcctccttctctgcctgtttccctcctcccttcctttccaccctggtgtgggttctcctgttctctctgtgctcttgcattctctcattcccttttcctctattgagcagagcctggagtttgagactatggaatccaacctccccattgcacagatggggaaactgaggcttaggaagagaatgaaacttgtggagagcttatacagagcctctgggggaaaaaagagcccttatttgtggggtgagattgggggttggaccagagtgatgtcctctctcagctatcacatcacaagataatgctggctccaaacttcctttctgtgcctcatcatgcaaggatcttttttccctcttacaaaaacaggtaaaaagcctcacccagatgacccccatccctcataccatggagtcatgagctgtctgggaagaatggacgtgctgggaccaactcaagaccttgttttgctgtcttcatcatcttacctgtgcttggcccacagtctggctcatgatgtgggctcagtaatgtgcgagaaagtgaaaatgccactctctccaccccattttacagaggagaacaccaaggcccagaggaagttaagggagagtcaatgggcagagccagggctaggccctggtggtgtgtggagcacccaggcagacccagtcctggttgggatcacacccacgggtgctactgcacgtaacactcctccttaggcctggaggccaaggtgtgggtccccacgcctgatctttgaaaacactacacagggctgctgtcacttcccagggcccaggcctcagcccaggcctcgggaccaactctttgtataacctacctgaatgtattaaaaactaattttggagaagca

SEQ ID NO: 284887 - DNA, 2656 bp, Artificial Sequence
  derived and/or modified sequence
ggtggggcagctgagcggcctgctcctcctcgggccgtgaccccggggtctggcgcggggtgggacccgggggcgggtttgcgcaaaatgtgccgagactgcccgggagaggagctgcggccgcgctgagccagagccatgagaccccagatcctgctgctcctggccctgctgaccctaggcctggctgcacaacaccaagacaaagtgccctgtaagatggtggacaagaaggtctcgtgccaggttctgggcctgctccaggtcccctcggtgctcccgccagacactgagacccttgatctatctgggaaccagctgcggagtatcctggcctcacccctgggcttctacacagcacttcgtcacctggacctgagcaccaatgagatcagcttcctccagccaggagccttccaggccctgacccacctggagcacctcagcctggctcacaaccggctggcgatggccactgcgctgagtgctggtggcctgggccccctgccacgcgtgacctccctggacctgtctgggaacagcctgtacagcggcctgctggagcggctgctgggggaggcacccagcctgcataccctctcactggcggagaacagtctgactcgcctcacccgccacaccttccgggacatgcctgcgctggagcagcttgacctgcatagcaacgtgctgatggacatcgaggatggcgccttcgagggtctgccccgcctgacccatctcaacctctccaggaattccctcacctgcatctccgacttcagcctccagcagctgcgggtgctagacctgagctgcaacagcatcgaggcctttcagacggcctcccagccccaggctgagttccagctcacctggcttgacctgcgggagaacaaactgctccatttccccgacctggccgcgctcccgagactcatctacctgaacttgtccaacaacctcatccggctccccacagggccaccccaggacagcaagggcatccacgcaccttccgagggctggtcagccctgcccctctcagcccccagcgggaatgccagcggccgccccctttcccagctcttgaatctggatttgagctacaatgagattgagctcatccccgacagctttcttgagcacctgacctccctgtgcttcctgaacctcagcagaaactgcttgcggacctttgaggcccggcgcttaggctccctgccctgcctgatgctccttgacttaagccacaatgccctggagacactggaactgggcgccagagccctggggtctctgcggacgctgctcctacagggcaatgccctgcgggacctgcccccatacacctttgccaatctggccagcctgcagcggctcaacctgcaggggaaccgagtcagcccctgtggggggccagatgagcctggcccctccggctgtgtggccttctccggcatcacctccctccgcagcctgagcctggtggataatgagatagagctgctcagggcaggggccttcctccacaccccactgactgagctggacctttcttccaatcctgggctggaggtggccacgggggccttgggaggcctggaggcctccttggaggtcctggcactgcagggcaacgggctgatggtcctgcaggtggacctgccctgcttcatctgcctcaagcggctcaatcttgccgagaaccgcctgagccaccttcccgcctggacacaggctgtgtcactggaggtgctggacctgcgaaacaacagcttcagcctcctgccaggcagtgccatgggtggcctggagaccagcctccggcgcctctacctgcaggggaatccactcagctgctgcggcaatggctggctggcagcccagctgcaccagggccgtgtggacgtggacgccacccaggacctgatctgccgcttcagctcccaggaggaggtgtccctgagccacgtgcgtcctgaggactgtgagaaggggggactgaagaacatcaacctcatcatcatcctcaccttcatactggtctctgccatcctcctcaccacgctggccgcctgctgctgcgtccgccggcagaagtttaaccaacagtataaagcctaaagaagccgggagacactctaggtaaaaagcctcacccagatgacccccatccctcataccatggagtcatgagctgtctgggaagaatggacgtgctgggaccaactcaagaccttgttttgctgtcttcatcatcttacctgtgcttggcccacagtctggctcatgatgtgggctcagtaatgtgcgagaaagtgaaaatgccactctctccaccccattttacagaggagaacaccaaggcccagaggaagttaagggagagtcaatgggcagagccagggctaggccctggtggtgtgtggagcacccaggcagacccagtcctggttgggatcacacccacgggtgctactgcacgtaacactcctccttaggcctggaggccaaggtgtgggtccccacgcctgatctttgaaaacactacacagggctgctgtcacttcccagggcccaggcctcagcccaggcctcgggaccaactctttgtataacctacctgaatgtattaaaaactaattttggagaa

SEQ ID NO: 284888 - DNA, 4311 bp, Artificial Sequence
  derived and/or modified sequence
gtccgcagcagctctcccaggaccccactctgccagtaagtcagctgaggccgagaggagggagagaggacctcagaggccagactgtgagctagtctgccctgctcctgcgtgtgaggggtcgttggcagggcttagggaaggagaccttgatttggtatagtgggaacatttgctttggagacagatgaactggattctgatcgtgaccctgctattttctccttgtgtgactttggagccatgagaccccagatcctgctgctcctggccctgctgaccctaggcctggctgcacaacaccaagacaaagtgccctgtaagatggtggacaagaaggtctcgtgccaggttctgggcctgctccaggtcccctcggtgctcccgccagacactgagacccttgatctatctgggaaccagctgcggagtatcctggcctcacccctgggcttctacacagcacttcgtcacctggacctgagcaccaatgagatcagcttcctccagccaggagccttccaggccctgacccacctggagcacctcagcctggctcacaaccggctggcgatggccactgcgctgagtgctggtggcctgggccccctgccacgcgtgacctccctggacctgtctgggaacagcctgtacagcggcctgctggagcggctgctgggggaggcacccagcctgcataccctctcactggcggagaacagtctgactcgcctcacccgccacaccttccgggacatgcctgcgctggagcagcttgacctgcatagcaacgtgctgatggacatcgaggatggcgccttcgagggtctgccccgcctgacccatctcaacctctccaggaattccctcacctgcatctccgacttcagcctccagcagctgcgggtgctagacctgagctgcaacagcatcgaggcctttcagacggcctcccagccccaggctgagttccagctcacctggcttgacctgcgggagaacaaactgctccatttccccgacctggccgcgctcccgagactcatctacctgaacttgtccaacaacctcatccggctccccacagggccaccccaggacagcaagggcatccacgcaccttccgagggctggtcagccctgcccctctcagcccccagcgggaatgccagcggccgccccctttcccagctcttgaatctggatttgagctacaatgagattgagctcatccccgacagctttcttgagcacctgacctccctgtgcttcctgaacctcagcagaaactgcttgcggacctttgaggcccggcgcttaggctccctgccctgcctgatgctccttgacttaagccacaatgccctggagacactggaactgggcgccagagccctggggtctctgcggacgctgctcctacagggcaatgccctgcgggacctgcccccatacacctttgccaatctggccagcctgcagcggctcaacctgcaggggaaccgagtcagcccctgtggggggccagatgagcctggcccctccggctgtgtggccttctccggcatcacctccctccgcagcctgagcctggtggataatgagatagagctgctcagggcaggggccttcctccacaccccactgactgagctggacctttcttccaatcctgggctggaggtggccacgggggccttgggaggcctggaggcctccttggaggtcctggcactgcagggcaacgggctgatggtcctgcaggtggacctgccctgcttcatctgcctcaagcggctcaatcttgccgagaaccgcctgagccaccttcccgcctggacacaggctgtgtcactggaggtgctggacctgcgaaacaacagcttcagcctcctgccaggcagtgccatgggtggcctggagaccagcctccggcgcctctacctgcaggggaatccactcagctgctgcggcaatggctggctggcagcccagctgcaccagggccgtgtggacgtggacgccacccaggacctgatctgccgcttcagctcccaggaggaggtgtccctgagccacgtgcgtcctgaggactgtgagaaggggggactgaagaacatcaacctcatcatcatcctcaccttcatactggtctctgccatcctcctcaccacgctggccgcctgctgctgcgtccgccggcagaagtttaaccaacagtataaagcctaaagaagccgggagacactctaggtcagtgggggagcctgaggtacagagaagagtgaggactgactcaaggtcacacagtgatccgggatcccagaactctggtctccaaattacagcccaggacacctttctctgccgcctgctgcatcagtgggtgacccccttcccgggctgcactttgggtccagctgtggaagccagaagttgggcggtttcagggacagccgagaataatgttgacctgtcagatcaacaaatcttcactgagcatgtattttgtgccacaccctgctctgggcactgggaatgctgggaaatgagatacattcccgccctcaagaatctcccagtctggtaggagagagtgctgcagagccacgtggccgccacgcagtgtgcttagggcctgaggtgtgaaagcccagggctccagagctcggcaggccccgctggtttggtgcggtgagtcctgccccggctgtgccagggtgagggagggccaagcccaggaggatttgtctgagacatttccaagcagactgtttgtcacgtcttctgagaatgactttcagtctctctgaaaatgaaaagcttaggaccagaagagagaattggagctgtacgagtgtgtctcggatctggtgttgttaggtgggccacggcggctccagcagggtctggttaaggggtccagcccagcactggaccattccgtctcctgctctggacttgccctctcccttcctggcactctcatgttgcataccctgaccccagtgctgctctaagcaccgtccctgcccagccccacttctccatcgcagccccaccttggctgctgagccaggagctaaaaccttagatatctggttctgttttgcacccagcttggcagatgtggatttgaatccaagccttgtgtctgcccctatgtgacagctctatattttatccccgttttataaaagaggaaactgaagttctgaaaatctccttccagggccccagctaactaatgccataggtgagattcaaaccttcatccttctgtctccagggcctgatctttaccactgcaggggctgcaggccgttaagtggacaggaagtggccccacatagcccgagcagggtctggaagcatcctgtgctgtgcacacctgctctctcctctctcccaggcaggcagctgcaggcgctctcctccttctctgcctgtttccctcctcccttcctttccaccctggtgtgggttctcctgttctctctgtgctcttgcattctctcattcccttttcctctattgagcagagcctggagtttgagactatggaatccaacctccccattgcacagatggggaaactgaggcttaggaagagaatgaaacttgtggagagcttatacagagcctctgggggaaaaaagagcccttatttgtggggtgagattgggggttggaccagagtgatgtcctctctcagctatcacatcacaagataatgctggctccaaacttcctttctgtgcctcatcatgcaaggatcttttttccctcttacaaaaacaggtaaaaagcctcacccagatgacccccatccctcataccatggagtcatgagctgtctgggaagaatggacgtgctgggaccaactcaagaccttgttttgctgtcttcatcatcttacctgtgcttggcccacagtctggctcatgatgtgggctcagtaatgtgcgagaaagtgaaaatgccactctctccaccccattttacagaggagaacaccaaggcccagaggaagttaagggagagtcaatgggcagagccagggctaggccctggtggtgtgtggagcacccaggcagacccagtcctggttgggatcacacccacgggtgctactgcacgtaacactcctccttaggcctggaggccaaggtgtgggtccccacgcctgatctttgaaaacactacacagggctgctgtcacttcccagggcccaggcctcagcccaggcctcgggaccaactctttgtataacctacctgaatgtattaaaaactaattttggagaagc

SEQ ID NO: 284889 - DNA, 801 bp, Artificial Sequence
  derived and/or modified sequence
gtccgcagcagctctcccaggaccccactctgccagtaagtcagctgaggccgagaggagggagagaggacctcagaggccagactgtgagctagtctgccctgctcctgcgtgtgaggggtcgttggcagggcttagggaaggagaccttgatttggtatagtgggaacatttgctttggagacagatgaactggattctgatcgtgaccctgctattttctccttgtgtgactttggagccatgagaccccagatcctgctgctcctggccctgctgaccctaggcctggctgcacaacaccaagacaaagtgccctgtaagatggtggacaagaaggtctcgtgccaggttctgggcctgctccaggtcccctcggtgctcccgccagacactgagacccttgatctatctgggaaccagctgcggagtatcctggcctcacccctgggcttctacacagcacttcgtcacctggacctgagcaccaatgagatcagcttcctccagccaggagccttccaggccctgacccacctggagcacctcagcctggctcacaaccggctggcgatggccactgcgctgagtgctggtggcctgggccccctgccacgcgtgacctccctggacctgtctgggaacagcctgtacagcggcctgctggagcggctgctgggggaggcacccagcctgcataccctctcactggcggagaacagtctgactcgcctcacccgccacaccttccgggacatgcctgcgctggagcagcttgacctgcatagcaacgtgctgatg

SEQ ID NO: 284890 - DNA, 1989 bp, Artificial Sequence
  derived and/or modified sequence
atgaggccccagatcctgctgctgctggccctgctgaccctgggcctggccgcccagcaccaggacaaggtgccctgcaagatggtggacaagaaggtgtcctgccaggtgctgggcctgctgcaggtgcccagcgtgctgcccccagacacagagaccctggacctgagcggcaaccagctgcggagcatcctggccagccccctgggcttctacacagccctgcggcacctggacctgagcaccaatgagatctccttcctgcagcccggggccttccaggccctgacccacctggagcacctgagcctggcccacaaccggctggccatggccacagccctgtctgctgggggcctgggccccctgccccgggtgaccagcctggacctgagcggcaacagcctgtacagcggcctgctggagcggctgctgggggaggcccccagcctgcacaccctgagcctggccgagaacagcctgacccggctgaccaggcacaccttccgggacatgcctgccctggagcagctggacctgcacagcaatgtgctgatggacattgaagatggagcctttgagggcctgccccggctgacccacctgaacctgagcaggaacagcctgacctgcatcagtgacttcagcctgcagcagctgcgggtgctggacctgagctgcaacagcattgaggccttccagacagccagccagccccaggccgagttccagctgacctggctggacctgcgggagaacaagctgctgcacttcccagacctggccgccctgcccaggctcatctacctgaacctgagcaacaacctgatccggctgcccactggaccaccccaggacagcaagggcatccacgcccccagcgagggctggagcgccctgcccctgagcgcccccagcggaaatgccagcggccggcccctgagccagctgctgaacctggacctgagctacaatgaaattgagctgatcccagacagcttcctggagcacctgaccagcctgtgcttcctgaacctgagcaggaactgcctgcggacctttgaggcccggcggctgggcagcctgccctgcctgatgctgctggacctgagccacaatgccctggagaccctggagctgggcgcccgggccctgggcagcctgcggaccctgctgctgcagggcaatgccctgcgggacctgcccccctacacctttgccaacctggccagcctgcagaggctgaacctgcagggcaacagagtgagcccctgtggcggcccagatgagcccggccccagcggctgtgtggccttcagcggcatcaccagcctgcggagcctgagcctggtggacaatgaaattgagctgctgcgggccggggccttcctgcacacccccctgacagagctggacctgagcagcaaccctggcctggaggtggccactggagccctgggcggcctggaggccagcctggaggtgctggccctgcagggcaatggcctgatggtgctgcaggtggacctgccctgcttcatctgcctgaagaggctgaacctggctgaaaatcggctgagccacctgcctgcctggacccaggccgtgtccctggaggtgctggacctgaggaacaacagcttcagcctgctgcccggcagcgccatgggcggcctggagaccagcctgcggcggctgtacctgcagggcaaccccctgagctgctgcggaaatggctggctggccgcccagctgcaccagggccgggtggatgtggatgccacccaggacctgatctgccgcttcagcagccaggaggaggtgtccctgagccacgtgcggcctgaggactgtgagaagggcggcctgaagaacatcaacctgatcatcatcctgaccttcatcctggtgtctgccatcctgctgaccaccctggccgcctgctgctgcgtgcggcggcagaagttcaaccagcagtacaaggcctag

SEQ ID NO: 284891 - DNA, 561 bp, Artificial Sequence
  derived and/or modified sequence
atgaggccccagatcctgctgctgctggccctgctgaccctgggcctggccgcccagcaccaggacaaggtgccctgcaagatggtggacaagaaggtgtcctgccaggtgctgggcctgctgcaggtgcccagcgtgctgcccccagacacagagaccctggacctgagcggcaaccagctgcggagcatcctggccagccccctgggcttctacacagccctgcggcacctggacctgagcaccaatgagatctccttcctgcagcccggggccttccaggccctgacccacctggagcacctgagcctggcccacaaccggctggccatggccacagccctgtctgctgggggcctgggccccctgccccgggtgaccagcctggacctgagcggcaacagcctgtacagcggcctgctggagcggctgctgggggaggcccccagcctgcacaccctgagcctggccgagaacagcctgacccggctgaccaggcacaccttccgggacatgcctgccctggagcagctggacctgcacagcaatgtgctgatgtag

SEQ ID NO: 284892 - DNA, 1989 bp, Artificial Sequence
  derived and/or modified sequence
atgcggccccagatcctgctgctgctggccctgctgaccctgggcttggccgcccaacatcaggacaaggtcccatgtaagatggtggacaagaaggtgtcgtgccaggtacttggccttctccaggtgccttctgtgcttcctcccgacacagaaacacttgatcttagtgggaaccagctacgtagtatcttggcaagtcctctcggattttataccgccttacgtcatttagacttaagcactaacgagatcagctttcttcagcccggtgcctttcaggctctaacgcacctcgagcatctgtctctggcccacaaccgactggctatggcaacagccctgagcgcgggaggactcggaccactgccacgagttacctccctggacctcagcgggaattcactctactctgggctcctggaaagattattgggggaggctccctctctccacacccttagcctggccgaaaacagtttgactagactgactcgccacaccttccgcgacatgccagccttggaacagttagatctccattccaacgtgctgatggacatcgaggacggcgcatttgaggggttgcctagattgacccacctgaacctgagccgcaacagcctaacttgtataagcgacttttccctgcagcagctccgggtgcttgacctcagttgtaatagtatcgaggcctttcagaccgctagtcagcctcaggctgagtttcaactgacctggctcgatcttcgggaaaacaagcttcttcattttccggatctggccgccctcccgaggcttatttacctgaatctgagtaacaatctgattcgtctccctacggggcctccccaggactcgaagggcatccacgccccttccgagggatggagtgcgctgcccttgtctgccccaagcggcaatgccagcggacgtcccctttcgcaactgctcaatctggatctgtcgtataatgaaatcgaactgatccctgacagttttttggagcacttgacatctctgtgctttttgaatctgagcaggaactgcttaagaacatttgaagccaggcgattggggagcctgccatgtttaatgctgcttgacctgtctcacaatgctctggagactttagagctaggggcgagagcccttggtagcctccggaccctgcttctgcagggaaacgctcttcgcgacctgccaccatatactttcgcaaacctggccagtctgcagcggttaaatcttcagggaaatagggtaagtccctgtggagggcctgacgagcccggccctagcggctgtgtggcattcagcgggatcacatctctaagatcattgagtctggtcgacaatgagatcgaactcttacgagccggagctttcctgcatacgcccctgaccgagctcgacctcagttccaacccgggattggaggtggccacgggcgccttggggggactggaagcctcactcgaagtcttagctctacaaggtaacggactgatggtcctgcaggtggatctaccttgcttcatctgcttaaagaggttgaatctagcggaaaaccgactgagccacctgccagcctggacccaagctgttagtctggaggtcctcgatctgaggaacaactcatttagtttactgcccgggagcgccatgggaggcctcgaaacgtccctgcggcgcctgtacttacagggaaatcccttgtcctgctgcgggaacggttggctggccgcacaacttcatcagggaagagttgacgtcgatgccacccaagacctgatttgcagattcagctctcaggaggaggtgtccctttcccacgttaggcccgaggactgcgaaaaaggcgggctgaaaaatattaatttgatcattattctgacttttatcctcgtgtcagctattcttttaacgacgctagctgcatgttgttgcgtgcgcaggcaaaagtttaaccagcaatacaaagcttag

SEQ ID NO: 284893 - DNA, 1989 bp, Artificial Sequence
  derived and/or modified sequence
atgcggccccagatcctgctgctgctggccctgctgaccctgggccttgcagcgcaacatcaggacaaggtcccttgcaagatggtcgacaagaaggtttcttgccaagtgctgggcttgctccaagtgccttcggtgctgcctcccgacacggagactctggaccttagtggtaaccagctgcgctccattctagcttccccactcggcttctacaccgcattgcggcacttagatctcagtaccaatgaaatctcttttttgcaacctggtgccttccaggcactcacccatttggaacacttaagcctggcccacaaccgactggccatggctacggccctgtctgccggggggctgggacctttaccacgtgtgactagtcttgacctgtctggcaatagtctgtatagtggcctcctggaacggctcctcggagaggccccttccctgcacactctgtcgctcgctgaaaattcccttacacgcttgaccagacacacctttagggacatgccagcactcgagcagctcgacttgcattcaaatgtgctgatggacattgaagacggggcgtttgaggggcttccaagacttacccacctgaacctgagccgaaattcactcacttgtattagcgattttagcctccagcagctacgtgtgcttgatctatcgtgtaactccattgaggccttccagacagcatctcagcctcaggccgaattccaactgacctggttagatttgcgcgaaaataagttgctccattttccagacctagctgccctgcctagactgatttacctgaacctgtctaataacctcattcgactacctaccggcccccctcaagactcaaaaggaattcacgctcctagcgaagggtggtcagccctccctctgtctgctccttctggcaatgcctccggccgcccactgagccagctgctgaacttggatctgtcctataatgagatagagctgatccccgatagctttctggaacacctaacctctttatgttttctgaatctcagcagaaattgtctccggacctttgaagccagaaggcttggaagcttgccctgtcttatgttactcgatctttctcacaacgccttggagaccctcgagctgggggcccgtgctctgggctctctgcgcactttgctgctacaaggaaacgctctgagagatctgcccccttacaccttcgcaaatcttgcctctctgcaacgactgaacctgcagggaaatagggtctctccatgtggagggccggatgaaccaggccccagcggctgcgtcgccttcagtggaataaccagtcttcgcagcctcagcctggtcgacaatgaaattgagctgcttagggctggagcttttctgcacacaccgttgacagaattggatttaagtagtaatcctgggctcgaagtggctactggggcactggggggactcgaagcgagtctggaagttttggcactccagggcaacgggctgatggtgctgcaggtggacctgccgtgttttatatgcctgaaacggctcaaccttgcagaaaataggctgagccatctgcctgcctggacccaggcagtgagcttagaagtcttagacctgaggaacaacagcttcagcctgctgcctgggagcgccatgggcggtctggaaacctcattacggagattgtatcttcagggaaatcctctctcatgttgtggcaatggctggctagcggctcagctgcaccagggtcgagtcgacgtggacgccacacaggatctgatatgccggttctccagccaggaagaagttagcctgtctcatgttcggcccgaggattgtgaaaagggtggcttgaaaaatataaatttaatcatcattctgacatttatattagtttctgcaattctcctgacaacattggcagcttgctgctgtgtcaggagacagaagttcaatcaacagtataaggcttag

SEQ ID NO: 284894 - DNA, 1989 bp, Artificial Sequence
  derived and/or modified sequence
atgcggccccagatcctgctgctgctggccctgctgaccctgggcttggcagcccaacaccaggataaagtgccttgtaagatggtagacaaaaaggtgtcctgtcaggtgttaggtttactgcaagttccttctgtgcttccaccagatacggaaactctggatctctctggaaaccagcttcggagcatcctggctagcccattgggcttctatactgccctgcggcatctggacctgagtaccaatgagatcagctttctacagccgggagctttccaggctctgactcatctagaacatttgtcactggcacacaacagattggccatggctaccgcactgtcagcaggtggcttggggccgctaccccgagttacaagtctggacttatctgggaattcactctattccggcctgctggagcggctgttaggggaagcccctagcctccatacccttagtctggccgagaactctttgacccgcttgacgaggcacacttttcgcgacatgcctgccttggaacagctagacctccatagcaacgttttgatggatattgaggacggggccttcgaggggctgcctcgcctgacccatctgaacttgagccggaattcccttacctgtatttccgacttcagtctgcagcagctgagagtgcttgacctatcctgcaattctatcgaagcctttcagacagcgagccagccccaggctgagtttcagctgacctggttggatctgcgcgagaataagttgctgcattttccagacttagccgccctccctagacttatctatctcaacctttcaaataatttgattcgactccctaccggccctccacaggactccaaaggcatccatgccccctcggagggatggtccgcactgccactttcggcgccctcaggcaacgcttccggccgtcccctgagtcagctgctgaatttggacctcagctacaatgaaatcgagctcattcctgattcgtttttggaacacctaacaagtctgtgcttccttaatctcagccgcaattgtctgaggacttttgaggcccgtcggctgggtagcctgccctgcctgatgttactagacctgtcgcacaacgcgttagagacattagagctcggagcaagggcactgggatctctgcggacactcttactgcagggcaacgcattgcgcgacctccctccatacaccttcgccaacttggcttcacttcagcggttgaatctccaaggaaatcgagtgtcaccttgcggcgggccagatgagcccggaccgagtggatgcgtggcatttagcgggatcacgtcgctgaggagcctgtcactggttgacaatgagatcgagctcctcagagcaggagcatttctacacacgcctctaacagaattagatctgtccagtaaccccggactagaagtggctactggcgcactgggtggcctggaagcaagtctggaagttctcgcacttcaggggaacggactaatggtgctacaggtcgacctgccctgcttcatctgtctgaaaagactgaacttggccgagaataggcttagtcatcttcctgcctggactcaggccgtatcattagaggtgctggacctgcggaataattccttttcgctcttgcctgggagtgcaatggggggcctcgagaccagcctccgtagactatacctacaggggaatccattatcgtgctgcggaaacggatggctggccgcccagctgcatcaaggacgcgtcgacgtggacgcaacacaagacttaatctgccgctttagttcccaggaggaagtaagcttatctcatgtccggccagaagactgtgagaaggggggcctgaagaacataaacctgattattatccttacctttatcctcgtttcagctattttacttacaaccctcgctgcctgttgctgcgtcaggagacaaaagttcaaccagcaatataaagcctag

SEQ ID NO: 284895 - DNA, 561 bp, Artificial Sequence
  derived and/or modified sequence
atgcggccccagatcctgctgctgctggccctgctgaccctgggcctggctgcacagcaccaagataaggtgccatgtaagatggttgacaaaaaggtgagctgtcaggtattaggcttgcttcaagttccctcagttctccctcccgatacagagacgctggatctgtccgggaaccagctccgctcgattctcgcttccccactgggattctacacagccctgcgtcacttggacctctcgactaacgagatcagcttcctccagccaggtgcctttcaggcattgacccacttggagcacctgtctctagcgcataacagacttgctatggcaactgctctgtcagctggcggtctgggacctcttccgcgcgtcacatcgttggatctcagtgggaactcattatacagcggcttactagagcgcctgcttggagaagcgccctcactgcataccctatcacttgctgagaattcactgactagactgactcgacacacctttagggacatgccagcactcgagcagctggacctgcacagcaatgtcctgatgtag

SEQ ID NO: 284896 - DNA, 1989 bp, Artificial Sequence
  derived and/or modified sequence
atgcgcccacaaatcttgctgttactcgccttgctaactctgggactggcagctcaacaccaggacaaagtgccctgcaaaatggtggacaaaaaggtgtcgtgccaagtgttaggcttgctacaggtgccgagcgtcttgccaccagacactgagacgctagatctcagtggcaaccagctccgctcaatactcgcttcgccactgggattctacacagctcttagacacctggacctgagcaccaatgaaatttcattcctccaaccaggggcattccaggccctcactcatctcgagcacctgagcctggctcacaacaggctggctatggcaactgccttgtccgccggaggcctaggccctctgccccgtgtaacctccctcgacctctccgggaacagcctgtacagtgggctcctcgagaggctcctgggggaagccccttccctacacactttgagtcttgccgaaaactcgctgacccgcctgacacgccacacctttagagatatgccggctctggagcagttggacctgcactctaacgtgctcatggatattgaagacggggcttttgaaggattgccgaggctgacccatctgaacttgtctcgaaatagcctcacctgtatctccgactttagtctccagcagctgcgagtgttggacctgtcttgcaacagtatcgaggcttttcaaaccgcctcccagccacaggctgagtttcaactcacctggctggacttaagagaaaataagttacttcactttcctgatctggcggctctgcctaggttgatctatctgaacttgtccaacaatctgatacgattgccaacaggacctcctcaggactctaagggtattcacgcaccatccgaaggctggtcagctctgcctctcagtgcaccaagtggcaacgccagcggtcgccctctatctcagcttcttaatttagacctgagctataacgaaatagagctgattcctgactcatttctcgagcacttaacatccctgtgctttttgaacctgtcccggaattgcctgagaacctttgaggccagaagactggggtcactaccctgtttaatgctgctggatctgtcccacaacgccctggaaactcttgagctgggtgcaagggctctgggttctctacggacgttgctcctgcagggaaacgcccttagagacttgccaccctacaccttcgcgaacctggccagtctgcagcgcctgaacctgcagggcaatagggttagcccctgtggaggccctgacgagcccggacctagcggatgcgtggctttctcaggaattacttctctgcggtccctttccctggttgacaacgaaattgagcttttaagggccggagcctttctgcacaccccattgactgagcttgatctgagttctaatcccggacttgaagttgctacgggcgctctgggcggactcgaagcgagtctggaagtcctggcactccagggaaatggcctaatggtactgcaggttgatttaccgtgtttcatctgcctcaagcgcctcaaccttgccgagaaccgcctctctcacctccccgcatggacacaggctgtttcattggaggtccttgatctgagaaacaactcctttagccttctaccgggtagcgccatgggcggacttgaaaccagcttgaggaggctctacctgcaggggaaccctctctcgtgctgtggcaatggttggctggcagcgcagctgcaccaaggtagagtcgatgtggacgccacccaagaccttatttgccggtttagttcccaagaagaggtcagtctgtcacacgtgagaccagaggattgtgaaaagggtggccttaaaaatatcaatcttatcatcatacttaccttcatattagtctcagcaatactgctaacgacactggcagcctgttgctgcgtcagacgtcagaagttcaatcagcaatataaggcttag

SEQ ID NO: 284897 - DNA, 1989 bp, Artificial Sequence
  derived and/or modified sequence
atgcgcccacagattctgctgttactggccctccttaccctgggcctggccgctcagcaccaagataaagtgccatgtaagatggttgacaaaaaggtgagttgccaagtgctcggactgcttcaggtaccctccgtgctgcctcctgatactgagaccctcgatctgtccggcaatcagctgaggtcaatcctagcctcacctctgggcttctacactgccctgaggcaccttgatttgtcaacaaacgagatctctttcctccaaccgggtgcctttcaggccctgacacacctcgaacacctgtcattggcccataatagactcgccatggctaccgccctgagcgctggaggacttgggccactcccccgtgtaacatctctcgacttatccgggaacagtctgtacagtggcttactggaaaggctcctgggtgaagccccatccctgcacaccctctctttggctgagaattcgctcacacggctcactagacacactttccgggatatgcccgcactggagcaactagatctccattcgaatgtactgatggacatagaagacggagccttcgaggggcttcccagactcacacatctgaacctcagccggaatagcctgacctgtattagtgatttttctttgcaacaacttagagttttggatctgagttgtaactctatcgaggctttccagacagcaagccagccccaggctgagttccaactcacctggctagatctacgggagaataaactactgcattttcccgacctggctgcactcccgagattaatttacttgaatctgtcaaacaatctcatcagattgcccacgggaccaccacaggacagtaaggggatccacgcaccttctgaaggctggtctgctctccccctgagtgcgccaagcggaaacgcctctgggaggcctctgtcccaactgctgaatctggatcttagctataacgaaatcgaacttatccctgatagcttcttggagcacctaacctccttgtgttttctaaatctctcccggaactgcctaaggacatttgaggctcgacggctgggatcactaccgtgtttaatgctcctggatctgtcccacaatgcccttgaaactttagagctcggcgctcgcgcattggggagcctaagaaccctcctcctccagggaaatgcccttcgcgatctcccaccatatactttcgccaatttggccagcctacagaggctgaacctgcagggcaaccgggtgagcccctgcgggggtcctgacgaaccaggaccaagtgggtgtgtggcctttagtggaatcactagtctcaggtctctgtcactggttgataatgagatagagttactgagagcaggcgctttcctgcacactccactgacagaactggatttgtcctccaatccgggactggaggtcgcaacaggagctcttggagggcttgaggcttcactggaagttctggcccttcagggaaatggcttaatggtgttgcaagtggacttaccgtgcttcatctgtctgaagagactgaacctggccgagaatagactgagccacctccctgcgtggactcaagctgttagcctcgaggtgctagacttgaggaataactctttctctctgttgcccggatccgcaatgggaggtctggaaacgtctttaagaagactctatctccagggcaacccactttcctgctgtggcaatgggtggctggccgctcagctacaccagggcagggttgacgtcgacgccactcaagatttgatctgtcgcttctcgagtcaagaggaagtctcccttagtcacgtccggcctgaagattgtgagaagggtggcctgaaaaacatcaatctgatcattatcctgacgttcatattagtgtctgctatccttttgaccacattggctgcttgttgttgcgtgagaaggcaaaagttcaatcagcaatacaaagcctag

SEQ ID NO: 284898 - DNA, 1989 bp, Artificial Sequence
  derived and/or modified sequence
atgcgccctcaaattctccttctcttggctctgctaactctcggcctagctgctcagcaccaggataaggtaccttgtaagatggtggataagaaagtgagctgtcaagtgctggggctgctgcaggtcccttccgtgctccctcccgacaccgagacgctggatctatcagggaatcagctgagatcaatcctagcatccccactgggattctacacggcactccggcacctggatctcagtacaaacgaaatctccttccttcagccaggggcttttcaagcactcacacacctggaacatctgagcctggcacataaccggctggctatggctacggctctttcagctggcggactcggcccactaccgcgagttacttctttagacttgtctggaaactccctatactctgggctgctcgaaagactcctcggagaagccccatctcttcacacactgtctcttgcagagaacagcctcacgcgtttgactaggcacacttttcgtgacatgccagcgctggaacagctggacttgcatagcaatgtactcatggatatcgaagatggggcattcgaggggctacctcggcttacccatctgaatctgagcaggaattctcttacctgtattagtgatttttctctgcagcagcttagggtgctcgatttatcctgtaactcaatcgaggccttccagactgctagtcagccacaggcagaatttcagttgacatggctcgaccttcgtgagaacaaacttctacattttcctgacctggccgcactgccaagattaatttatctcaatcttagcaataatctcatcaggctcccaactggaccccctcaagatagcaagggaatccacgcacccagtgaaggttggagcgctctgcccctcagcgccccatctggtaatgcctcaggacggcctctgagccaattgctcaatctggatctctcatacaatgagattgagctgatccccgattcttttctggaacatcttactagcctgtgttttctcaatttgtctaggaattgccttaggactttcgaggccagaagactcggttcacttccctgcctcatgctgttagacctttcacacaatgctctggagactctagaactgggggcacgggctctgggctcacttagaactctgttgctccagggtaacgccttgcgcgatctccccccatacaccttcgccaaccttgcctccctgcaaaggctgaatttgcaaggaaatagagtgtctccttgcgggggaccggacgaaccgggtcccagtggatgcgtggcatttagcgggattacgtcgctacgcagtctatctctggtggataacgagattgagctacttagggctggagcgttcctccacaccccattgactgagctggatttgagttcgaaccccggtctcgaggtggccaccggcgctctgggcggactagaagcatccctggaagtgctcgctcttcaaggaaatggactgatggttttgcaggtggacctgccttgttttatctgcctgaagcgactgaatttagccgagaacaggctgtctcacctgccagcttggacacaggcagtgagcctcgaggtcttagatctcaggaataactccttttccctgctgccagggtccgcaatggggggtttagaaactagcttacgcaggctgtatcttcaagggaatccacttagctgttgcggtaacggatggttagcagcccagctgcaccagggccgagttgacgttgatgctacacaggatttaatatgtcggttctcttctcaggaggaagtcagcttgagtcacgtccgccctgaagactgtgagaaagggggattgaagaatatcaacctaatcatcatccttactttcatcctagtgtctgccatactccttacgaccctggctgcgtgctgttgcgtgagaagacaaaaatttaatcagcagtataaggcctag

SEQ ID NO: 284899 - DNA, 561 bp, Artificial Sequence
  derived and/or modified sequence
atgcgcccacagattctactgttattggcattactgacattgggcctggctgcacagcaccaggacaaggtcccgtgcaagatggtcgataagaaagtgagttgccaggtactgggcttgcttcaagttccctcagtcctaccccctgacacggagactttagacctttccgggaaccagctccgcagtatccttgccagccctcttggcttctacaccgctcttaggcacctggacttgtctactaacgaaatcagctttttgcagcctggggctttccaggcgttgacccatctagaacatctgagtctagcccataacagactcgccatggctacagctctaagcgccggagggctggggcctctccctcgggtgacgtcgttggatctgagcggcaacagcctctactcagggctgctggagcgcttgttgggtgaagcaccatccctgcatacactttccctcgccgagaattccttgacaaggcttacgaggcatacatttagagatatgcccgctctagaacagctcgatctccatagcaacgttcttatgtag

SEQ ID NO: 284900 - protein, 260 aa, Artificial Sequence
  derived and/or modified sequence
MSDPITLNVGGKLYTTSLATLTSFPDSMLGAMFSGKMPTKRDSQGNCFIDRDGKVFRYILNFLRTSHLDLPEDFQEMGLLRREADFYQVQPLIEALQEKEVELSKAEKNAMLNITLNQRVQTVHFTVREAPQIYSLSSSSMEVFNANIFSTSCLFLKLLGSKLFYCSNGNLSSITSHLQDPNHLTLDWVANVEGLPEEEYTKQNLKRLWVVPANKQINSFQVFVEEVLKIALSDGFCIDSSHPHALDFMNNKIIRLIRYR

SEQ ID NO: 284901 - protein, 37 aa, Artificial Sequence
  derived and/or modified sequence
MSDPITLNVGGKLYTTSLATLTSFPDSMLGAMFSGKM

SEQ ID NO: 284902 - protein, 71 aa, Artificial Sequence
  derived and/or modified sequence
MSDPITLNVGGKLYTTSLATLTSFPDSMLGAMFSGKMPTKRDSQGNCFIDRDGKVFRYILNFLRTSHLDLP

SEQ ID NO: 284903 - DNA, 3585 bp, Artificial Sequence
  derived and/or modified sequence
aaggccagccggccggacaccggcggggacgaggcggggcgcagagcaactcgctgcaatgcctcctgggagatggagttcgctctcgacgcgccgagctgcgaggagcccagagagaactaccagtcccggaaggcagcgcacagaccccggaccgccacgcccctgggctgggctcctaccctccgcccccctcgcaaagctgcgctggccgctcgcggagggagaggctgcagagcgagggcaggaggactacttccagcaacccagtctcctgccatgtccgaccccatcacgctgaacgtcggggggaagctctatacaacctcactggcgaccctgaccagcttccctgactccatgctaggcgccatgttcagcgggaagatgcccaccaagagggacagccagggcaactgcttcattgaccgtgacggcaaagtgttccgctatatcctcaacttcctgcggacctcccaccttgacctgcctgaggacttccaggagatggggctgctccgcagggaggccgacttctaccaggtgcagcccctgattgaggccctgcaggagaaggaagtggagctctccaaggccgagaagaatgccatgctcaacatcacactgaaccagcgtgtgcagacggtccacttcactgtgcgcgaggcaccccagatctacagcctctcctcttccagcatggaggtcttcaacgccaacatcttcagcacctcctgcctcttcctcaagctccttggctctaagctcttctactgctccaatggcaatctctcctccatcaccagccacttgcaggaccccaaccacctgactctggactgggtggccaatgtggagggcctgccagaggaggagtacaccaagcagaacctcaagaggctctgggtggtgcccgccaacaagcagatcaacagcttccaggtcttcgtggaagaggtactgaaaatcgctctgagcgatggcttctgcatcgattcttctcacccacatgctctggattttatgaacaataagattattcgattaatacggtacaggtaaaaggaccccaacaacactggagatggggagtcccaggaagctcatgtcagccaggtcttggagggcatctcgccagtggtgcgaggcaggggactatactaatctgtattaattgtgtagcaggacttgattccccccatgatgaagtccaccttttggaatccagtgtcctctgaacagaaccaccttttttcttgccattttgagctgcagacaggcggtttattatgacaagtgaagagtcagctgatgtgtactaaaggaggccataggaggattttccagccaggacaaaagagcagcagttttctcctgggctccatctctctgtaccgctagccagtgccgcatttatccatctgtaagaaggccctggtggagaggatgggatgagaacaagaggctacctccagttaaccaggacataaagtccccagcggttcctgtcacacctgctcctccctccccagggtgcatccatgatcgtggatgtttgcccaggggtgaccatgtttggctggcttggaatgctgtgcattctcagagctctgttagtgtcccctcttgggggtcagagatgaggtgtggcagggtctagaggaatgagtgtccaggcagagttcagaaggtaggaatgtccctcttgatagggctgaatcaagggattcctggctttagaaagggtctgctatctttgcaaaaatgtgcaagtatctgtagccagtgtaatgaaatcacttccaaatccagcctgttacctgacttttgtcattgttttcccaaaaatttgaggtatcattgaaacaggtcattttaaacaaatctattacggattctcagggttggaaataattcgatgattgcttagtcctcccccacccctagaacaccccagcacatctgaagatgagcgcctctccctgggtacctgcaagtgatcaccttggcctgcttgcataccttggctgataggaagcgcgccatccccaaggcagctcctgctgtggttggacagtgctgactgttagacagttcttccctatattgagccaaaatctgtcctgccacttgctggatcttggttgcagaccttcccattcacccagttatatatctttgctttcaaaatagtcaccttgagagaccagacatttttctgaaaacatcattactcagaattcagattcccctctgggatctgtcttcagaatcaaagttagctcttttctatcccctgtaagtcagtccccttttgttgtagcttcacctcgtttgtgacccccacttcacccaccttccccaccatctgtggctccatatacctttcgaccattttctgctggaagaggaagattcacggcccctgaggagatccagaggaaagagacggtctccaagggtgctgtgcagcaaggagcccaggagtggtatgaaccgtaacagtgcccttagagtaaatgtgcggcccctaagaccctgccctcaggaaggcggccttcccctgcagtcctgtgtcccacccctgggtctctgtagggtgccatccagggcaagcaacccaagcactgcttcccaccgggtgatgagccatgcaggcctccaaactgcacgtcatgattcatccctaaagtgagtttggccttgagagtccccagggtcctcccccactgggcaggggtcctcaaagccaaggaagcctggtgacacaggcacccatgggaggtgggcccagaaaggggcttcccatagataggccctgtgagtagggagcttgtacactgggccatgggcagcgccagttcccttgagcagtaaaggcccttttccccctacggtgggacccaggagtctctctgacagcttttctgccaggcacagtggctcatgcctgtaatcccaacactctgggaggccgaggcgggaagatcacttgaggtcaggagttcaagaccagcctggccaacatggtgaaacgtcgtctctgctaaaaatacaaaaattagctgggtgtggtgacaggcgcctataaccccagctatttgggaggctgaggcagtagaatcgcttgaacccagatagcagaggttgcagtgagctgagagtgtgccattgcagagagactccatcccaaaaaaagacagctgtcccaggccaagggtacttgggagagcccctcatggagaacctagtttagaccaagtagcagaagctgtggtcataacaaaacaatttgaggaagaaatcttacaaatcaccactgccctttctccttttccataaaactgtccatcttttcggtgctccctaatccaagcagcttgactttagagaagttgcagaagcagtgaagccactaacatgctgtgtgactttatgcaagtcactcacctcactgagccacctccatttcttcatctgtgaaataggcataacagtaatacataaccctacctacctcacagggctgttgtgaggatcaaatgaaataatgtaacgtgagaatacagtataaatgataaagga

SEQ ID NO: 284904 - DNA, 558 bp, Artificial Sequence
  derived and/or modified sequence
gcgctggccgctcgcggagggagaggctgcagagcgagggcaggagatgcagaggagaaggaatgaattccagctgagagacctggccgatgcatgggatttgtcttcaaggtccaggcagaggggatggcagatgccaaattgcagaagtcgaagagggcccagtatggttggtctgtaaagactacttccagcaacccagtctcctgccatgtccgaccccatcacgctgaacgtcggggggaagctctatacaacctcactggcgaccctgaccagcttccctgactccatgctaggcgccatgttcagcgggaagatgcccaccaagagggacagccagggcaactgcttcattgaccgtgacggcaaagtgttccgctatatcctcaacttcctgcggacctcccaccttgacctgcctgaggacttccaggagatggggctgctccgcagggaggccgacttctaccaggtgcagcccctgattgaggccctgcaggagaaggaagtggagctctccaaggccgagaagaatgccatgctcaacatcacact

SEQ ID NO: 284905 - protein, 1016 aa, Artificial Sequence
  derived and/or modified sequence
MVTRLLQQQNLPQTGEQELESLVLKLSVLKDFLSGIQKKALKALQDMSSTAPPAPQPSTRKAKTIPVQAFEVKLDVTLGDLTKIGKSQKFTLSVDVEGGRLVLLRRQRDSQEDWTTFTHDRIRQLIKSQRVQNKLGVVFEKEKDRTQRKDFIFVSARKREAFCQLLQLMKNKHSKQDEPDMISVFIGTWNMGSVPPPKNVTSWFTSKGLGKTLDEVTVTIPHDIYVFGTQENSVGDREWLDLLRGGLKELTDLDYRPIAMQSLWNIKVAVLVKPEHENRISHVSTSSVKTGIANTLGNKGAVGVSFMFNGTSFGFVNCHLTSGNEKTARRNQNYLDILRLLSLGDRQLNAFDISLRFTHLFWFGDLNYRLDMDIQEILNYISRKEFEPLLRVDQLNLEREKHKVFLRFSEEEISFPPTYRYERGSRDTYAWHKQKPTGVRTNVPSWCDRILWKSYPETHIICNSYGCTDDIVTSDHSPVFGTFEVGVTSQFISKKGLSKTSDQAYIEFESIEAIVKTASRTKFFIEFYSTCLEEYKKSFENDAQSSDNINFLKVQWSSRQLPTLKPILADIEYLQDQHLLLTVKSMDGYESYGECVVALKSMIGSTAQQFLTFLSHRGEETGNIRGSMKVRVPTERLGTRERLYEWISIDKDEAGAKSKAPSVSRGSQEPRSGSRKPAFTEASCPLSRLFEEPEKPPPTGRPPAPPRAAPREEPLTPRLKPEGAPEPEGVAAPPPKNSFNNPAYYVLEGVPHQLLPPEPPSPARAPVPSATKNKVAITVPAPQLGHHRHPRVGEGSSSDEESGGTLPPPDFPPPPLPDSAIFLPPSLDPLPGPVVRGRGGAEARGPPPPKAHPRPPLPPGPSPASTFLGEVASGDDRSCSVLQMAKTLSEVDYAPAGPARSALLPGPLELQPPRGLPSDYGRPLSFPPPRIRESIQEDLAEEAPCLQGGRASGLGEAGMSAWLRAIGLERYEEGLVHNGWDDLEFLSDITEEDLEEAGVQDPAHKRLLLDTLQLSK

SEQ ID NO: 284906 - DNA, 105 bp, Artificial Sequence
  derived and/or modified sequence
atggtgacacgcctgctgcagcagcagaacctcccgcagacaggggagcaagagttagaatccctagtgctgaagctgagcgtgctgaaagacttcctctcctag

SEQ ID NO: 284907 - DNA, 105 bp, Artificial Sequence
  derived and/or modified sequence
atggtgacccggctgctgcagcagcagaacctgccccagacaggagagcaggagctggagagcctggtgctgaagctgtctgtgctgaaggacttcctgtcctag

SEQ ID NO: 284908 - DNA, 105 bp, Artificial Sequence
  derived and/or modified sequence
atggtgacccggctgctgcagcagcagaacctgccccagaccggcgagcaagaactggaaagtctggtgctgaagctgagcgtgctcaaggacttcctgagctag

SEQ ID NO: 284909 - DNA, 105 bp, Artificial Sequence
  derived and/or modified sequence
atggttactagacttttacaacagcaaaatctgcctcaaactggagaacaagagctcgagagtctagtcctgaagcttagcgttctcaaagatttcttaagttag

SEQ ID NO: 284910 - DNA, 105 bp, Artificial Sequence
  derived and/or modified sequence
atggtgaccagactgctgcagcagcagaacctgccccagaccggcgagcaggagctggagagcctggtgctgaagctgagcgtgctgaaggacttcctgagctag

SEQ ID NO: 284911 - protein, 141 aa, Artificial Sequence
  derived and/or modified sequence
METSRGRNLAKVTRPTSPCHLLASPAQGPNIIPADIIFIVKEKLHPRFRRENDNLFFVNPIPLGKALTCCTVEVRTLDDRLLNIPINDIIHPKYFKKVPGEGMPLPEDPTKKGDLFIFFDIQFPTRLTPQKKQMLRQALLT

SEQ ID NO: 284912 - protein, 610 aa, Artificial Sequence
  derived and/or modified sequence
MGLKAAQKTLFPLRSIDDVVRLFAAELGREEPDLVLLSLVLGFVEHFLAVNRVIPTNVPELTFQPSPAPDPPGGLTYFPVADLSIIAALYARFTAQIRGAVDLSLYPREGGVSSRELVKKVSDVIWNSLSRSYFKDRAHIQSLFSFITGTKLDSSGVAFAVVGACQALGLRDVHLALSEDHAWVVFGPNGEQTAEVTWHGKGNEDRRGQTVNAGVAERSWLYLKGSYMRCDRKMEVAFMVCAINPSIDLHTDSLELLQLQQKLLWLLYDLGHLERYPMALGNLADLEELEPTPGRPDPLTLYHKGIASAKTYYRDEHIYPYMYLAGYHCRNRNVREALQAWADTATVIQDYNYCREDEEIYKEFFEVANDVIPNLLKEAASLLEAGEERPGEQSQGTQSQGSALQDPECFAHLLRFYDGICKWEEGSPTPVLHVGWATFLVQSLGRFEGQVRQKVRIVSREAEAAEAEEPWGEEAREGRRRGPRRESKPEEPPPPKKPALDKGLGTGQGAVSGPPRKPPGTVAGTARGPEGGSTAQVPAPTASPPPEGPVLTFQSEKMKGMKELLVATKINSSAIKLQLTAQSQVQMKKQKVSTPSDYTLSFLKRQRKGL

SEQ ID NO: 284913 - protein, 555 aa, Artificial Sequence
  derived and/or modified sequence
MGLKAAQKTLFPLRSIDDVVRLFAAELGREEPDLVLLSLVLGFVEHFLAVNRVIPTNVPELTFQPSPAPDPPGGLTYFPVADLSIIAALYARFTAQIRGAVDLSLYPREGGVSSRELVKKVSDVIWNSLSRSYFKDRAHIQSLFSFITGTKLDSSGVAFAVVGACQALGLRDVHLALSEDHAWVVFGPNGEQTAEVTWHGKGNEDRRGQTVNAGVAERSWLYLKGSYMRCDRKMEVAFMVCAINPSIDLHTDSLELLQLQQKLLWLLYDLGHLERYPMALGNLADLEELEPTPGRPDPLTLYHKGIASAKTYYRDEHIYPYMYLAGYHCRNRNVREALQAWADTATVIQDYNYCREDEEIYKEFFEVANDVIPNLLKEAASLLEAGEERPGEQSQVRQKVRIVSREAEAAEAEEPWGEEAREGRRRGPRRESKPEEPPPPKKPALDKGLGTGQGAVSGPPRKPPGTVAGTARGPEGGSTAQVPAPTASPPPEGPVLTFQSEKMKGMKELLVATKINSSAIKLQLTAQSQVQMKKQKVSTPSDYTLSFLKRQRKGL

SEQ ID NO: 284914 - protein, 575 aa, Artificial Sequence
  derived and/or modified sequence
MGLKAAQKTLFPLRSIDDVVRLFAAELGREEPDLVLLSLVLGFVEHFLAVNRVIPTNVPELTFQPSPAPDPPGGLTYFPVADLSIIAALYARFTAQIRGAVDLSLYPREGGVSSRELVKKVSDVIWNSLSRSYFKDRAHIQSLFSFITGTKLDSSGVAFAVVGACQALGLRDVHLALSEDHAWSWLYLKGSYMRCDRKMEVAFMVCAINPSIDLHTDSLELLQLQQKLLWLLYDLGHLERYPMALGNLADLEELEPTPGRPDPLTLYHKGIASAKTYYRDEHIYPYMYLAGYHCRNRNVREALQAWADTATVIQDYNYCREDEEIYKEFFEVANDVIPNLLKEAASLLEAGEERPGEQSQGTQSQGSALQDPECFAHLLRFYDGICKWEEGSPTPVLHVGWATFLVQSLGRFEGQVRQKVRIVSREAEAAEAEEPWGEEAREGRRRGPRRESKPEEPPPPKKPALDKGLGTGQGAVSGPPRKPPGTVAGTARGPEGGSTAQVPAPTASPPPEGPVLTFQSEKMKGMKELLVATKINSSAIKLQLTAQSQVQMKKQKVSTPSDYTLSFLKRQRKGL

SEQ ID NO: 284915 - protein, 146 aa, Artificial Sequence
  derived and/or modified sequence
MGLKAAQKTLFPLRSIDDVVRLFAAELGREEPDLVLLSLVLGFVEHFLAVNRVIPTNVPELTFQPSPAPDPPGGLTYFPVADLSIIAALYARFTAQIRGAVDLSLYPREGGVSSRELVKKVSDVIWNSLSRSYFKDRAHIQSLFSF

SEQ ID NO: 284916 - protein, 346 aa, Artificial Sequence
  derived and/or modified sequence
MGLKAAQKTLFPLRSIDDVVRLFAAELGREEPDLVLLSLVLGFVEHFLAVNRVIPTNVPELTFQPSPAPDPPGGLTYFPVADLSIIAALYARFTAQIRGAVDLSLYPREGGVSSRELVKKVSDVIWNSLSRSYFKDRAHIQSLFSFITGTKLDSSGVAFAVVGACQALGLRDVHLALSEDHAWVVFGPNGEQTAEVTWHGKGNEDRRGQTVNAGVAERSWLYLKGSYMRCDRKMEVAFMVCAINPSIDLHTDSLELLQLQQKLLWLLYDLGHLERYPMALGNLADLEELEPTPGRPDPLTLYHKGIASAKTYYRDEHIYPYMYLAGYHCRNRNVREALQAWADTAT

SEQ ID NO: 284917 - protein, 281 aa, Artificial Sequence
  derived and/or modified sequence
MGLKAAQKTLFPLRSIDDVVRLFAAELGREEPDLVLLSLVLGFVEHFLAVNRVIPTNVPELTFQPSPAPDPPGGLTYFPVADLSIIAALYARFTAQIRGAVDLSLYPREGGVSSRELVKKVSDVIWNSLSRSYFKDRAHIQSLFSFITGTKLDSSGVAFAVVGACQALGLRDVHLALSEDHAWVVFGPNGEQTAEVTWHGKGNEDRRGQTVNAGVAERSWLYLKGSYMRCDRKMEVAFMVCAINPSIDLHTDSLELLQLQQKLLWLLYDLGHLERYPMALG

SEQ ID NO: 284918 - protein, 120 aa, Artificial Sequence
  derived and/or modified sequence
MKLLMVLMLAALSQHCYAGSGCPLLENVISKTINPQVSKTEYKELLQEFIDDNATTNAIDELKECFLNQTDETLSNVEVFMVISFSSYKLFKSPDQGQVGSSFLTDNAKATSEQAFSYIG

SEQ ID NO: 284919 - DNA, 363 bp, Artificial Sequence
  derived and/or modified sequence
atgaagctcctcatggtcctgatgctggcggctttgagtcaacattgctacgctggctccggctgccccctgctggaaaacgtgatttcaaaaaccatcaacccgcaggtgtcaaagactgagtacaaagaattgttgcaggaatttattgatgacaacgctaccactaacgccattgacgaactgaaggaatgtttcttgaaccaaaccgacgaaacattgtctaacgtggaggttttcatggttattagcttctcatcgtataaattatttaaatctccggaccagggccaagtgggaagctccttccttaccgataacgccaaagctacaagtgaacaggcattttcatacattggttag

SEQ ID NO: 284920 - DNA, 363 bp, Artificial Sequence
  derived and/or modified sequence
atgaagctgctgatggtgctgatgctggccgccctgagccagcactgctacgccggcagcggctgccccctgctggagaatgtcatcagcaagaccatcaacccccaggtgtccaagacagagtacaaggagctgctgcaggagttcattgatgacaatgccaccaccaatgccattgatgagctgaaggagtgcttcctgaaccagacagatgagaccctgagcaatgtggaggtgttcatggtgatctccttcagcagctacaagctgttcaagagcccagaccagggccaggtgggcagcagcttcctgacagacaatgccaaggccaccagcgagcaggccttctcctacatcggctag

SEQ ID NO: 284921 - DNA, 363 bp, Artificial Sequence
  derived and/or modified sequence
atgaagctgctgatggtgctgatgctggccgccctgagccagcactgttacgcgggcagtggatgtcccttactcgaaaacgtgatttcaaagaccatcaacccacaagtctccaagacagaatataaggagctgttacaggaattcatcgatgacaatgccacaaccaatgctatcgacgaactcaaagaatgcttcctgaaccagaccgatgagacgctgagcaacgtcgaggtgtttatggtcatctccttcagtagctataagctctttaaaagtccagatcaagggcaagtgggatcatcctttctcacagacaacgcaaaggcaacctcggaacaagctttcagctacatcggatag

SEQ ID NO: 284922 - DNA, 363 bp, Artificial Sequence
  derived and/or modified sequence
atgaaactcctgatggtcctcatgctggcggctctgagtcaacattgttatgctggcagtggttgtccactgctagagaatgtgatatccaagaccatcaacccgcaggtgagtaaaactgaatataaagagctgttgcaggagttcattgacgataatgcgaccactaacgctatagacgagctgaaagaatgctttctgaatcaaacagatgagacattgtcaaatgttgaggtgtttatggtgatctctttttcgagctacaaactgttcaagtcgcccgatcaaggacaggttggatctagttttctcactgataacgctaaggcgacttccgagcaggccttctcttatatcggttag

SEQ ID NO: 284923 - DNA, 363 bp, Artificial Sequence
  derived and/or modified sequence
atgaaacttttaatggtcctgatgctcgccgccctcagtcagcactgctatgccggctccggatgtcccctcctcgaaaacgtaattagtaaaaccatcaatccccaggtttccaaaaccgagtataaggaactgttgcaagaattcattgatgataatgcaacaacaaacgcgatcgacgagctcaaggaatgctttctcaatcagaccgacgaaaccctatcaaacgtcgaggtgtttatggtcatctcattttcatcatacaagctttttaagtctcccgatcaaggtcaggtgggtagcagctttttgacagataatgcgaaggcaacttcggaacaggcatttagctatatcggctag

SEQ ID NO: 284924 - DNA, 363 bp, Artificial Sequence
  derived and/or modified sequence
atgaaacttttaatggtcctgatgctcgccgccctcagtcagcactgctatgccggctccggatgtcccctcctcgaaaacgtaattagtaaaaccatcaatccccaggtttccaaaaccgagtataaggaactgttgcaagaattcattgatgataatgcaacaacaaacgcgatcgacgagctcaaggaatgctttctcaatcagaccgacgaaaccctatcaaacgtcgaggtgtttatggtcatctcattttcatcatacaagctttttaagtctcccgatcaaggtcaggtgggttcctctttccttactgataacgcaaaagccacctccgagcaggccttttcttacataggttag

SEQ ID NO: 284925 - DNA, 505 bp, Artificial Sequence
  derived and/or modified sequence
tccacagcggcttccttgatccttgccacccgcgactgaacaccgacagcagcagcctcaccatgaagttgctgatggtcctcatgctggcggccctctcccagcactgctacgcaggctctggctgccccttattggagaatgtgatttccaagacaatcaatccacaagtgtctaagactgaatacaaagaacttcttcaagagttcatagacgacaatgccactacaaatgccatagatgaattgaaggaatgttttcttaaccaaacggatgaaactctgagcaatgttgaggtgtttatgcaattaatatatgacagcagtctttgtgatttattttaactttctgcaagacctttggctcacagaactgcagggtatggtgagaaaccaactacggattgctgcaaaccacaccttctctttcttatgtctttttactacaaactacaagacaattgttgaaacctgctatacatgtttattttaataaattgatggca

SEQ ID NO: 284926 - DNA, 1305 bp, Artificial Sequence
  derived and/or modified sequence
acagcggcttccttgatccttgccacccgcgactgaacaccgacagcagcagcctcaccatgaagttgctgatggtcctcatgctggcggccctctcccagcactgctacgcaggctctggctgccccttattggagaatgtgatttccaagacaatcaatccacaagtgtctaagactgaatacaaagaacttcttcaagagttcatagacgacaatgccactacaaatgccatagatgaattgaaggaatgttttcttaaccaaacggatgaaactctgagcaatgttgaggtgtttatggtaatttcattttcttcctataagctttttaaatcccctgaccagggacaagtgggctcttcatttctcactgacaatgccaaagccactagtgaacaagccttttcttacattggttaatttagttgaatggttagtctaatgactttgccatcaagaaaaacatccagtgtccctgtgttgtcactctacccagagaatcctcagtggatgataaatgaatagggcaagagaggaaaaggaaaggtcggtagaagtcttacctatccccagagctctctaattcatgctcacaaacacagacacaatcacacaaacacagaaacacacatacacacatccagacacatgcaaacacacagacacagtcacaatcacacaaacacacacacattcagacatacacaaacatagacagacaggcaaagacacagacacagacacagacacaatcacaccagcacacaatcatccagacacaaacacaaacacacagacagaaccacacaaccacagaaacacagagacacacacaaacacactcagacacacacatacaaacatatgttcactctctacagaaaaaacaattttccagaagacccgcacctatagaccaatctgcagagaaaacttctcttcttcaaaaaaaagtaaaagtgttctttcttaaaaaatgccctatttttcaacagtttggaaaataccatttgagcaagattctatacatctcaaataaaaagaatttaaaatgcacttccaggcaatcataatttgctagcataaatgatgagaaaccttggactatccaataggcaactgtagatcatgggtatgaaaccaccatggaggaagaattgcctcaaacaaaaaccaatagttttgtatttctttctaactatacatgtatattgttgagggttttctttagcatttattccctatgttaaattcttctttaatccttccctggtaaaaaaaaaaaaaaaaaaaaagttagaaa

SEQ ID NO: 284927 - DNA, 363 bp, Artificial Sequence
  derived and/or modified sequence
atgaagctgctgatggtgctgatgctggccgccctgagccagcactgctacgccggcagcggctgccccctgctggagaacgtgatcagcaagaccatcaacccccaggtgagcaagaccgagtacaaggagctgctgcaggagttcatcgacgacaacgccaccaccaacgccatcgacgagctgaaggagtgcttcctgaaccagaccgacgagaccctgagcaacgtggaggtgttcatggtgatcagcttcagcagctacaagctgttcaagagccccgaccagggccaggtgggcagcagcttcctgaccgacaacgccaaggccaccagcgagcaggccttcagctacatcggctag

SEQ ID NO: 284928 - DNA, 195 bp, Artificial Sequence
  derived and/or modified sequence
atgacaaaatgcatctactgtggattctgtcaggaagcctgccctgtggatgccatagttgaggggcccaacttcgaattttcaacagagacccatgaggagctgctgtacaacaaggagaagctactgaataacggagataagtgggaggcggagattgctgccaatatccaggcggactacctatacagatag

SEQ ID NO: 284929 - DNA, 195 bp, Artificial Sequence
  derived and/or modified sequence
atgaccaagtgcatctactgcggcttctgccaggaggcctgccctgtggatgccatcgtggagggccccaactttgagttcagcacagagacccatgaggagctgctgtacaacaaggagaagctgctgaacaatggagacaagtgggaggccgagattgctgccaacatccaggccgactacctgtacagatag

SEQ ID NO: 284930 - DNA, 353 bp, Artificial Sequence
  derived and/or modified sequence
gattgactggcctgcttggcaaggcaagtagcggcggcgcttcaaggccatcaccatcgaggctgagccaagagctgatggcagccgccggaccacccgctatgacatcgacatgaccaagtgcatctactgcggcttctgccaggaggcctgtcccgtggatgccatcgtcgagggccccaactttgagttctccacggagacccatgaggagctgctgtacaacaaggagaagttgctcaacaacggggacaagtgggaggccgagatcgccgccaacatccaggctgactacttgtatcggtgacgccccaccggcccgcagcccctgctgcccaataaaaccactccga

SEQ ID NO: 284931 - DNA, 195 bp, Artificial Sequence
  derived and/or modified sequence
atgaccaagtgcatctactgcggcttctgccaggaggcctgccccgtggatgctatcgttgagggccctaactttgaattttccaccgaaacccacgaggaactactttataacaaggaaaaattactcaacaacggcgataaatgggaagctgagatagccgccaatatccaggccgactatctgtaccgatag

SEQ ID NO: 284932 - DNA, 195 bp, Artificial Sequence
  derived and/or modified sequence
atgactaagtgcatttactgtggattctgccaagaggcctgccctgtcgacgcaatcgtggaaggccctaacttcgagttttctacggaaacacacgaggaattactgtacaataaggagaagctattaaacaacggggacaaatgggaagcggaaatcgcagcgaacattcaagcagattacctatatcgatag

SEQ ID NO: 284933 - DNA, 195 bp, Artificial Sequence
  derived and/or modified sequence
atgaccaagtgcatctactgcggcttctgccaggaggcctgccccgtggacgccatcgtggagggccccaacttcgagttcagcaccgagacccacgaggagctgctgtacaacaaggagaagctgctgaacaacggcgacaagtgggaggccgagatcgccgccaacatccaggccgactacctgtacagatag

SEQ ID NO: 284934 - DNA, 2109 bp, Artificial Sequence
  derived and/or modified sequence
gcaaccgcagcagcagccgccgctgtgatggccccaccaggctgtcccggctcttgtcctaatttcgcagtggtctgttctttcttggaaaggtacggccctcttctcgacctgcccgagctgccttttccagagctcgaacgcgttctccaggcaccgccaccggacgttgggaatggtgaggtcccgaaggaactggtagagttgcacctaaagctgatgcgcaaaattggtaaatcggtgactgctgaccggtgggagaaatatctgattaaaatctgccaagaattcaacagcacctgggcatgggaaatggagaagaagggatatctggagatgagcgtggaatgcaagcttgccttactgaaatacttgtgtgaatgccaattcgacgacaacctgaaattcaagaatatcattaacgaggaggatgccgatacaatgaggctgcagcctataggacgtgacaaggacgggctgatgtattggtatcagctcgaccaggaccataatgtgcgcatgtatattgaggaacaagatgatcaggatggctctagctggaagtgtattgtgagaaatcgaaacgagctggctgagactctggccctactcaaagcacagattgaccccgtcttactgaagaactcgagtcaacaggacaactcctcccgagaatcaccatccctcgaggatgaagagacaaaaaaagaggaggagacccccaagcaggaggagcagaaagagagcgaaaagatgaagagcgaggagcaaccaatggaccttgaaaaccgatcaacggctaacgttctcgaggagacaacggtaaagaaagaaaaggaagacgagaaagagttggtgaagttgccagtcattgttaagttagaaaaacctctgccagagaacgaggagaagaaaatcatcaaggaagagtccgacagctttaaggagaacgtgaagccaattaaagttgaggtgaaggaatgcagagcggatcctaaagacaccaagagctctatggaaaagcctgtcgcccaggagcccgagaggatagaattcgggggcaatattaagtcaagtcacgaaataacagaaaagtctaccgaagagaccgaaaaacttaaaaatgaccaacaggctaaaattcctctgaagaaacgtgagattaagctgtcagatgattttgactctcccgtaaagggcccattgtgcaaatcggtcactcctaccaaagaattcctgaaggatgagattaaacaagaagaggagacttgcaagcgcatctctacaattaccgcactggggcatgaaggaaagcagcttgttaatggagaggtctcagatgagagagtggcccccaacttcaagacagaaccaattgagactaaattttatgaaactaaggaggagtcttacagcccaagtaaggataggaatattattacggaaggcaacggaaccgaaagcctcaattcggtcataacatctatgaaaaccggggaactggaaaaggagaccgctccactacgtaaagacgcagacagctcaatcagcgtgctcgaaatccacagtcagaaagcccagatagaggagcccgaccccccggaaatggagacctcccttgacagttcagagatggccaaggatctgtcatcgaagacagccctcagctctaccgagtcctgtaccatgaagggcgaggagaagagccctaagaccaagaaggacaagcggccacccattctcgaatgcctggaaaaacttgagaaatcaaaaaaaacatttctggacaaagatgctcagagactctcccccatccccgaggaggtcccaaaatccaccttggagagtgagaagccaggctcaccagaggcggccgaaaccagcccccctagtaatattattgatcactgcgagaagctggccagcgaaaaggaggtcgtggaatgtcaaagcaccagtaccgtgggtggacagagcgtcaaaaaggttgacctggaaaccctgaaggaggacagtgaattcaccaaggtcgagatggataacttagataatgcgcagacctctggcattgaggagccaagcgagaccaagggctcgatgcaaaagtag

SEQ ID NO: 284935 - DNA, 831 bp, Artificial Sequence
  derived and/or modified sequence
gaaccctgcaagaagtgcggcttgccaaaccaccccgagcttatactcttatgcgactcctgcgattccggctaccacacagcctgtctccgccctccactcatgattatcccagatggcgagtggttctgcccaccgtgccagcataaactgctgtgtgaaaaacttgaggagcagcttcaggacctggacgtggctctgaaaaaaaaggagcgagcagagaggcgcaaagagcggctggtgtacgtggggatcagcattgaaaacatcattcccccccaagagcctgacttttccgaagaccaggaggagaagaagaaagattccaagaaaagcaaagccaacctgctcgaacgaagatcaaccagaacacgcaagtgtatttcctaccggttcgacgaattcgacgaagccatcgacgaggcgatcgaagacgatataaaagaagctgatggcggaggggtggggcgaggcaaagacatatccacgatcactgggcacagggggaaggacatttcaactattctggacgaggagaggaaagagaataagcggcctcagcgcgcagctgcagcgcgccggaaaaaaaggagaagattgaacgaccttgactccgactcaaacctcgacgaggaggaaagtgaagatgaattcaagatttccgatggttcacaggatgagttcgtagttagcgacgagaatcctgacgagtccgaggaggatcctccctctaacgacgatagcgatacagatttctgttcccgtcgcctgcggagacaccccagcaggcctatgcgccagtctaggaggctgcgccggaaaacaccatag

SEQ ID NO: 284936 - DNA, 2109 bp, Artificial Sequence
  derived and/or modified sequence
gccacagctgctgctgctgctgctgtgatggcccctcctggctgccccggcagctgccccaactttgctgtggtgtgcagcttcctggagagatatggccccctgctggacctgcctgagctgcccttccctgagctggagcgggtgctgcaggcccctcctccagatgtgggcaatggagaggtgcccaaggagctggtggagctgcacctgaagctgatgaggaagattggcaagtctgtgacagctgaccgctgggagaagtacctgatcaagatctgccaggagttcaacagcacctgggcctgggagatggagaagaagggctacctggagatgtctgtggagtgcaagctggccctgctgaagtacctgtgtgagtgccagtttgatgacaacctgaagttcaagaacatcatcaatgaagaagatgctgacaccatgaggctgcagcccatcggccgggacaaggatggcctgatgtactggtaccagctggaccaggaccacaacgtgaggatgtacatcgaggagcaggatgaccaggacggcagctcctggaagtgcatcgtgaggaacagaaatgagctggccgagaccctggccctgctgaaggcccagattgatcctgtgctgctgaagaacagcagccagcaggacaacagcagccgggagagccccagcctggaggatgaggagaccaagaaggaggaggagacccccaagcaggaggagcagaaggagagcgagaagatgaagtctgaggagcagcccatggacctggagaacagaagcacagccaacgtgctggaggagaccaccgtgaagaaggagaaggaggatgagaaggagctggtgaagctgcctgtgattgtgaagctggagaagcccctgcctgaaaatgaggagaagaagatcatcaaggaggagagtgacagcttcaaggaaaatgtgaagcccatcaaggtggaggtgaaggaatgtagagctgaccccaaggacaccaagagctccatggagaagcctgtggcccaggagcctgagcgcatcgagtttggaggcaacatcaagagcagccatgagatcacagagaagagcacagaggagacagagaagctgaagaatgaccagcaggccaagatccccctgaagaagcgggagatcaagctgagtgatgactttgacagccctgtgaagggccccctgtgcaagtctgtgacccccaccaaggagttcctgaaggatgagatcaagcaggaggaggagacctgcaagaggatcagcaccatcacagccctgggccacgagggcaagcagctggtgaatggagaggtgtctgatgagcgggtggcccccaacttcaagacagagcccatcgagaccaagttctatgagaccaaggaggagagctacagccccagcaaggacaggaacatcatcacagagggcaatggaacagagagcctgaacagcgtcatcacctccatgaagacaggagagctggagaaggagacagcccccctgaggaaggatgctgacagcagcatctctgtgctggagatccacagccagaaggcccagatcgaggagccagaccccccagagatggagaccagcctggacagcagcgagatggccaaggacctgagcagcaagacagccctgagcagcacagagagctgcaccatgaagggggaggagaagagccccaagaccaagaaggacaagaggcctcccatcctggagtgcctggagaagctggagaagagcaagaagaccttcctggacaaggatgcccagaggctgagccccatccctgaggaggtgcccaagagcaccctggagagcgagaagccaggcagccctgaggccgctgagaccagcccccccagcaacatcatcgaccactgtgagaagctggccagcgagaaggaggtggtggagtgccagagcaccagcacagtgggcggccagagcgtgaagaaggtggacctggagaccctgaaggaggacagcgagttcaccaaggtggagatggacaacctggacaatgcccagaccagcggcatcgaggagcccagcgagaccaagggctccatgcagaagtag

SEQ ID NO: 284937 - DNA, 831 bp, Artificial Sequence
  derived and/or modified sequence
gagccctgcaagaagtgtggcctgcccaaccaccctgagctgatcctgctgtgtgacagctgtgacagcggctaccacacagcctgcctgcggccccccctgatgatcatcccagatggagagtggttctgccccccctgccagcacaagctgctgtgtgagaagctggaggagcagctgcaggacctggatgtggccctgaagaagaaggagagagctgagaggaggaaggagcggctggtgtatgtgggcatcagcattgagaacatcatccccccccaggagccagacttcagcgaggaccaggaggagaagaagaaggacagcaagaagagcaaggccaacctgctggagaggaggagcaccaggaccaggaagtgcatctcctacagatttgatgaatttgatgaggccattgatgaggccattgaagatgacatcaaggaggctgatggcggcggcgtgggccggggcaaggacatcagcaccatcaccggccaccggggcaaggacatcagcaccatcctggatgaggagaggaaggagaacaagaggccccagagagctgctgctgcccggaggaagaagagaagaaggctgaatgacctggacagcgacagcaacctggatgaggaggagagtgaagatgagttcaagatcagtgatggcagccaggatgaatttgtggtgtctgatgaaaatccagatgagagcgaggaggacccccccagcaatgatgacagcgacacagacttctgcagccggcggctgcggcggcaccccagccggcccatgaggcagagccggcggctgcggaggaagaccccctag

SEQ ID NO: 284938 - DNA, 2109 bp, Artificial Sequence
  derived and/or modified sequence
gccaccgccgccgccgccgccgccgtgatggccccccccggctgcccaggatcttgtccaaactttgctgtggtatgtagtttcctggaacgttatggaccgcttctggaccttcctgagctgccattcccagaactggaacgcgttcttcaggcacctccccctgacgtgggcaatggcgaagtgccaaaagaactcgtcgaactgcacctgaaactgatgcggaagatcggaaaaagcgttactgcagaccgttgggagaaatatctcataaagatctgtcaggagttcaacagcacgtgggcttgggagatggaaaagaaaggctatctggagatgagtgtggaatgcaaactggccttactgaagtatctgtgcgagtgccagttcgatgacaacttgaagttcaaaaacattatcaacgaggaagacgctgatactatgaggcttcagcctatcggccgtgataaagatggactgatgtactggtaccagcttgatcaagaccacaatgtacgaatgtatattgaagagcaagatgatcaagatgggagttcgtggaaatgcatcgtccggaaccgtaatgagctggctgaaacactagctctgctcaaggcgcagatcgacccagtactactcaagaattccagtcagcaagacaatagcagtcgtgagagcccaagtctggaggacgaggaaaccaagaaagaagaagagacaccaaagcaggaggaacagaaggagtctgaaaaaatgaaatccgaagagcagccgatggacttggaaaataggtccactgccaacgttcttgaagaaacaactgtcaaaaaagagaaagaggatgagaaagagctcgtgaagctccccgtgattgtcaagctagagaaacctttgcccgagaacgaggaaaaaaaaatcattaaagaagagtccgactctttcaaagagaatgtgaagcctatcaaggtcgaagtgaaggagtgtagggcggaccccaaagataccaagtcatcaatggagaaacctgtggcccaggagcccgagcgcatcgaattcggaggtaatatcaaatctagccatgagatcactgagaaaagcacagaggagaccgaaaagctgaagaatgatcagcaggcaaagatacccctgaagaagagggaaatcaaactttccgacgacttcgattctccagtcaagggcccactctgcaagtccgtgacaccaaccaaagaatttctgaaggatgagatcaaacaggaggaagagacttgcaaacgaataagcacaattaccgcactggggcatgaggggaaacagttagtcaacggcgaggtgagcgacgagcgagtcgcaccaaatttcaagacagagccgattgagaccaagttttatgagacaaaggaggaatcatattctccctccaaggaccggaacattatcaccgaaggaaatggcacggaaagcctcaatagcgtcattacctccatgaagactggggagttggaaaaggagacagctccactccggaaggacgccgactcaagcatctcagtgctcgagattcacagccagaaggctcaaatcgaagaacccgacccacccgaaatggagactagtctagatagctcagaaatggccaaagaccttagcagtaaaaccgcgctcagtagtacagaatcgtgcaccatgaagggagaggagaagtcccccaaaacaaaaaaagataagcggccacctattttggagtgtttggaaaagttagaaaagtcaaagaagacattcctggacaaagatgctcagagattgagcccgattcctgaggaagtccctaaaagtacactggagtcagagaagcctggctccccggaggccgcggagacctcaccgcctagtaatatcatcgatcattgtgagaaactggcctccgaaaaagaggtggtagagtgccagtctacttccaccgtaggcggacagtccgtaaagaaggtggatcttgagacattaaaggaggattcggagtttactaaggttgagatggataatcttgacaacgcccagacgtctggtatcgaggagccctctgagaccaaaggttcaatgcaaaaatag

SEQ ID NO: 284939 - DNA, 831 bp, Artificial Sequence
  derived and/or modified sequence
gagccctgcaagaagtgcggcctgcccaaccaccccgagctgatcctcctctgcgatagctgcgactcaggctatcacaccgcttgtttaagaccaccattgatgataatcccagatggagaatggttttgcccaccatgccagcataagctgctgtgtgaaaagctcgaggagcagctgcaggatcttgacgttgcactcaaaaaaaaggagcgagcagagaggcgaaaagagcgtctggtgtatgtagggatttccattgaaaacatcatccccccacaggaacccgatttttccgaggaccaggaagagaagaaaaaggattctaagaaaagtaaagccaacctcctggagaggagatcgacacgaaccaggaagtgcatttcttaccggttcgacgagttcgatgaggccattgatgaagccattgaggatgatattaaggaggccgacggcggcggagtgggtcggggtaaagatatttccacaatcactggccacaggggaaaagatatcagtacaattctcgacgaagagaggaaagagaataaacggcctcagcgagccgcggctgctaggaggaagaaaaggcggcgcctgaacgatttggatagtgacagcaatctggatgaagaggagtctgaggatgaatttaaaatttctgatggaagccaggatgagttcgtcgtgagtgacgaaaatccagacgagtcggaggaagatcctccgtcaaatgatgactccgacacagatttttgttcaagacgcttgagaaggcatccctctaggcccatgcgacagagtcggagactgagaaggaaaactccatag

SEQ ID NO: 284940 - DNA, 2109 bp, Artificial Sequence
  derived and/or modified sequence
gcaactgcggcagctgctgccgctgtcatggcacctccaggatgtcctgggtcatgtcctaacttcgccgtggtctgcagctttctggagcggtatggtcctctgctggatcttcctgaactgcctttccccgagcttgagcgcgtgctgcaagctccccctcctgacgtgggcaacggtgaagtgccaaaggagctggtcgagctgcaccttaagctaatgcgaaagatcggaaagtcagtgaccgcagatcgttgggagaagtacctgatcaaaatttgccaggaattcaactcaacttgggcttgggaaatggagaaaaaaggctacctcgaaatgtcggtggagtgcaaactggccctgttaaaatacctctgtgagtgtcagttcgacgataatctcaagttcaaaaatattattaatgaagaagacgctgatacgatgcgcctgcagccgatcggaagggacaaggatggcttgatgtactggtatcagctcgaccaagaccacaatgttcgcatgtatatagaagaacaggatgaccaggacggttcttcttggaagtgcattgtgcgtaatcggaatgagttagcagagacattggctctgctgaaggctcagatcgatcccgtcctcttgaaaaacagctcccaacaggacaacagtagtcgggaaagcccttctctggaggacgaagaaactaaaaaagaagaagagactcccaagcaagaggaacagaaagaaagcgagaaaatgaagtctgaggagcagccaatggacctggagaaccgctccaccgcaaacgtgttggaggaaaccactgtaaagaaagaaaaagaagatgagaaggagctcgttaaactccctgtgatagttaagttggaaaaaccactgccagaaaacgaagagaagaagattatcaaggaagagtctgatagctttaaagagaacgtgaaaccaatcaaagtggaagtgaaggaatgcagagccgatcctaaggacactaaatcatccatggagaaacctgtggctcaggagcccgaacgaatcgaattcggcggtaatattaagtcttctcatgaaattaccgagaagtctactgaggagaccgaaaagttaaagaacgatcaacaggctaagattcctctcaagaaacgggagatcaagctgtcagacgatttcgacagccctgtcaagggtcccctgtgcaagtcagtgaccccaactaaggagtttttgaaggatgagatcaagcaagaagaggaaacttgtaaaaggatctcaactatcacagctctgggtcacgagggcaaacaactcgtcaatggcgaggtgtccgatgaacgtgtggcacctaacttcaagaccgagccaatcgagactaaattttatgaaaccaaagaggaatcctattcgccgtcaaaagataggaacattattaccgagggcaacggaaccgaatctctgaactccgtgatcacgagcatgaagacaggagagctcgagaaggaaaccgctcccctgcgtaaggatgccgatagctcaatctctgttctggaaatccactctcagaaggcacagattgaggaacccgatcccccagagatggaaacttcactggactctagtgagatggcgaaagacctgtccagtaaaactgccctgtctagtacggagagttgcactatgaaaggtgaggagaagtcacccaagactaagaaggacaagcgccctccaattctggagtgtctggagaagctcgagaagtctaagaagaccttccttgataaagacgcccaacggctttcacccatcccagaggaggtgcccaagtcaaccttggaaagcgagaaacccggttcacccgaggctgccgaaacttcgcccccttcaaatattatagaccattgcgagaagctggcgagtgaaaaggaggtggtggaatgtcagagcacaagcaccgtcggcggtcaaagtgtgaagaaagtggacctcgaaacactcaaggaggactctgagttcaccaaggtcgaaatggacaatctggacaacgcacagacctcaggaatagaggaaccttctgagactaaaggatcaatgcagaaatag

SEQ ID NO: 284941 - DNA, 831 bp, Artificial Sequence
  derived and/or modified sequence
gaaccctgtaaaaagtgcggactgccaaaccacccagaacttatcttgttgtgcgacagctgcgattctggctatcacactgcatgtctgaggccccctctgatgattatccccgacggagaatggttttgcccaccttgtcaacacaaactcctctgcgaaaagctcgaggagcagctgcaggatctggatgtggcccttaagaaaaaggaaagggcggagcggaggaaggagcgcctggtttatgtgggtatttccatagagaacatcatacctccccaagaacctgatttcagcgaggatcaagaagaaaagaagaaagacagcaagaaatctaaagccaacctgctggaacggaggtccaccagaacacgaaaatgcatttcttacagatttgatgaattcgatgaggcaatcgacgaggcaattgaagatgatatcaaagaagccgatggcggaggcgtagggagagggaaggacatatcaaccataactgggcatagggggaaagatataagcaccattctggatgaggaacgaaaagaaaacaaaaggccacagagagctgctgccgcaagaaggaagaagaggcggcgactcaatgatttggactccgactctaatctggatgaagaggagtcagaagacgagtttaaaattagtgacgggagtcaggacgagttcgtagtgagcgacgagaatccagacgaatctgaggaagatcctcccagtaatgatgacagtgatactgatttctgtagtagacgcttgaggaggcacccaagcagaccaatgaggcagtcaaggcgactgagaagaaaaacaccatag

SEQ ID NO: 284942 - DNA, 2107 bp, Artificial Sequence
  derived and/or modified sequence
gcgacggcggcggcagcggcggcggtgatggctcctccgggctgcccgggttcgtgccccaacttcgccgtagtctgctccttcttggagcgctacgggccgctgctagacctgcctgagttgccgttccctgagctggagcgggtgctgcaggcgccgccgccggacgtcggcaacggagaagtaccaaaagaattggtggagctccatttgaagctgatgaggaaaattggcaaatctgttactgcagacagatgggaaaaatatttgatcaagatatgccaagagtttaacagtacctgggcatgggagatggagaagaagggctatcttgaaatgagtgttgaatgcaaactagcactcttaaagtacctctgtgagtgtcagtttgatgacaatctcaaattcaagaatattattaatgaggaggatgccgatactatgcgtctccagccaattggtcgagacaaagatggcctcatgtactggtaccaattggatcaagatcacaatgtcagaatgtacatagaagaacaagatgatcaagatggctcttcatggaaatgcattgtcagaaatcgaaacgagttggctgagactcttgcactcctgaaagcacaaattgatcctgtactattgaaaaactctagccaacaagacaactcttctcgggaaagtcccagcttagaggatgaggagactaaaaaagaggaagaaacacctaaacaagaggaacagaaagaaagtgaaaagatgaaaagtgaggagcagcctatggatttagaaaaccgttctacagccaatgttctagaagagactactgtgaaaaaagaaaaagaagatgaaaaggaacttgtgaaactgccagtcatagtgaagctagaaaaacctttgccagaaaatgaagaaaaaaagattatcaaagaagaaagtgattccttcaaggaaaatgtcaaacccattaaagttgaggtgaaggaatgtagagcagatcctaaagataccaaaagtagcatggagaagccagtggcacaggagcctgaaaggatcgaatttggtggcaatattaaatcttctcacgaaattactgagaaatctactgaagaaactgagaaacttaaaaatgaccagcaggccaagataccactaaaaaaacgagaaattaaactgagtgatgattttgacagtccagtcaagggacctttgtgtaaatcagttactccaacaaaagagtttttgaaagatgaaataaaacaagaggaagagacttgtaaaaggatctctacaatcactgctttgggtcatgaagggaaacagctggtaaatggagaagttagtgatgaaagggtagctccaaattttaagacagaaccaatagagacaaagttttatgagacaaaggaagagagctatagcccctctaaggacagaaatatcatcacggagggaaatggaacagagtccttaaattctgtcataacaagtatgaaaacaggtgagcttgagaaagaaacagcccctttgaggaaagatgcagatagttcaatatcagtcttagagatccatagtcaaaaagcacaaatagaggaacccgatcctccagaaatggaaacttctcttgattcttctgagatggcaaaagatctctcttcaaaaactgctttatcttccaccgagtcgtgtaccatgaaaggtgaagagaagtctcccaaaactaagaaggataagcgcccaccaatcctagaatgtcttgaaaagttagagaagtccaaaaagacttttcttgataaggacgcacaaagattgagtccaataccagaagaagttccaaagagtactctagagtcagaaaagcctggctctcctgaggcagctgaaacttctccaccatctaatatcattgaccactgtgagaaactagcctcagaaaaagaagtggtagaatgccagagtacaagtactgttggtggccagtctgtgaaaaaagtagacctagaaaccctaaaagaggattctgagttcacaaaggtagaaatggataatctggacaatgcccagacctctggcatagaggagccttctgagacaaagggttctatgcaaaaaa

SEQ ID NO: 284943 - DNA, 830 bp, Artificial Sequence
  derived and/or modified sequence
gaaccatgcaaaaaatgtggccttccaaaccatcctgagctaattcttctgtgtgactcttgcgatagtggataccatactgcctgccttcgccctcctctgatgatcatcccagatggagaatggttctgcccaccttgccaacataaactgctctgtgaaaaattagaggaacagttgcaggatttggatgttgccttaaagaagaaagagcgtgccgaacgaagaaaagaacgcttggtgtatgttggtatcagtattgaaaacatcattcctccacaagagccagacttttctgaagatcaagaagaaaagaaaaaagattcaaaaaaatccaaagcaaacttgcttgaaaggaggtcaacaagaacaaggaaatgtataagctacagatttgatgagtttgatgaagcaattgatgaagctattgaagatgacatcaaagaagccgatggaggaggagttggccgaggaaaagatatctccaccatcacaggtcatcgtgggaaagacatctctactattttggatgaagaaagaaaagaaaataaacgaccccagagggcagctgctgctcgaaggaagaaacgccggcgattaaatgatctggacagtgatagcaacctggatgaagaagagagcgaggatgaattcaagatcagtgatggatctcaagatgagtttgttgtgtctgatgaaaacccagatgaaagtgaagaagatccgccatctaatgatgacagtgacactgacttttgtagccgtagactgaggcgacacccctctcggccaatgaggcagagcaggcgtttgcgaagaaagaccccaaa

SEQ ID NO: 284944 - DNA, 2109 bp, Artificial Sequence
  derived and/or modified sequence
gccaccgccgccgccgccgccgccgtgatggccccccccggctgccccggcagctgccccaacttcgccgtggtgtgcagcttcctggagagatacggccccctgctggacctgcccgagctgcccttccccgagctggagagagtgctgcaggcccccccccccgacgtgggcaacggcgaggtgcccaaggagctggtggagctgcacctgaagctgatgagaaagatcggcaagagcgtgaccgccgacagatgggagaagtacctgatcaagatctgccaggagttcaacagcacctgggcctgggagatggagaagaagggctacctggagatgagcgtggagtgcaagctggccctgctgaagtacctgtgcgagtgccagttcgacgacaacctgaagttcaagaacatcatcaacgaggaggacgccgacaccatgagactgcagcccatcggcagagacaaggacggcctgatgtactggtaccagctggaccaggaccacaacgtgagaatgtacatcgaggagcaggacgaccaggacggcagcagctggaagtgcatcgtgagaaacagaaacgagctggccgagaccctggccctgctgaaggcccagatcgaccccgtgctgctgaagaacagcagccagcaggacaacagcagcagagagagccccagcctggaggacgaggagaccaagaaggaggaggagacccccaagcaggaggagcagaaggagagcgagaagatgaagagcgaggagcagcccatggacctggagaacagaagcaccgccaacgtgctggaggagaccaccgtgaagaaggagaaggaggacgagaaggagctggtgaagctgcccgtgatcgtgaagctggagaagcccctgcccgagaacgaggagaagaagatcatcaaggaggagagcgacagcttcaaggagaacgtgaagcccatcaaggtggaggtgaaggagtgcagagccgaccccaaggacaccaagagcagcatggagaagcccgtggcccaggagcccgagagaatcgagttcggcggcaacatcaagagcagccacgagatcaccgagaagagcaccgaggagaccgagaagctgaagaacgaccagcaggccaagatccccctgaagaagagagagatcaagctgagcgacgacttcgacagccccgtgaagggccccctgtgcaagagcgtgacccccaccaaggagttcctgaaggacgagatcaagcaggaggaggagacctgcaagagaatcagcaccatcaccgccctgggccacgagggcaagcagctggtgaacggcgaggtgagcgacgagagagtggcccccaacttcaagaccgagcccatcgagaccaagttctacgagaccaaggaggagagctacagccccagcaaggacagaaacatcatcaccgagggcaacggcaccgagagcctgaacagcgtgatcaccagcatgaagaccggcgagctggagaaggagaccgcccccctgagaaaggacgccgacagcagcatcagcgtgctggagatccacagccagaaggcccagatcgaggagcccgacccccccgagatggagaccagcctggacagcagcgagatggccaaggacctgagcagcaagaccgccctgagcagcaccgagagctgcaccatgaagggcgaggagaagagccccaagaccaagaaggacaagagaccccccatcctggagtgcctggagaagctggagaagagcaagaagaccttcctggacaaggacgcccagagactgagccccatccccgaggaggtgcccaagagcaccctggagagcgagaagcccggcagccccgaggccgccgagaccagcccccccagcaacatcatcgaccactgcgagaagctggccagcgagaaggaggtggtggagtgccagagcaccagcaccgtgggcggccagagcgtgaagaaggtggacctggagaccctgaaggaggacagcgagttcaccaaggtggagatggacaacctggacaacgcccagaccagcggcatcgaggagcccagcgagaccaagggcagcatgcagaagtag

SEQ ID NO: 284945 - DNA, 831 bp, Artificial Sequence
  derived and/or modified sequence
gagccctgcaagaagtgcggcctgcccaaccaccccgagctgatcctgctgtgcgacagctgcgacagcggctaccacaccgcctgcctgagaccccccctgatgatcatccccgacggcgagtggttctgccccccctgccagcacaagctgctgtgcgagaagctggaggagcagctgcaggacctggacgtggccctgaagaagaaggagagagccgagagaagaaaggagagactggtgtacgtgggcatcagcatcgagaacatcatccccccccaggagcccgacttcagcgaggaccaggaggagaagaagaaggacagcaagaagagcaaggccaacctgctggagagaagaagcaccagaaccagaaagtgcatcagctacagattcgacgagttcgacgaggccatcgacgaggccatcgaggacgacatcaaggaggccgacggcggcggcgtgggcagaggcaaggacatcagcaccatcaccggccacagaggcaaggacatcagcaccatcctggacgaggagagaaaggagaacaagagaccccagagagccgccgccgccagaagaaagaagagaagaagactgaacgacctggacagcgacagcaacctggacgaggaggagagcgaggacgagttcaagatcagcgacggcagccaggacgagttcgtggtgagcgacgagaaccccgacgagagcgaggaggacccccccagcaacgacgacagcgacaccgacttctgcagcagaagactgagaagacaccccagcagacccatgagacagagcagaagactgagaagaaagaccccctag

SEQ ID NO: 284946 - protein, 1780 aa, Artificial Sequence
  derived and/or modified sequence
MINSSLSMLFSYLEKYFYVADELSHCVEPEPSQVPGGSSRDRQQGKPPPLPALKAKTSSRSGPYATEIKKSTDDSIFKVLDWFNRSSYSDDNKSFLQHPRGIESKEKTDSKSQVAVDLVTDDTTLRENGSKTLSPSKIELKPVRSDSPFQAEGDMLVSESCQDNNVNIKSKFMNLSQKGTPKEGPGILQPFESYGTPSQGSKNMDYSQDSKSPGKGNGASPSNSNYSYSVLKESDAENQVPCNTNNIGNLGEEEPKFHAHEENRGHSEVNFDSSTVVKEPGLKDNMNAERKSKVGNTYILKASLEPENIKSTPGVANNGSPWKKPEVQFQQEAGEVPKNQVQREKYKRVSDRISFWEGEKAGAKITHEKPTSSCSQEQPSAKAYQPVKKSQGVSSMDSLSTDQSEYNQAIPKRVVLDEDDQASQLSNSYSSNKSKETKPQIAGPSRYYLSAEQSDKVSLFQNKKNEPIKRSQVADSLPSRRNITLPALQPPSNVGSERHAPLEKDRPLVRESNANFKVMSLKERMDEPNAEQVYNPSQFENLRKFWDLEANSNSKDNDKNITTTSQKNSAPFNRQKHKEFSDIKLSGKNTHEAEVLLSPKKVMAREEMEKLNSKGILQVLPDEITFPLSPLRKYTYQLPGNESSKENVEKNTEGIVTPVFKEEKDYSEQEIQESIIKTNVLSKDCKDTFNDSLQKLLSETSTPAIQPSGGKVHGKQVLEPSVSENRTWPQKTDFADTEEEVKGPEKIINEHVDKTVVHPKVKRNSLTASLDKLLKEATGTSPSPLQAKLAPVITGTNSKLEEGRFFGKGIEQSHNTSADKREILAPFPVRDETFGNTALLKKAESGECQLSTQNLIQMAAEDSHPLDPTSQLSRKGSFGDVASPPQDMLFPQDAHLVPQARVHPSQTEISETVEKVILPPRPVLNDVSAALQKLCGEVWLSYPAGREVGPGEVNPEFPEAVQPVCSPLNPPGVISPWATMDTIVPDRKDFYSSNVVPDKTHEVGSYLAAQMSPSDQTLSSFASIVAQYGKGLPQEVEEIVRETIVQPKSEFLEFSAGLEKLLKEETETFPSKYESDTGNLSPSKLIGSTEEPRRATSECHPEELKETVEKAEAPLITESAFDAGFEKLLKEITEAPPYQPQVSVREETHEKESSQSEQTRFLGTVPHFYRAASQTSEMKDKSNGLESQVNQCDKMLGGDALVTDLLVDFCGSRSGVEIPRTPQLYVAHEIGTIKTVTPPEDRDSESGVAGGQGTLQEPGFGEASEAISVSRNRQPIPLLMNKENSTKTSKVELTLASPYMKQEKEEEKEGFSESDFSDGNTSSNAESWRNPSSSEEEPSPVLKTLERSAARKMPSKSLEDISSDSSNQAKVDNQPEELVRSAEDVSTVPTQPDNPFSHPDKLKRMSKSVPAFLQDESDDRETDTASESSYQLSRHKKSPSSLTNLSSSSGMTSLSSVSGSVMSVYSGDFGNLEVKGNIQFAIEYVESLKELHVFVAQCKDLAAADVKKQRSDPYVKAYLLPDKGKMGKKKTLVVKKTLNPVYNEILRYKIEKQILKTQKLNLSIWHRDTFKRNSFLGEVELDLETWDWDNKQNKQLRWYPLKRKTAPVALEAENRGEMKLALQYVPEPVPGKKLPTTGEVHIWVKECLDLPLLRGSHLNSFVKCTILPDTSRKSRQKTRAVGKTTNPIFNHTMVYDGFRPEDLMEACVELTVWDHYKLTNQFLGGLRIGFGTGKSYGTEVDWMDSTSEEVALWEKMVNSPNTWIEATLPLRMLLIAKISK

SEQ ID NO: 284947 - protein, 365 aa, Artificial Sequence
  derived and/or modified sequence
MSDDRETDTASESSYQLSRHKKSPSSLTNLSSSSGMTSLSSVSGSVMSVYSGDFGNLEVKGNIQFAIEYVESLKELHVFVAQCKDLAAADVKKQRSDPYVKAYLLPDKGKMGKKKTLVVKKTLNPVYNEILRYKIEKQILKTQKLNLSIWHRDTFKRNSFLGEVELDLETWDWDNKQNKQLRWYPLKRKTAPVALEAENRGEMKLALQYVPEPVPGKKLPTTGEVHIWVKECLDLPLLRGSHLNSFVKCTILPDTSRKSRQKTRAVGKTTNPIFNHTMVYDGFRPEDLMEACVELTVWDHYKLTNQFLGGLRIGFGTGKSYGTEVDWMDSTSEEVALWEKMVNSPNTWIEATLPLRMLLIAKISK

SEQ ID NO: 284948 - protein, 63 aa, Artificial Sequence
  derived and/or modified sequence
MSKSVPAFLQDESDDRETDTASESSYQLSRHKKSPSSLTNLSSSSGMTSLSSVSGSVMSVYSG

SEQ ID NO: 284949 - protein, 1256 aa, Artificial Sequence
  derived and/or modified sequence
MDEPNAEQVYNPSQFENLRKFWDLEANSNSKDNDKNITTTSQKNSAPFNRQKHKEFSDIKLSGKNTHEAEVLLSPKKVMAREEMEKLNSKGILQVLPDEITFPLSPLRKYTYQLPGNESSKENVEKNTEGIVTPVFKEEKDYSEQEIQESIIKTNVLSKDCKDTFNDSLQKLLSETSTPAIQPSGGKVHGKQVLEPSVSENRTWPQKTDFADTEEEVKGPEKIINEHVDKTVVHPKVKRNSLTASLDKLLKEATGTSPSPLQAKLAPVITGTNSKLEEGRFFGKGIEQSHNTSADKREILAPFPVRDETFGNTALLKKAESGECQLSTQNLIQMAAEDSHPLDPTSQLSRKGSFGDVASPPQDMLFPQDAHLVPQARVHPSQTEISETVEKVILPPRPVLNDVSAALQKLCGEVWLSYPAGREVGPGEVNPEFPEAVQPVCSPLNPPGVISPWATMDTIVPDRKDFYSSNVVPDKTHEVGSYLAAQMSPSDQTLSSFASIVAQYGKGLPQEVEEIVRETIVQPKSEFLEFSAGLEKLLKEETETFPSKYESDTGNLSPSKLIGSTEEPRRATSECHPEELKETVEKAEAPLITESAFDAGFEKLLKEITEAPPYQPQVSVREETHEKESSQSEQTRFLGTVPHFYRAASQTSEMKDKSNGLESQVNQCDKMLGGDALVTDLLVDFCGSRSGVEIPRTPQLYVAHEIGTIKTVTPPEDRDSESGVAGGQGTLQEPGFGEASEAISVSRNRQPIPLLMNKENSTKTSKVELTLASPYMKQEKEEEKEGFSESDFSDGNTSSNAESWRNPSSSEEEPSPVLKTLERSAARKMPSKSLEDISSDSSNQAKVDNQPEELVRSAEDVSTVPTQPDNPFSHPDKLKRMSKSVPAFLQDESDDRETDTASESSYQLSRHKKSPSSLTNLSSSSGMTSLSSVSGSVMSVYSGDFGNLEVKGNIQFAIEYVESLKELHVFVAQCKDLAAADVKKQRSDPYVKAYLLPDKGKMGKKKTLVVKKTLNPVYNEILRYKIEKQILKTQKLNLSIWHRDTFKRNSFLGEVELDLETWDWDNKQNKQLRWYPLKRKTAPVALEAENRGEMKLALQYVPEPVPGKKLPTTGEVHIWVKECLDLPLLRGSHLNSFVKCTILPDTSRKSRQKTRAVGKTTNPIFNHTMVYDGFRPEDLMEACVELTVWDHYKLTNQFLGGLRIGFGTGKSYGTEVDWMDSTSEEVALWEKMVNSPNTWIEATLPLRMLLIAKISK

SEQ ID NO: 284950 - DNA, 5343 bp, Artificial Sequence
  derived and/or modified sequence
atgatcaacagcagcctgagcatgctgttcagctacctggagaagtacttctacgtggccgacgagctgagccactgcgtggagcccgagcccagccaggtgcccggcggcagcagcagagacagacagcagggcaagcccccccccctgcccgccctgaaggccaagaccagcagcagaagcggcccctacgccaccgagatcaagaagagcaccgacgacagcatcttcaaggtgctggactggttcaacagaagcagctacagcgacgacaacaagagcttcctgcagcaccccagaggcatcgagagcaaggagaagaccgacagcaagagccaggtggccgtggacctggtgaccgacgacaccaccctgagagagaacggcagcaagaccctgagccccagcaagatcgagctgaagcccgtgagaagcgacagccccttccaggccgagggcgacatgctggtgagcgagagctgccaggacaacaacgtgaacatcaagagcaagttcatgaacctgagccagaagggcacccccaaggagggccccggcatcctgcagcccttcgagagctacggcacccccagccagggcagcaagaacatggactacagccaggacagcaagagccccggcaagggcaacggcgccagccccagcaacagcaactacagctacagcgtgctgaaggagagcgacgccgagaaccaggtgccctgcaacaccaacaacatcggcaacctgggcgaggaggagcccaagttccacgcccacgaggagaacagaggccacagcgaggtgaacttcgacagcagcaccgtggtgaaggagcccggcctgaaggacaacatgaacgccgagagaaagagcaaggtgggcaacacctacatcctgaaggccagcctggagcccgagaacatcaagagcacccccggcgtggccaacaacggcagcccctggaagaagcccgaggtgcagttccagcaggaggccggcgaggtgcccaagaaccaggtgcagagagagaagtacaagagagtgagcgacagaatcagcttctgggagggcgagaaggccggcgccaagatcacccacgagaagcccaccagcagctgcagccaggagcagcccagcgccaaggcctaccagcccgtgaagaagagccagggcgtgagcagcatggacagcctgagcaccgaccagagcgagtacaaccaggccatccccaagagagtggtgctggacgaggacgaccaggccagccagctgagcaacagctacagcagcaacaagagcaaggagaccaagccccagatcgccggccccagcagatactacctgagcgccgagcagagcgacaaggtgagcctgttccagaacaagaagaacgagcccatcaagagaagccaggtggccgacagcctgcccagcagaagaaacatcaccctgcccgccctgcagccccccagcaacgtgggcagcgagagacacgcccccctggagaaggacagacccctggtgagagagagcaacgccaacttcaaggtgatgagcctgaaggagagaatggacgagcccaacgccgagcaggtgtacaaccccagccagttcgagaacctgagaaagttctgggacctggaggccaacagcaacagcaaggacaacgacaagaacatcaccaccaccagccagaagaacagcgcccccttcaacagacagaagcacaaggagttcagcgacatcaagctgagcggcaagaacacccacgaggccgaggtgctgctgagccccaagaaggtgatggccagagaggagatggagaagctgaacagcaagggcatcctgcaggtgctgcccgacgagatcaccttccccctgagccccctgagaaagtacacctaccagctgcccggcaacgagagcagcaaggagaacgtggagaagaacaccgagggcatcgtgacccccgtgttcaaggaggagaaggactacagcgagcaggagatccaggagagcatcatcaagaccaacgtgctgagcaaggactgcaaggacaccttcaacgacagcctgcagaagctgctgagcgagaccagcacccccgccatccagcccagcggcggcaaggtgcacggcaagcaggtgctggagcccagcgtgagcgagaacagaacctggccccagaagaccgacttcgccgacaccgaggaggaggtgaagggccccgagaagatcatcaacgagcacgtggacaagaccgtggtgcaccccaaggtgaagagaaacagcctgaccgccagcctggacaagctgctgaaggaggccaccggcaccagccccagccccctgcaggccaagctggcccccgtgatcaccggcaccaacagcaagctggaggagggcagattcttcggcaagggcatcgagcagagccacaacaccagcgccgacaagagagagatcctggcccccttccccgtgagagacgagaccttcggcaacaccgccctgctgaagaaggccgagagcggcgagtgccagctgagcacccagaacctgatccagatggccgccgaggacagccaccccctggaccccaccagccagctgagcagaaagggcagcttcggcgacgtggccagccccccccaggacatgctgttcccccaggacgcccacctggtgccccaggccagagtgcaccccagccagaccgagatcagcgagaccgtggagaaggtgatcctgccccccagacccgtgctgaacgacgtgagcgccgccctgcagaagctgtgcggcgaggtgtggctgagctaccccgccggcagagaggtgggccccggcgaggtgaaccccgagttccccgaggccgtgcagcccgtgtgcagccccctgaacccccccggcgtgatcagcccctgggccaccatggacaccatcgtgcccgacagaaaggacttctacagcagcaacgtggtgcccgacaagacccacgaggtgggcagctacctggccgcccagatgagccccagcgaccagaccctgagcagcttcgccagcatcgtggcccagtacggcaagggcctgccccaggaggtggaggagatcgtgagagagaccatcgtgcagcccaagagcgagttcctggagttcagcgccggcctggagaagctgctgaaggaggagaccgagaccttccccagcaagtacgagagcgacaccggcaacctgagccccagcaagctgatcggcagcaccgaggagcccagaagagccaccagcgagtgccaccccgaggagctgaaggagaccgtggagaaggccgaggcccccctgatcaccgagagcgccttcgacgccggcttcgagaagctgctgaaggagatcaccgaggcccccccctaccagccccaggtgagcgtgagagaggagacccacgagaaggagagcagccagagcgagcagaccagattcctgggcaccgtgccccacttctacagagccgccagccagaccagcgagatgaaggacaagagcaacggcctggagagccaggtgaaccagtgcgacaagatgctgggcggcgacgccctggtgaccgacctgctggtggacttctgcggcagcagaagcggcgtggagatccccagaaccccccagctgtacgtggcccacgagatcggcaccatcaagaccgtgaccccccccgaggacagagacagcgagagcggcgtggccggcggccagggcaccctgcaggagcccggcttcggcgaggccagcgaggccatcagcgtgagcagaaacagacagcccatccccctgctgatgaacaaggagaacagcaccaagaccagcaaggtggagctgaccctggccagcccctacatgaagcaggagaaggaggaggagaaggagggcttcagcgagagcgacttcagcgacggcaacaccagcagcaacgccgagagctggagaaaccccagcagcagcgaggaggagcccagccccgtgctgaagaccctggagagaagcgccgccagaaagatgcccagcaagagcctggaggacatcagcagcgacagcagcaaccaggccaaggtggacaaccagcccgaggagctggtgagaagcgccgaggacgtgagcaccgtgcccacccagcccgacaaccccttcagccaccccgacaagctgaagagaatgagcaagagcgtgcccgccttcctgcaggacgagagcgacgacagagagaccgacaccgccagcgagagcagctaccagctgagcagacacaagaagagccccagcagcctgaccaacctgagcagcagcagcggcatgaccagcctgagcagcgtgagcggcagcgtgatgagcgtgtacagcggcgacttcggcaacctggaggtgaagggcaacatccagttcgccatcgagtacgtggagagcctgaaggagctgcacgtgttcgtggcccagtgcaaggacctggccgccgccgacgtgaagaagcagagaagcgacccctacgtgaaggcctacctgctgcccgacaagggcaagatgggcaagaagaagaccctggtggtgaagaagaccctgaaccccgtgtacaacgagatcctgagatacaagatcgagaagcagatcctgaagacccagaagctgaacctgagcatctggcacagagacaccttcaagagaaacagcttcctgggcgaggtggagctggacctggagacctgggactgggacaacaagcagaacaagcagctgagatggtaccccctgaagagaaagaccgcccccgtggccctggaggccgagaacagaggcgagatgaagctggccctgcagtacgtgcccgagcccgtgcccggcaagaagctgcccaccaccggcgaggtgcacatctgggtgaaggagtgcctggacctgcccctgctgagaggcagccacctgaacagcttcgtgaagtgcaccatcctgcccgacaccagcagaaagagcagacagaagaccagagccgtgggcaagaccaccaaccccatcttcaaccacaccatggtgtacgacggcttcagacccgaggacctgatggaggcctgcgtggagctgaccgtgtgggaccactacaagctgaccaaccagttcctgggcggcctgagaatcggcttcggcaccggcaagagctacggcaccgaggtggactggatggacagcaccagcgaggaggtggccctgtgggagaagatggtgaacagccccaacacctggatcgaggccaccctgcccctgagaatgctgctgatcgccaagatcagcaagtag

SEQ ID NO: 284951 - DNA, 3771 bp, Artificial Sequence
  derived and/or modified sequence
atggacgagcccaacgccgagcaggtgtacaaccccagccagttcgagaacctgagaaagttctgggacctggaggccaacagcaacagcaaggacaacgacaagaacatcaccaccaccagccagaagaacagcgcccccttcaacagacagaagcacaaggagttcagcgacatcaagctgagcggcaagaacacccacgaggccgaggtgctgctgagccccaagaaggtgatggccagagaggagatggagaagctgaacagcaagggcatcctgcaggtgctgcccgacgagatcaccttccccctgagccccctgagaaagtacacctaccagctgcccggcaacgagagcagcaaggagaacgtggagaagaacaccgagggcatcgtgacccccgtgttcaaggaggagaaggactacagcgagcaggagatccaggagagcatcatcaagaccaacgtgctgagcaaggactgcaaggacaccttcaacgacagcctgcagaagctgctgagcgagaccagcacccccgccatccagcccagcggcggcaaggtgcacggcaagcaggtgctggagcccagcgtgagcgagaacagaacctggccccagaagaccgacttcgccgacaccgaggaggaggtgaagggccccgagaagatcatcaacgagcacgtggacaagaccgtggtgcaccccaaggtgaagagaaacagcctgaccgccagcctggacaagctgctgaaggaggccaccggcaccagccccagccccctgcaggccaagctggcccccgtgatcaccggcaccaacagcaagctggaggagggcagattcttcggcaagggcatcgagcagagccacaacaccagcgccgacaagagagagatcctggcccccttccccgtgagagacgagaccttcggcaacaccgccctgctgaagaaggccgagagcggcgagtgccagctgagcacccagaacctgatccagatggccgccgaggacagccaccccctggaccccaccagccagctgagcagaaagggcagcttcggcgacgtggccagccccccccaggacatgctgttcccccaggacgcccacctggtgccccaggccagagtgcaccccagccagaccgagatcagcgagaccgtggagaaggtgatcctgccccccagacccgtgctgaacgacgtgagcgccgccctgcagaagctgtgcggcgaggtgtggctgagctaccccgccggcagagaggtgggccccggcgaggtgaaccccgagttccccgaggccgtgcagcccgtgtgcagccccctgaacccccccggcgtgatcagcccctgggccaccatggacaccatcgtgcccgacagaaaggacttctacagcagcaacgtggtgcccgacaagacccacgaggtgggcagctacctggccgcccagatgagccccagcgaccagaccctgagcagcttcgccagcatcgtggcccagtacggcaagggcctgccccaggaggtggaggagatcgtgagagagaccatcgtgcagcccaagagcgagttcctggagttcagcgccggcctggagaagctgctgaaggaggagaccgagaccttccccagcaagtacgagagcgacaccggcaacctgagccccagcaagctgatcggcagcaccgaggagcccagaagagccaccagcgagtgccaccccgaggagctgaaggagaccgtggagaaggccgaggcccccctgatcaccgagagcgccttcgacgccggcttcgagaagctgctgaaggagatcaccgaggcccccccctaccagccccaggtgagcgtgagagaggagacccacgagaaggagagcagccagagcgagcagaccagattcctgggcaccgtgccccacttctacagagccgccagccagaccagcgagatgaaggacaagagcaacggcctggagagccaggtgaaccagtgcgacaagatgctgggcggcgacgccctggtgaccgacctgctggtggacttctgcggcagcagaagcggcgtggagatccccagaaccccccagctgtacgtggcccacgagatcggcaccatcaagaccgtgaccccccccgaggacagagacagcgagagcggcgtggccggcggccagggcaccctgcaggagcccggcttcggcgaggccagcgaggccatcagcgtgagcagaaacagacagcccatccccctgctgatgaacaaggagaacagcaccaagaccagcaaggtggagctgaccctggccagcccctacatgaagcaggagaaggaggaggagaaggagggcttcagcgagagcgacttcagcgacggcaacaccagcagcaacgccgagagctggagaaaccccagcagcagcgaggaggagcccagccccgtgctgaagaccctggagagaagcgccgccagaaagatgcccagcaagagcctggaggacatcagcagcgacagcagcaaccaggccaaggtggacaaccagcccgaggagctggtgagaagcgccgaggacgtgagcaccgtgcccacccagcccgacaaccccttcagccaccccgacaagctgaagagaatgagcaagagcgtgcccgccttcctgcaggacgagagcgacgacagagagaccgacaccgccagcgagagcagctaccagctgagcagacacaagaagagccccagcagcctgaccaacctgagcagcagcagcggcatgaccagcctgagcagcgtgagcggcagcgtgatgagcgtgtacagcggcgacttcggcaacctggaggtgaagggcaacatccagttcgccatcgagtacgtggagagcctgaaggagctgcacgtgttcgtggcccagtgcaaggacctggccgccgccgacgtgaagaagcagagaagcgacccctacgtgaaggcctacctgctgcccgacaagggcaagatgggcaagaagaagaccctggtggtgaagaagaccctgaaccccgtgtacaacgagatcctgagatacaagatcgagaagcagatcctgaagacccagaagctgaacctgagcatctggcacagagacaccttcaagagaaacagcttcctgggcgaggtggagctggacctggagacctgggactgggacaacaagcagaacaagcagctgagatggtaccccctgaagagaaagaccgcccccgtggccctggaggccgagaacagaggcgagatgaagctggccctgcagtacgtgcccgagcccgtgcccggcaagaagctgcccaccaccggcgaggtgcacatctgggtgaaggagtgcctggacctgcccctgctgagaggcagccacctgaacagcttcgtgaagtgcaccatcctgcccgacaccagcagaaagagcagacagaagaccagagccgtgggcaagaccaccaaccccatcttcaaccacaccatggtgtacgacggcttcagacccgaggacctgatggaggcctgcgtggagctgaccgtgtgggaccactacaagctgaccaaccagttcctgggcggcctgagaatcggcttcggcaccggcaagagctacggcaccgaggtggactggatggacagcaccagcgaggaggtggccctgtgggagaagatggtgaacagccccaacacctggatcgaggccaccctgcccctgagaatgctgctgatcgccaagatcagcaagtag

SEQ ID NO: 284952 - DNA, 5343 bp, Artificial Sequence
  derived and/or modified sequence
atgattaactcgagcctcagcatgctgttttcttatttagaaaaatacttctacgtagcagatgagctaagccactgtgtggagccagaaccatcacaggtcccagggggctccagtagagacagacagcaaggaaagccaccacctctgccagccttgaaggctaagacctcatccaggtctggaccgtacgctacagagattaaaaaatcgaccgatgatagtatattcaaagtcctcgactggttcaaccggagctcctattcggatgacaacaaatctttcctgcagcacccccgcggcatagagagcaaggagaagaccgattccaaaagtcaggtggccgtggacctcgtcactgatgatacgaccctgagagaaaacggctctaagaccctctccccaagtaagatcgaactgaagccagtaagatccgattctccctttcaagctgagggagatatgctcgtgtctgaaagctgtcaggataacaatgtgaacataaagtcgaaattcatgaacctttctcagaaaggcacccctaaggaggggcccggaatcttgcagccatttgagtcatatggcaccccttcccagggtagcaagaatatggactactctcaagactccaagtcgccaggcaaaggaaacggagctagcccttcaaactctaactacagctactccgtactgaaagaaagtgatgccgaaaaccaggttccatgtaacacaaataatattggtaacctcggcgaagaagagccaaagttccacgcccacgaagagaatagggggcactcagaggtaaacttcgactcctcaacagtggtgaaggagccaggactaaaggacaatatgaacgccgagagaaaatctaaagttgggaatacatatattctgaaggcgagtctcgagccagaaaatatcaagtccactccaggtgtggcaaataacggctctccctggaagaagccagaagtccaattccagcaggaggctggagaggtgcctaagaatcaggtgcaaagagaaaaatacaagagggtgtctgacaggatttccttctgggagggtgagaaggcgggagcgaagattacgcatgagaaaccaactagctcttgtagccaagaacagccatctgccaaagcgtaccaacccgtgaagaagtctcagggcgtgtcatctatggatagcctttccactgatcagtctgagtataaccaagctattccaaaacgagtggtgctggacgaggatgatcaggcttcccagttgtctaattcttatagctctaacaagtcaaaggagaccaagccacagattgccggcccctcaaggtactatctgagcgctgaacagagcgataaagtgtcccttttccagaataagaagaacgaacccatcaagcgctctcaggtggctgatagtttaccttcccggcgcaatatcacactgcccgcacttcagccacccagcaatgtagggtcggagaggcacgccccactggaaaaagatcgtcccctcgttagagagtcaaatgcgaattttaaggtaatgtccctgaaagaacgaatggacgaaccaaatgcagagcaggtctacaacccttcccaatttgagaatcttcgcaagttttgggacctggaagctaattctaactctaaggacaatgacaagaacatcactacaacaagtcagaaaaacagtgcgccattcaaccggcagaagcacaaggagttcagcgatattaagctgtctggtaagaacacccatgaggcggaagttctgctgtccccaaagaaggttatggctagggaggagatggagaagttaaatagcaaagggatactgcaggttcttcctgatgaaatcacttttcccctgtctccactgaggaagtacacctatcaactcccaggaaacgagtcatccaaagagaatgtagagaagaacacagagggaatcgtcacccccgtgtttaaagaagagaaggattactctgagcaggagatccaagagtccatcataaagaccaacgtcctctccaaggattgcaaagatacttttaacgacagcctgcagaagctgttgtccgagactagtaccccagccatacagcctagtggcggcaaagtgcatggcaaacaggtgttggagccatcagtgtctgagaaccggacctggccgcaaaaaacggatttcgcagatacagaggaagaggtgaaaggccctgaaaagattatcaacgaacacgtcgacaaaacagtggtgcacccaaaggtgaagagaaatagcctgaccgcatctctggacaaattactgaaggaggctaccggtacatcaccatctccactgcaggccaaattggcacccgttattactggcacaaactccaagctcgaggagggccggttcttcggtaaggggatcgaacaatcccataacaccagtgctgataaaagagaaatactggccccatttccggtacgcgatgagaccttcggcaatacagccctacttaagaaagccgagtcgggagagtgtcaattgagcacacaaaacttaatccaaatggcagcggaagactcacatccgctcgaccctaccagccaattgtctagaaaagggtcgttcggggacgtagctagcccaccacaggacatgctgttccctcaggatgcacacctggtgcctcaggctcgggtgcatccttcacagaccgaaatctccgaaacagtagaaaaggtgatcctgccacccagacccgtgttaaatgatgtgtcggctgcgctgcaaaagctttgcggagaggtgtggctctcttaccctgccggacgggaggtgggaccaggcgaagtcaatcctgaattcccagaggccgtgcaacccgtttgtagcccactaaatcccccaggggtgatctcgccctgggcgacaatggataccatcgttccggatcgcaaagatttttactccagcaacgttgtgcccgataaaacgcacgaggttgggtcctacctcgccgctcaaatgtccccctctgaccaaaccctgtcttcatttgccagcattgttgcccagtatggaaaagggctgccgcaagaagtggaggagatcgtccgggagacaattgtccaacccaaaagcgagtttctggagttttcggctggccttgaaaagctgcttaaagaggagactgagactttcccgagcaagtatgagtctgacaccgggaatttgtcacccagtaagctcattggtagtaccgaggagccacgacgagcaacatctgagtgtcacccagaggagctgaaggagaccgtcgagaaggccgaggcacctctgattacggaaagcgcttttgatgccgggtttgaaaaactcctgaaggaaattaccgaagctcccccctaccagccccaggtctctgttcgcgaggaaacccatgagaaagagtctagccagagcgaacagactcggtttcttggtacagttccccacttctaccgcgcggctagtcaaacctccgaaatgaaagataagtcaaacggcctggagtcccaggtgaatcaatgtgacaaaatgttggggggagatgccttggtgacagatctactggtcgatttctgcggcagtcggagtggagttgagatcccccgaaccccccaactgtacgtagcgcacgagattggaacgatcaaaaccgtgacacctccagaagaccgtgacagtgagtcgggcgtcgctggcggccagggcaccttgcaagaaccagggtttggcgaggcaagcgaggctattagcgtctccagaaaccgccagccaatccccctcctgatgaataaggaaaatagcaccaaaaccagcaaggtggagttgacccttgcctccccttatatgaagcaggaaaaagaggaggagaaagaggggttttcggagtcggactttagcgatggcaacacctccagtaacgcggagtcttggcggaacccgagctcgagcgaagaagagccttcgcccgttttgaaaaccctcgagaggagtgccgcacggaaaatgccatccaagagtctagaggatatctcctctgacagctccaatcaagctaaggtcgataaccagcctgaagagctggtccgatccgcagaggacgtgtctacagttcctacccaaccagacaaccctttctcgcacccggacaaattgaagagaatgtccaagagcgtacccgcatttctccaagatgagtctgacgacagagagactgacacagcatccgaaagttcctaccagctgtcaagacataaaaagtctccatcatccctgactaatctttcatcttcatccgggatgacctccctctcctctgtctcagggagcgttatgagtgtctatagcggagacttcgggaatctcgaagtaaagggcaatatacagtttgctattgagtatgtcgagagtttgaaagagctgcatgtctttgtagcacagtgcaaggatctggctgcagctgatgtgaaaaagcagcgcagcgacccatacgtgaaagcgtatcttctcccagacaagggaaaaatgggtaagaagaaaaccttggtcgtgaagaagacattgaacccagtctacaatgaaatcctgaggtataaaatagaaaagcagattctcaagacccagaagttgaacttgagtatctggcatagggacacttttaagcgcaatagcttcctaggggaggtggaactcgatcttgagacctgggattgggataacaagcaaaataagcaattacgctggtatcctttgaagaggaaaaccgccccagtggcactagaagccgaaaatcgcggagaaatgaagcttgccctccaatacgtccccgagcccgtccctggaaaaaaactccctaccaccggggaagtacatatctgggttaaggagtgcttggacctgccgttgctgagaggaagccacctaaactcgtttgtgaagtgtactattttgccagacacgagcagaaagtctaggcagaaaacccgggccgtcggcaagaccaccaatccaattttcaaccataccatggtttatgatggcttccgccccgaggacctgatggaggcctgtgtcgaacttaccgtctgggaccactacaagctcaccaaccagtttctggggggcttacgcataggctttggcaccggaaagtcttatgggacagaggtggattggatggatagtacttcagaggaggtcgctctgtgggagaaaatggttaactcgccaaatacgtggattgaggccacgctgccgcttagaatgctcctcatagccaagatatccaaatag

SEQ ID NO: 284953 - DNA, 3771 bp, Artificial Sequence
  derived and/or modified sequence
atggatgaaccgaacgccgaacaggtctacaacccttcccagttcgagaatttgagaaagttttgggatttagaagccaattctaactcaaaagataatgataaaaacatcactaccacctcccaaaaaaattctgcgccttttaataggcagaaacataaggaattctccgatattaagttaagtggaaagaacacacatgaggccgaagtccttctgtcacctaaaaaggtgatggctagagaagagatggagaagttgaactccaaaggtatattacaagtcctgccagatgagatcacattcccgctttcgcccctgcggaagtacacttaccagctcccgggcaacgagagctccaaagaaaatgtggagaagaacactgagggcatcgtgaccccggtctttaaagaagaaaaggactattccgagcaggagatccaggagagcatcattaagactaatgttctctcgaaggactgcaaagacacgttcaatgattcgctgcagaagctactatccgagacctcaacccccgctattcagccaagtggtggcaaagtgcacggcaaacaagtcctcgaacccagtgtgagcgagaaccgcacctggccacagaaaaccgattttgccgatacagaggaagaggtgaaagggcctgagaagattatcaacgaacacgttgataaaactgtagtgcacccaaaggtgaagagaaactccctgacggcctctttagacaaactgctgaaggaggctacggggacatccccaagtcccctccaggctaaattggcaccagtaattaccggcacgaatagtaagctggaggagggacgcttcttcggcaaaggcattgagcagagtcataacacctcggccgacaagagggagattctagccccctttccggttcgcgatgagacattcggtaataccgccttattgaagaaggctgaatccggagaatgtcaactttccactcaaaatcttattcagatggccgcggaagatagccaccccctcgaccctacgtctcagctttcgcgcaaaggatcattcggagacgtggccagtcccccgcaggacatgctattcccacaggatgctcatctggtccctcaggcacgggtacacccttcccaaactgaaatctctgagaccgtggagaaggtaatactgccacctaggcctgtgctgaatgacgtgtcagccgcactccagaagctctgtggtgaagtttggctatcctatccggctggccgcgaagtaggccctggtgaggtcaatcctgagttcccagaagccgtacagcccgtgtgcagccctctgaatcctcccggcgtgatctcgccgtgggccaccatggacacaatagtgcccgatcgaaaagacttctactccagcaacgtcgtgcctgataagacacatgaggtcgggtcgtatcttgcagctcaaatgtctccctctgaccagaccttaagtagctttgcgagtatcgtggcacagtacgggaaaggactgcctcaagaagttgaggaaatcgtgcgtgagactatcgtacagcccaagtccgagtttcttgagttcagcgcaggactcgagaaactcctgaaggaagagaccgagactttcccatccaaatatgagagtgataccggaaacctcagccctagcaaattgatcggatctaccgaggagcctaggcgcgctacctctgaatgccatcctgaggagctcaaagaaactgtcgagaaggctgaagctcctctcatcacagaatcagcattcgacgctggctttgagaagctgcttaaggagatcactgaggcaccaccatatcaacctcaggtgagcgtacgggaagaaactcacgagaaagaatctagccagtccgagcaaaccaggttcctgggcaccgttcctcacttctatcgcgctgcaagccagacctcggaaatgaaagataagtctaacggtctggaaagtcaagtcaatcagtgcgacaaaatgttgggtggggacgcccttgtcacagacctcctcgtggatttttgtggcagtaggtccggcgtggaaatccctaggacaccccagctgtacgttgcgcacgaaattggtaccataaaaactgttacgccacctgaggacagggattcagagtctggcgttgctggaggccaggggacactacaggaacctggctttggcgaagcctccgaggccatcagcgtctcaagaaatcgtcagcccattcccctgctgatgaataaagaaaactccaccaaaacgtcaaaggtggagctgaccctggctagtccctacatgaaacaggagaaagaggaagaaaaggagggcttctcagagtccgacttctctgacggcaatacctcatccaatgcagagtcttggcgtaatccttcttcctccgaggaggaaccatcgcctgtgctcaaaaccctggaaaggtccgctgcgcgaaagatgccgtccaagagcctggaagatattagtagtgactcctccaaccaggccaaggtggataaccagcccgaggagttggtgaggtcagccgaggacgtctcaaccgttccaacccaaccagataatccatttagccaccctgataagcttaaacgaatgagtaagtctgtccccgcattcttgcaggatgagagcgatgatagggagacagatacagccagtgagagttcgtaccagctctcgcgacataagaaatctccttcaagtcttaccaatctgtctagcagctcaggcatgacctctctgtcttctgtatcgggcagcgttatgtcggtgtactctggagacttcgggaacctggaagtaaaaggtaatatacagttcgccatcgagtacgtcgaatctctgaaagagctgcacgtcttcgtggcccagtgcaaggacttagctgcagccgatgtgaaaaaacagcgcagtgatccgtatgtaaaggcctatctcctgccagacaaggggaagatggggaaaaagaaaaccttagtagttaaaaagaccctcaatccagtgtacaatgagatcctgagatataaaattgaaaaacagatactaaagacccaaaaacttaatctgtcaatttggcaccgagatactttcaagcgaaatagtttcctaggcgaggtggaactagacctggaaacttgggactgggacaacaaacagaacaagcagctcaggtggtatcctctgaagcggaagaccgctccagtagccctggaggctgaaaaccgaggagaaatgaagctcgccctccagtatgtcccagaacccgtccctgggaagaaactccctactaccggtgaggtgcacatatgggtcaaggaatgcttggatcttccacttcttagaggcagtcatctgaatagcttcgtcaagtgtaccattctgccagataccagccgcaagtcccgtcagaagacacgtgccgtcggcaagactactaaccctattttcaatcatacgatggtgtacgacggctttcggcccgaggatctcatggaagcctgtgttgaactgacagtgtgggatcactataaactaacgaaccagttcttagggggactgaggatcggctttggaactgggaaaagctatggcacagaagttgattggatggattccacatcggaggaagttgcgttgtgggagaagatggtaaactcacctaacacgtggatcgaggcgaccctaccactgcgcatgctgctcatcgcaaaaatctccaagtag

SEQ ID NO: 284954 - DNA, 5343 bp, Artificial Sequence
  derived and/or modified sequence
atgatcaacagcagcctgtccatgctgttctcctacctggagaagtacttctacgtggctgatgagctgagccactgtgtggagcctgagcccagccaggtgcctgggggcagcagccgggaccggcagcagggcaagcccccacccctgcctgccctgaaggccaagaccagcagccgcagcggcccctatgccacagagatcaagaagagcacagatgacagcatcttcaaggtgctggactggttcaacagaagcagctacagtgatgacaacaagagcttcctgcagcacccccggggcatcgagagcaaggagaagacagacagcaagagccaggtggccgtggacctggtgacagatgacaccaccctgagagaaaatggcagcaagaccctgagccccagcaagattgagctgaagcctgtgcggagtgacagccccttccaggccgagggggacatgctggtgtctgagagctgccaggacaacaacgtgaacatcaagagcaagttcatgaacctgagccagaagggcacccccaaggagggccctggcatcctgcagccctttgagagctatggcacccccagccagggcagcaagaacatggactacagccaggacagcaagagccctggaaaaggaaatggagccagccccagcaacagcaactacagctacagcgtgctgaaggagagtgatgctgagaaccaggtgccctgcaacaccaacaacatcggcaacctgggggaggaggagcccaagttccacgcccacgaggagaacagaggccacagcgaggtgaactttgacagcagcacagtggtgaaggagcccggcctgaaggacaacatgaatgctgagaggaagagcaaggtgggcaacacctacatcctgaaggccagcctggagcctgagaacatcaagagcaccccaggagtggccaacaacggcagcccctggaagaagccagaggtgcagttccagcaggaggccggggaggtgcccaagaaccaggtgcagcgggagaagtacaagagggtgtctgaccgcatctccttctgggagggggagaaggccggggccaagatcacccatgagaagcccaccagcagctgcagccaggagcagcccagcgccaaggcctaccagcctgtgaagaagagccagggcgtgtcctccatggacagcctgagcacagaccagagcgagtacaaccaggccatccccaagagggtggtgctggatgaagatgaccaggccagccagctgagcaacagctacagcagcaacaagagcaaggagaccaagccccagattgctggccccagccgctactacctgtctgctgagcagagcgacaaggtgtccctcttccagaacaagaagaatgagcccatcaagaggagccaggtggccgacagcctgcccagcagaagaaacatcaccctgcctgccctgcagccccccagcaatgtgggcagcgagagacatgcccccctggagaaggaccggcccctggtgcgggagagcaatgccaacttcaaggtgatgagcctgaaggagaggatggatgagcccaatgctgagcaggtgtacaaccccagccagtttgagaacctgaggaagttctgggacctggaggccaacagcaacagcaaggacaatgacaagaacatcaccaccaccagccagaagaacagcgcccccttcaaccggcagaagcacaaggagttcagtgacatcaagctgagcggcaagaacacccatgaagctgaggtgctgctgagccccaagaaggtgatggcccgggaggagatggagaagctgaacagcaagggcatcctgcaggtgctgcctgatgagatcaccttccccctgagccccctgaggaagtacacctaccagctgcctggaaatgaaagcagcaaagaaaatgtggagaagaacacagagggcatcgtgacccctgtgttcaaggaggagaaggactacagcgagcaggagatccaggagagcatcatcaagaccaacgtgctgagcaaggactgcaaggacaccttcaatgacagcctgcagaagctgctgtctgagaccagcaccccagccatccagcccagcggcggcaaggtgcacggcaagcaggtgctggagcccagcgtgtctgagaacagaacctggccccagaagacagactttgctgacacagaggaggaggtgaagggccctgagaagatcatcaatgaacatgtggacaagacagtggtgcaccccaaggtgaagaggaacagcctgacagccagcctggacaagctgctgaaggaggccaccggcaccagccccagccccctgcaggccaagctggcccctgtgatcaccggcaccaacagcaagctggaggagggccgcttcttcggcaagggcatcgagcagagccacaacaccagcgctgacaagcgggagatcctggcccccttccctgtgagagatgagaccttcggcaacacagccctgctgaagaaggccgagagcggggagtgccagctgagcacccagaacctgatccagatggctgctgaggacagccaccccctggaccccaccagccagctgagcaggaagggcagctttggagatgtggccagccccccccaggacatgctgttcccccaggatgcccacctggtgccccaggcccgggtgcaccccagccagacagagatcagcgagaccgtggagaaggtgatcctgccccccaggcctgtgctgaatgatgtgtctgctgccctgcagaagctgtgtggggaggtgtggctgagctacccagctggccgggaggtgggccctggagaggtgaaccctgagttccctgaggccgtgcagcctgtgtgcagccccctgaaccccccaggagtcatcagcccctgggccaccatggacaccatcgtgcctgacaggaaggacttctacagcagcaatgtggtgcctgacaagacccatgaggtgggcagctacctggccgcccagatgagccccagcgaccagaccctgagcagctttgccagcatcgtggcccagtatggcaagggcctgccccaggaggtggaggagatcgtgcgggagaccatcgtgcagcccaagtctgagttcctggagttctctgctggcctggagaagctgctgaaggaggagacagagaccttccccagcaaatatgaaagtgacaccggcaacctgagccccagcaagctgattggcagcacagaggagccccggcgggccaccagcgagtgccaccctgaggagctgaaggagaccgtggagaaggccgaggcccccctcatcacagaaagtgcctttgatgctggctttgagaagctgctgaaggagatcacagaggccccaccctaccagccccaggtgtctgtgcgggaggagacccatgagaaggagagcagccagagcgagcagacccgcttcctgggcaccgtgccccacttctacagagctgccagccagaccagcgagatgaaggacaagagcaatggcctggagagccaggtgaaccagtgtgacaagatgctgggcggagatgccctggtgacagacctgctggtggacttctgtggcagccgcagcggcgtggagatccccaggaccccccagctgtatgtggcccacgagatcggcaccatcaagacagtgaccccacctgaggaccgggacagcgagagcggcgtggccggcggccagggcaccctgcaggagcccggctttggagaggccagcgaggccatctctgtgtccaggaaccggcagcccatccccctgctgatgaacaaggagaacagcaccaagaccagcaaggtggagctgaccctggccagcccctacatgaagcaggagaaggaggaggagaaggagggcttcagcgagagtgacttcagtgatggcaacaccagcagcaatgctgagagctggaggaaccccagcagcagcgaggaggagcccagccctgtgctgaagaccctggagaggtctgctgccaggaagatgcccagcaagagcctggaggacatcagcagtgacagcagcaaccaggccaaggtggacaaccagcctgaggagctggtgcgctctgcagaagatgtgtccacagtgcccacccagcctgacaaccccttcagccacccagacaagctgaagaggatgagcaagtctgtgcctgccttcctgcaggatgaaagtgatgaccgggagacagacacagccagcgagagcagctaccagctgagccgccacaagaagagccccagcagcctgaccaacctgagcagcagcagcggcatgaccagcctgagctctgtgtctggctctgtgatgtctgtgtacagcggggactttggaaacctggaggtgaagggcaacatccagtttgccatcgagtatgtggagagcctgaaggagctgcacgtgtttgtggcccagtgcaaggacctggccgctgctgatgtgaagaagcagaggagtgacccctacgtgaaggcctacctgctgcctgacaagggcaagatgggcaagaagaagaccctggtggtgaagaagaccctgaaccctgtgtacaatgagatcctgcgctacaagattgagaagcagatcctgaagacccagaagctgaacctgagcatctggcaccgggacaccttcaagaggaacagcttcctgggggaggtggagctggacctggagacctgggactgggacaacaagcagaacaagcagctgcgctggtaccccctgaagaggaagacagcccctgtggccctggaggctgaaaatagaggagagatgaagctggccctgcagtatgtgcctgagcctgtgcctgggaagaagctgcccaccactggagaggtgcacatctgggtgaaggagtgcctggacctgcccctgctgcggggcagccacctgaacagctttgtgaagtgcaccatcctgcctgacaccagcaggaagagccggcagaagaccagggctgtgggcaagaccaccaaccccatcttcaaccacaccatggtgtatgatggcttccggcctgaggacctgatggaggcctgtgtggagctgactgtgtgggaccactacaagctgaccaaccagttcctgggcggcctgcgcatcggcttcggcaccgggaagagctatggaacagaggtggactggatggacagcaccagcgaggaggtggccctgtgggagaagatggtgaacagccccaacacctggattgaggccaccctgcccctgaggatgctgctgattgccaagatcagcaagtag

SEQ ID NO: 284955 - DNA, 3771 bp, Artificial Sequence
  derived and/or modified sequence
atggatgagcccaatgctgagcaggtgtacaaccccagccagtttgagaacctgaggaagttctgggacctggaggccaacagcaacagcaaggacaatgacaagaacatcaccaccaccagccagaagaacagcgcccccttcaaccggcagaagcacaaggagttcagtgacatcaagctgagcggcaagaacacccatgaagctgaggtgctgctgagccccaagaaggtgatggcccgggaggagatggagaagctgaacagcaagggcatcctgcaggtgctgcctgatgagatcaccttccccctgagccccctgaggaagtacacctaccagctgcctggaaatgaaagcagcaaagaaaatgtggagaagaacacagagggcatcgtgacccctgtgttcaaggaggagaaggactacagcgagcaggagatccaggagagcatcatcaagaccaacgtgctgagcaaggactgcaaggacaccttcaatgacagcctgcagaagctgctgtctgagaccagcaccccagccatccagcccagcggcggcaaggtgcacggcaagcaggtgctggagcccagcgtgtctgagaacagaacctggccccagaagacagactttgctgacacagaggaggaggtgaagggccctgagaagatcatcaatgaacatgtggacaagacagtggtgcaccccaaggtgaagaggaacagcctgacagccagcctggacaagctgctgaaggaggccaccggcaccagccccagccccctgcaggccaagctggcccctgtgatcaccggcaccaacagcaagctggaggagggccgcttcttcggcaagggcatcgagcagagccacaacaccagcgctgacaagcgggagatcctggcccccttccctgtgagagatgagaccttcggcaacacagccctgctgaagaaggccgagagcggggagtgccagctgagcacccagaacctgatccagatggctgctgaggacagccaccccctggaccccaccagccagctgagcaggaagggcagctttggagatgtggccagccccccccaggacatgctgttcccccaggatgcccacctggtgccccaggcccgggtgcaccccagccagacagagatcagcgagaccgtggagaaggtgatcctgccccccaggcctgtgctgaatgatgtgtctgctgccctgcagaagctgtgtggggaggtgtggctgagctacccagctggccgggaggtgggccctggagaggtgaaccctgagttccctgaggccgtgcagcctgtgtgcagccccctgaaccccccaggagtcatcagcccctgggccaccatggacaccatcgtgcctgacaggaaggacttctacagcagcaatgtggtgcctgacaagacccatgaggtgggcagctacctggccgcccagatgagccccagcgaccagaccctgagcagctttgccagcatcgtggcccagtatggcaagggcctgccccaggaggtggaggagatcgtgcgggagaccatcgtgcagcccaagtctgagttcctggagttctctgctggcctggagaagctgctgaaggaggagacagagaccttccccagcaaatatgaaagtgacaccggcaacctgagccccagcaagctgattggcagcacagaggagccccggcgggccaccagcgagtgccaccctgaggagctgaaggagaccgtggagaaggccgaggcccccctcatcacagaaagtgcctttgatgctggctttgagaagctgctgaaggagatcacagaggccccaccctaccagccccaggtgtctgtgcgggaggagacccatgagaaggagagcagccagagcgagcagacccgcttcctgggcaccgtgccccacttctacagagctgccagccagaccagcgagatgaaggacaagagcaatggcctggagagccaggtgaaccagtgtgacaagatgctgggcggagatgccctggtgacagacctgctggtggacttctgtggcagccgcagcggcgtggagatccccaggaccccccagctgtatgtggcccacgagatcggcaccatcaagacagtgaccccacctgaggaccgggacagcgagagcggcgtggccggcggccagggcaccctgcaggagcccggctttggagaggccagcgaggccatctctgtgtccaggaaccggcagcccatccccctgctgatgaacaaggagaacagcaccaagaccagcaaggtggagctgaccctggccagcccctacatgaagcaggagaaggaggaggagaaggagggcttcagcgagagtgacttcagtgatggcaacaccagcagcaatgctgagagctggaggaaccccagcagcagcgaggaggagcccagccctgtgctgaagaccctggagaggtctgctgccaggaagatgcccagcaagagcctggaggacatcagcagtgacagcagcaaccaggccaaggtggacaaccagcctgaggagctggtgcgctctgcagaagatgtgtccacagtgcccacccagcctgacaaccccttcagccacccagacaagctgaagaggatgagcaagtctgtgcctgccttcctgcaggatgaaagtgatgaccgggagacagacacagccagcgagagcagctaccagctgagccgccacaagaagagccccagcagcctgaccaacctgagcagcagcagcggcatgaccagcctgagctctgtgtctggctctgtgatgtctgtgtacagcggggactttggaaacctggaggtgaagggcaacatccagtttgccatcgagtatgtggagagcctgaaggagctgcacgtgtttgtggcccagtgcaaggacctggccgctgctgatgtgaagaagcagaggagtgacccctacgtgaaggcctacctgctgcctgacaagggcaagatgggcaagaagaagaccctggtggtgaagaagaccctgaaccctgtgtacaatgagatcctgcgctacaagattgagaagcagatcctgaagacccagaagctgaacctgagcatctggcaccgggacaccttcaagaggaacagcttcctgggggaggtggagctggacctggagacctgggactgggacaacaagcagaacaagcagctgcgctggtaccccctgaagaggaagacagcccctgtggccctggaggctgaaaatagaggagagatgaagctggccctgcagtatgtgcctgagcctgtgcctgggaagaagctgcccaccactggagaggtgcacatctgggtgaaggagtgcctggacctgcccctgctgcggggcagccacctgaacagctttgtgaagtgcaccatcctgcctgacaccagcaggaagagccggcagaagaccagggctgtgggcaagaccaccaaccccatcttcaaccacaccatggtgtatgatggcttccggcctgaggacctgatggaggcctgtgtggagctgactgtgtgggaccactacaagctgaccaaccagttcctgggcggcctgcgcatcggcttcggcaccgggaagagctatggaacagaggtggactggatggacagcaccagcgaggaggtggccctgtgggagaagatggtgaacagccccaacacctggattgaggccaccctgcccctgaggatgctgctgattgccaagatcagcaagtag

SEQ ID NO: 284956 - DNA, 5343 bp, Artificial Sequence
  derived and/or modified sequence
atgatcaacagcagcctgagcatgctgttcagctacctggagaagtacttttacgttgccgatgagctgagccactgcgtggaacctgagccctctcaggtgccaggtggatcctccagggaccgacagcaggggaaaccccccccattgcctgccctcaaagctaagacaagctcaagaagtgggccttacgctacagagattaagaagtcgacagatgacagcatctttaaagttttggactggtttaatcgttcatcgtacagcgatgacaacaaaagcttcctgcagcatccccgcgggattgagagcaaagaaaaaaccgactcaaagagtcaggtggcagttgacctcgtgacagatgacacaaccctgagagaaaacgggagcaaaactctcagcccctctaagattgagctgaagcctgtccgaagcgattccccttttcaggcagagggcgacatgctcgtgtcagaatcatgtcaggataacaatgtcaacatcaaaagcaaattcatgaacctctcacagaaaggcacacccaaggaggggcctggtatactacaaccttttgagtcatacggaacgccatcacagggttcaaaaaatatggattatagtcaagacagtaaaagtccaggaaagggtaacggcgcaagcccctctaatagcaattatagttatagtgtgctcaaagagagcgacgctgaaaaccaggtcccatgtaacactaacaatataggcaatctgggagaggaagaaccgaagttccacgcccacgaggaaaaccgtggacatagtgaggtgaatttcgatagctctacggtggtgaaggaacctggcctgaaggacaacatgaatgcagaacgtaaatccaaagtcggcaatacctatatcttgaaggcttctctggaaccggagaatatcaaatctactcccggcgtagccaacaatggctctccttggaagaagcctgaagtgcaatttcaacaggaagccggcgaagtgccgaaaaatcaggtgcagagggagaagtataaacgcgtcagtgacagaatcagtttctgggagggcgaaaaagcaggggcgaaaataacccatgagaaacctacctcgagctgtagccaagagcagcctagcgccaaggcttatcagcctgtcaaaaaaagccagggcgtgagttctatggatagccttagcactgaccagtctgagtataatcaggctattcccaagcgcgttgtgcttgacgaagacgaccaagccagtcaactcagcaactcctattcatctaataaatcgaaggaaacaaagccccaaatcgctggcccttcaagatattatctgtctgccgaacagtcagataaggtctcactgttccagaataaaaagaacgagcctattaaaaggagccaggttgctgactccctgccctcaagaagaaacataacgttacctgcgctgcaacccccttctaatgtcggatccgagcgacacgcacctttggagaaggatcggcccctggttagggagtccaacgcaaacttcaaggtgatgtccctgaaggaacgaatggacgaacccaatgccgaacaagtgtacaatcctagccaattcgaaaatctccgtaaattttgggatctggaagccaattccaattcaaaggataacgacaagaatattactacgacctcacagaagaattccgctcctttcaacaggcagaagcataaggaattttctgatatcaaactgtcaggaaaaaatactcatgaagcagaagtgctccttagccctaaaaaggtgatggctcgagaagaaatggagaagttaaacagtaaggggattctccaggtgctgcccgatgaaataacgtttcccctcagccccctgaggaaatacacatatcagctccctggaaacgagagctctaaggagaatgttgaaaagaatacagagggcatcgtcacacctgtctttaaagaggagaaagattactccgagcaagaaattcaggagagcattattaagactaatgtcctgtcaaaagactgtaaagacaccttcaacgactctctgcagaagcttctgtcggagacttccacgcccgcaattcagcccagcggcggtaaagtccacggcaagcaagttctggagccttccgtgagtgagaacagaacttggccccagaagacggacttcgcagacaccgaggaagaggttaaaggccccgaaaagatcatcaatgagcacgtggacaagacggtcgtgcatccaaaagtgaagcggaacagtctgactgccagcctggacaagctgctgaaggaggccacaggaacatccccttctccactgcaggccaagcttgctccggttatcaccgggactaatagcaagctcgaagagggcagattttttggcaaaggcatagaacaatcccacaatacgagcgcggataagcgggagatcctggccccattccctgttcgcgatgagacgtttggaaataccgccttactcaagaaagctgaatccggggagtgccaactgtctacacagaatctcatccagatggccgctgaagacagccatccccttgaccctacctcccagctcagtaggaagggctcgtttggagacgtggcgtcgcccccccaagatatgctcttcccccaggacgcgcacctcgtgccccaggcccgggtgcatcccagccagacggagatctccgaaaccgtcgaaaaagtgatcctgccccctcgtcctgtgctgaatgacgttagcgctgccctccagaaattatgtggagaagtctggctttcataccctgctggtagggaggttgggccaggggaagtgaacccggaatttcccgaggctgtgcaaccagtctgtagccccctgaatcccccaggggttatctctccctgggctactatggatacaatcgttcccgatcgaaaagatttctattcctctaatgtggtccctgataaaacgcatgaggtgggaagctacttggccgctcagatgtcgccaagcgaccaaaccctatcaagcttcgcatccatcgtagcacagtatgggaaggggttgcctcaagaggtggaggaaatcgtgagggagacaatcgtccagccaaaatcagaattcttggagttctcagcaggcctcgagaagctccttaaggaggagaccgagaccttcccatctaagtatgagagcgacactggaaacctgtcgccaagtaagctcattggatcaactgaggagcccagaagagcaacaagtgagtgccatcctgaagagcttaaggagactgtggaaaaagcggaggccccactgattacagagtcagcgttcgatgctggatttgagaagctgctgaaagagattacggaggcccctccctaccaacctcaggtgtctgtgcgcgaagagacccacgagaaagaaagctcccagtccgaacagacacgtttcctgggtactgtacctcatttttatagggccgcatcccaaacgtctgaaatgaaggataagtccaacgggctggagagccaggtgaaccagtgcgataaaatgctgggaggtgatgcattagtgactgacttgctggttgacttttgcggctcgcggtccggcgtggaaatccctcgcacacctcagctctacgtggcgcatgagatcggcaccatcaaaactgtaacgccgcctgaggatagagactccgagtctggcgtggccggcggccagggtactttgcaggagcccggcttcggggaggcaagcgaagcaatctccgtgagtcgaaatagacagcctatccccttgctgatgaataaagagaactctaccaagacctccaaagtcgaacttactctggcgtcgccatacatgaaacaggaaaaggaagaggaaaaagaagggttcagcgagtcagatttctcagatgggaatacatcttcaaatgccgaaagctggagaaacccatcttccagtgaggaggagccctcacctgttttgaaaactttggaacgatccgcagcccgcaaaatgccatccaagagcctggaagacatcagctctgactcaagtaaccaggcaaaagtcgataatcaacctgaagaattggtacggagcgccgaggacgtcagcacggtgcccactcagcccgacaacccgttcagtcatcctgataagttaaaacgcatgtcgaaatctgtgcctgcgtttttgcaggatgagtccgacgaccgcgaaacagacacggcaagcgagagtagttaccagttgtctcggcataagaagtcacctagttcactgacgaacctgtcctcatcatctggcatgacaagtttatcttcggtgtccggatctgtgatgagtgtctattccggtgattttggtaacctggaagtgaaaggaaacattcagttcgcaattgagtacgtggaatccctgaaagaattacacgtatttgtggcccagtgtaaggacctcgccgctgccgacgttaaaaaacagcggtccgatccgtacgtaaaggcttacctgctgcccgacaaaggaaagatgggcaagaaaaagactctcgtggttaagaaaacactcaatcccgtgtacaacgaaattcttcgttacaaaatagaaaagcaaatactgaagacccagaagctcaacctctctatctggcacagggatactttcaaacggaactccttcctgggcgaagtagaacttgatttagagacctgggactgggataacaagcagaacaagcagctccggtggtacccactcaagaggaagactgcaccagttgcactggaagccgagaatcgaggggaaatgaagttggcattacagtatgtccctgaaccggtccccggtaagaagctcccgacaactggggaggtacacatatgggtcaaggaatgtctggacctgcctttgctcaggggatcgcacctgaatagctttgttaaatgtaccatactgcctgacacctctaggaagtccaggcaaaaaacccgagcagtcggaaagacaacaaaccctatattcaatcatacgatggtttacgatgggtttagaccggaagacctgatggaggcctgcgttgagctgacagtgtgggatcactacaaattaacaaaccagtttctgggaggccttcggatagggtttggaactgggaaatcatatggtacagaagtggattggatggattccacctctgaagaggttgccctgtgggaaaaaatggttaatagcccaaatacttggattgaagctactctgcctctgagaatgctattgatcgctaagatctctaaatag

SEQ ID NO: 284957 - DNA, 3771 bp, Artificial Sequence
  derived and/or modified sequence
atggacgagcccaacgccgagcaggtgtacaaccccagccagttcgagaatttacggaagttctgggacctggaggcaaactctaactccaaagacaacgataagaacatcaccactacatcgcagaaaaattccgcaccattcaacagacagaaacacaaggagttctctgacataaagttgtctggtaaaaatactcatgaggccgaagttttgctgagtcctaaaaaggtcatggcccgcgaggagatggaaaagttgaatagtaaaggaatcctgcaggttctaccagatgagatcacgttcccattgagccctctgcggaagtacacctaccagctcccaggcaatgagagttctaaagagaatgtggagaagaataccgaaggtattgtgacccctgtgttcaaagaagaaaaggattactcagagcaagaaattcaggaaagtattatcaagacaaatgtcctgagtaaggactgcaaagacacattcaacgactccctgcagaagctgctgagcgaaacttccactcctgctatacagccatcaggaggaaaagttcacggaaagcaggttctggagccctccgtgtccgagaaccgtacttggcctcaaaaaacggattttgccgacaccgaggaagaagtgaaagggccggaaaaaattattaatgagcacgtggacaagacggtagttcatccaaaagtgaagaggaatagtctgaccgcttcgctggataaactacttaaggaagctaccggcactagcccttccccccttcaggccaagctggctccagtgattacagggaccaatagtaagcttgaagagggtcggttttttggcaaaggcatcgagcagtcacacaacactagcgctgataaaagggaaatactggcacctttccccgtgagggacgagaccttcggtaatacagcgctcctaaagaaggccgagtccggagagtgccagttaagcacccagaaccttatccagatggccgccgaagatagtcatccgctagatccgacctctcagttgtccagaaagggctcttttggcgacgtggcttcaccgcctcaggacatgctgtttccccaggacgcccacctcgttccacaggcaagagttcatccctcgcagactgaaatttccgaaacagttgagaaggtcatcctccctccgagacctgtgctgaatgacgtgtctgccgcacttcaaaagctgtgcggcgaggtgtggctgtcctatcccgctggccgagaggtggggccaggcgaggtgaaccccgaatttcctgaagctgtccagccagtatgttcaccgctcaatccacctggagtgatcagtccctgggctaccatggatacaatcgtgcctgacagaaaggatttctacagctcaaatgttgttccagacaagacacatgaggtcggctcatacctcgcggcccagatgagtccttccgatcagacacttagtagttttgcctcaatagtagctcaatacggcaaagggctgcctcaggaagttgaggagatcgtcagggagaccattgtccagcccaaatcagagttcctcgagttttcggccggcttggaaaagctgctgaaggaagaaaccgaaactttcccatcaaaatatgagtccgacaccggtaatctttctcccagcaagttaatcggaagcaccgaagaaccaagacgtgctacgtcagagtgccaccccgaggagcttaaggagaccgtggagaaggccgaagctcctctgatcaccgagtccgccttcgatgcagggtttgagaaactcttgaaagagataactgaggcccccccgtatcagccgcaggtgagcgttcgcgaagaaacacacgaaaaagaatcatctcagtccgaacagacccggttcctgggaaccgtccctcatttctatcgggcagccagccagacatccgagatgaaagataagtccaatggcctagaaagtcaggtgaaccagtgtgacaagatgttgggcggagatgccttggtgaccgatctcttggttgatttctgcggatctaggtccggggtggagatccctcgcactccacagctctacgtggcgcacgaaatcggcaccatcaagacagtaacccctcccgaagatagagactctgagagcggcgtggcaggggggcaaggtactttacaggagccgggttttggagaagcttcagaggctatttccgtgagtagaaatcgtcaacccattcctctgcttatgaacaaggagaactccaccaaaactagtaaggtggaattaacactggctagcccttatatgaaacaggaaaaggaggaggaaaaagagggcttttcagagtctgattttagcgatggcaatacctctagcaatgctgaatcctggcgcaatccatccagctccgaagaggagcccagccccgttcttaagactctggaacgctccgccgcccgaaaaatgccttctaaatctttggaggacatttcttctgacagttctaaccaggctaaggtggacaaccagcccgaggaactggtgcgaagcgcagaggatgtttcaacagtgcccacacaaccagataatcctttttctcacccagataagctaaagcgaatgagcaagagcgtccccgcgtttctgcaggacgagtctgatgatagggaaaccgatactgcttcagaatcatcttaccaattgtcccgccataaaaagtccccctcatcgctgacaaatctttcatcaagctctgggatgacatctctgagctcagtgagcgggtctgtgatgagcgtttattccggagacttcggcaatctcgaggttaaggggaatatccaatttgccatcgagtatgtggaatcactgaaggagcttcacgtctttgtcgcgcagtgcaaagacctggctgcagctgatgtgaagaagcagcgatccgacccttatgtgaaggcgtatttgctcccagacaaggggaagatgggaaagaaaaagacgcttgtggtgaaaaaaactctgaatcccgtgtataacgaaatcttgaggtataaaatcgagaagcagattcttaagacgcagaagttaaatctctcgatttggcacagagacacattcaagcgcaattctttcctcggggaggtggagttagacctcgaaacgtgggactgggacaataagcagaataaacaattgaggtggtatcctctcaagcgcaaaacggctcctgtcgcgcttgaagctgaaaatcggggggaaatgaaactggccctgcagtatgtcccagagcccgtgcccggcaagaaacttccaaccactggagaggtgcatatttgggtgaaagagtgcttagacttacccttgctgcggggtagccatctcaatagctttgtcaaatgcacaatcttgccggacacatctcgaaaaagtcgccaaaaaacacgagctgtggggaagaccacaaaccctatcttcaatcataccatggtttacgacggattccgacccgaagatctgatggaagcttgtgttgagctcacagtttgggatcattataaactgaccaaccagtttctgggagggcttcgcatcggcttcggcaccggcaagtcttacggaactgaagtggattggatggatagtacatcagaagaagtggccctgtgggaaaaaatggttaacagccctaatacatggatagaagccacacttccactgcgtatgcttctgattgcaaaaatctctaagtag

SEQ ID NO: 284958 - DNA, 5342 bp, Artificial Sequence
  derived and/or modified sequence
atgatcaactcgagtctgtcaatgctcttttcatacttggagaagtacttttatgtcgctgacgagttgtcccattgcgtcgaaccagagccctcacaggtccccggaggttcctctcgggaccgacaacagggaaagccgcctccactgcctgccttgaaagccaaaacttcctcaaggtctgggccttatgcaactgagattaagaagagcacagacgatagcatttttaaagtccttgactggttcaataggtctagctactcagatgacaacaagtcgtttctccagcacccgagagggatcgagagcaaagagaaaaccgattcaaaaagtcaggtggccgtggatctcgttaccgacgataccacgctccgagaaaacgggtctaagactttgtcccctagtaaaattgaactcaagcccgtacgttccgatagccctttccaggccgaaggggatatgcttgtgtccgagtcctgtcaggacaacaacgtcaacatcaaatccaagtttatgaacctgagtcaaaaaggaactcccaaggaggggcctgggatcctccagccctttgaaagttacggtactcccagccaaggatccaagaacatggactacagccaagatagtaaaagccctggaaaagggaacggtgcctctccttcaaactctaactatagctactcggtcctgaaagagtctgatgccgagaatcaggtgccatgtaatactaataatattggcaatctcggcgaggaggagccaaagttccacgctcacgaggaaaataggggacattcggaggtcaattttgactctagcactgtagtgaaggaaccaggtttaaaggacaacatgaatgccgaacgtaagtctaaggtagggaatacatatatccttaaggcctccttggaaccagaaaatataaagtccacacctggcgtggcaaataacggcagcccctggaagaagcccgaggtgcagttccagcaagaagcaggagaggtgcctaaaaaccaggtccagcgggagaagtacaaacgggtgagcgaccgcatctccttctgggaaggcgaaaaagcaggtgcaaaaatcacccatgagaaacctacctcctcatgctcccaggagcagcctagtgccaaggcttatcagcctgtaaagaagtcccaaggcgtctcgagcatggattctctctccaccgaccaaagtgagtacaaccaggctatccctaagcgggtcgtactggacgaagatgatcaggcctcccaactgtccaattcctacagctccaacaaatctaaggaaacgaaaccgcagatcgccggtccatcacgttactacctatccgcagaacagtcagacaaggtctcgttgtttcaaaacaagaagaacgaaccgattaagaggagtcaggtggctgacagccttcccagcaggcgcaacattacccttccagctctgcaaccgcctagtaacgtaggtagtgaacggcacgcgccactcgaaaaggaccgcccactggtcagagagtctaatgccaatttcaaagttatgagcctgaaagaaagaatggatgaacctaatgccgagcaggtgtacaacccaagtcaatttgaaaaccttcgcaagttctgggatctggaagccaatagcaatagcaaggacaacgacaagaatataacgaccacgtcccagaagaactctgcccctttcaacaggcagaagcacaaggaattttccgatataaaactatccggtaagaacactcacgaagcagaggtgctgctgtcacctaaaaaagtcatggcaagagaagaaatggaaaaactgaacagtaaaggaatactgcaggtgttaccagacgagatcacctttcctctgagtcccctgagaaagtatacctatcaactgccagggaacgagagcagcaaagaaaacgttgaaaaaaacactgaggggatcgtgacgccagtgtttaaagaagagaaagactattcagagcaagagatccaggagtctattatcaaaacgaatgtgttgtcgaaggactgtaaggacacctttaacgattctctgcagaaactcttatctgaaacctctactcctgccattcagcccagcggtggaaaggtgcatgggaaacaggtgctggaaccctcagtgtccgagaataggacgtggccccagaagaccgacttcgcggacaccgaagaggaggtgaagggacccgaaaaaataatcaacgaacatgttgacaaaaccgtggtgcatcccaaagtcaagaggaattctctgaccgcttccctggataaattgcttaaggaagcgacgggaacttccccctccccactacaggctaaactcgctcccgtcatcaccggcaccaatagcaagcttgaagaaggaagattctttggcaaaggcattgagcagagtcataacacctcagcagacaagagggagatcttagcaccattccctgtaagagacgagacctttggaaacacagccctacttaagaaggcggaatctggcgagtgtcagctgtcgactcaaaacttgattcaaatggcagcggaagacagtcatcctttagatcccaccagccagttatcccggaaaggaagcttcggagacgtggcatctccgccacaagacatgctcttcccccaggatgctcacttggtccctcaagcgagagttcatccctctcaaactgaaatatctgagacagttgaaaaagtcattttgccccctcgacccgttctaaacgacgtgtcagcagccctgcagaagctctgcggagaggtttggcttagctatcctgcgggaagggaagtcgggcctggcgaggtcaatccagagtttcccgaggctgtccagcccgtgtgcagtccactcaatccacccggagtgatttccccatgggcaacgatggataccattgtgcccgatcggaaagacttctactcttctaacgttgtcccagataaaacgcacgaggttgggtcctatctcgccgcacagatgagccccagcgaccagacactgtcttccttcgcttcaatcgttgcacaatatggcaaaggactgcctcaagaagtggaagagatcgtccgtgaaactatcgtccagcctaaaagcgagttcctggaattctctgctggattggaaaaactgctgaaagaggagacagagacattcccttcaaaatacgaaagtgataccgggaatctgtctccctccaaattgattggcagcaccgaagagcccagacgagctacgagcgaatgccatccagaagagcttaaagagaccgtagaaaaagctgaggcgcctctgatcaccgaatcagcgtttgatgctgggtttgagaagctgctgaaagagattacagaagcacccccttaccagccccaggtaagtgtgcgtgaggaaactcatgaaaaggagagttcccagtccgagcaaacccggttcttgggaaccgtgccacacttctaccgggcagccagccagacctctgaaatgaaagataagtcgaatgggcttgagagtcaagtcaatcagtgcgataaaatgctcgggggtgatgcattggttacagaccttctagtcgatttctgtggtagtcgcagcggtgtggagatcccccgtactccgcaactgtatgtcgcacacgaaatcggcacaatcaagacggtcacaccccctgaagaccgcgactcagagagcggggttgccggtggacagggaactttacaggaacccggtttcggagaagcatctgaagccatctccgtgtctaggaaccgccagccgatacctttgctgatgaataaggaaaactcaacaaaaacgagcaaagtggaactgaccctcgcatcgccatatatgaagcaagagaaggaggaagagaaggaggggttcagtgagtccgatttcagtgacgggaacacatcttctaacgcagagtcctggcgtaatccatcctcatccgaagaggagccatcccctgtgctgaagacactggagagaagcgcagcccgaaaaatgccatcaaagtcactggaagacattagctccgactccagcaaccaggccaaagtggacaaccagcctgaggagctcgtgcgatcagctgaagatgtctccactgtgcccactcagcctgataatcctttttcgcatcccgacaagctcaagaggatgagcaagagtgtacccgcttttctacaagacgaatctgacgaccgggaaacagacacagcttcggaaagtagctatcagcttagtcgccataaaaagtctccctctagtcttaccaatctgtcaagctcctcgggaatgaccagcctgtcctcagtctctgggagcgtgatgagtgtgtactctggggattttggcaaccttgaggtcaagggaaacatccagttcgcgatcgagtatgtcgagagtttaaaggagctccacgttttcgtggcccagtgtaaagacctggcggcagccgacgtgaagaagcaacgaagcgatccatatgtgaaagcctaccttttgcctgacaaagggaagatgggaaagaaaaagaccctcgtggtgaagaagacactcaatccagtctacaacgagattctacggtacaagattgaaaaacagattttgaaaacccagaaactgaacctcagcatctggcatagagatacctttaagcggaatagctttctgggcgaggttgaactcgatctggagacatgggattgggacaataaacagaataagcagcttaggtggtacccactgaagcggaagactgccccagtcgccctggaagctgaaaatagaggggagatgaagcttgccctgcagtacgtgccagagccagtacctggaaaaaagctacctacaacgggcgaggtccacatctgggtgaaggagtgtctggatttgccgctgctgcgagggagtcacctgaactctttcgtcaagtgtaccattctgccagacacaagcaggaaatctaggcagaagactcgcgcagtagggaagaccaccaaccccatatttaatcataccatggtgtacgacggctttaggccggaagacctaatggaggcttgtgtggagctcaccgtttgggaccactataaactcactaaccagttcctgggcggactacgtatcggcttcggaactgggaagagttacgggactgaagtggactggatggactccacttctgaggaggtggccttatgggagaaaatggttaattctccgaatacctggatagaggcgactctcccactgcggatgcttttgatcgctaagataagtaagta

SEQ ID NO: 284959 - DNA, 3771 bp, Artificial Sequence
  derived and/or modified sequence
atggatgaacccaatgccgagcaggtttacaacccctctcagttcgagaatctacgtaagttttgggatctagaggccaactctaactcaaaggacaatgacaagaatataaccaccacgagccagaagaattctgctccatttaatagacaaaagcataaggaattctcagatatcaaactgagcgggaaaaacacacacgaggcagaggtgcttttgtctcccaagaaggtgatggccagagaggagatggagaaactgaactctaagggaatccttcaggtgctcccagatgagattacctttcccctcagccccttacgcaagtacacctaccagctgcctgggaatgaatctagcaaggaaaatgtggagaaaaatacggagggaatagtcacacccgtgtttaaagaagaaaaggattacagtgaacaggaaatccaggagtctattattaaaactaatgttctctcgaaagattgcaaggatactttcaacgacagcttacagaagctgctgtcagagactagcacacctgccatacagccttcaggaggcaaagtccatgggaagcaggtgctcgaaccctccgtgagcgagaatagaacctggccccagaagacagacttcgctgataccgaggaagaggtaaaaggcccagagaaaatcatcaatgaacacgtggacaaaacagtagtacacccgaaggtgaaacgcaacagccttaccgcctcgctagacaagctgcttaaggaggccaccggaacttctccgtccccactccaggctaaactagcaccagttataaccgggaccaactccaagctggaagagggtagattttttggaaagggtatcgagcagtcccacaatacgagtgccgataagagagaaattctagcccctttccccgtcagggacgagacatttggaaataccgccctacttaaaaaggctgaatcgggtgaatgtcagctctctacccagaatttgatacagatggccgctgaagactcccaccccctggaccccactagccagttaagcaggaagggatcttttggggatgtggctagccccccacaggacatgctcttccctcaggacgcccatctggttcctcaagccagagttcacccttcccagactgagatctctgaaacagtggaaaaagttattcttccaccaagacccgtgctgaatgacgtttctgcagctcttcagaaactatgtggtgaagtgtggctgagctaccctgcagggcgtgaagtcggaccaggagaagttaacccagaatttccagaagccgtccagccagtgtgttccccacttaatccacccggtgtaataagcccttgggccaccatggacacaattgtccctgaccgtaaggacttttattcaagtaatgtcgtgcccgacaaaacccacgaggtgggaagctatttagctgctcagatgtccccctccgatcagacacttagttcattcgctagcattgttgcccagtacggtaaggggctgcctcaagaggttgaagaaatcgtccgagagacaattgttcagccaaagtccgaattcttagaattttctgcaggactggaaaaactgttaaaagaggaaacagagacatttccaagcaaatacgaaagtgataccggcaatttgagcccctctaagctgataggcagtacagaggaacccaggcgtgctacttctgagtgtcatccggaagagttgaaagaaacagtggagaaggctgaagccccactcatcacagagtcagcgtttgatgccggtttcgaaaaattacttaaggaaatcaccgaggctccaccttatcagccacaggtgtcagttcgtgaagagacacatgagaaggagagcagtcaatctgagcagaccagatttctagggaccgtcccacacttttaccgcgcagcctcccagacatcggaaatgaaagataagagcaatgggttggagtcccaggtgaaccagtgtgataaaatgcttggcggagatgcattggttactgatctgctggtggacttctgtggatcccggtctggggtggagattcctcggacccctcagctgtatgtggctcacgagataggcaccataaaaaccgtgacaccgcctgaggaccgagattcggaaagcggtgtggccggaggtcaaggaaccctgcaggagccgggatttggtgaagcctcagaagctatttctgtgagccgtaatcgccagccgattcccctacttatgaataaggagaatagtaccaaaacatccaaggtggagctgaccctggccagcccgtacatgaaacaagagaaagaggaggagaaagagggattttcagagtctgatttctccgacggaaatacctcctccaatgcggaatcctggcgtaacccatcttcttccgaagaagaaccctcgccagtcctgaaaacactggaaagatctgccgcacgtaagatgcccagcaaatcccttgaagacatcagcagcgatagttctaaccaggccaaagtcgacaatcagccggaggaacttgttagatccgctgaggatgtctccacagttcctactcaacctgataacccttttagccatcccgataaattgaaacggatgagcaagtcagtcccggcatttctgcaggacgaatccgacgaccgcgagactgacacagccagtgaaagtagctaccagctgtctcggcacaagaagagcccttcatcgctgacaaatttaagttcatcatccggcatgaccagcctgagctcagtgtcaggctcggtcatgtctgtgtacagcggcgattttggaaatctggaggttaagggcaatatacagtttgccatcgaatatgtggaaagcctgaaggagttacacgtctttgttgcccaatgcaaagacttggccgcagccgacgttaaaaaacagagaagtgatccctacgtgaaggcctacttgctccctgataaaggtaagatggggaagaagaaaacactcgtcgtgaagaaaacactgaacccagtgtataatgaaatattaagatataagatcgaaaaacagatattgaaaactcagaaactgaacctctctatctggcacagagatacgtttaaaaggaatagcttcctcggtgaggtggaattagatctggagacctgggattgggacaataaacagaacaaacagctgcgttggtaccccctgaaaaggaaaaccgctcccgtcgctctggaggccgagaatcgaggcgagatgaaactggctctacaatacgtccccgaacccgtccccggtaaaaaactccccaccaccggggaggtacacatctgggtcaaagaatgtcttgaccttcctttgttgcgagggagccacctcaacagttttgttaagtgtaccatcttacccgacactagccgaaagagtcgacagaagactagagcagtcggcaagacaactaatcctatcttcaatcacactatggtatatgatgggtttcggccagaggacttgatggaggcatgtgtcgaacttacagtctgggatcactacaagctcaccaaccagttcctcggaggactacggatcgggttcggcacggggaaatcttatggtaccgaagtcgactggatggactcaacaagcgaggaggtggccctgtgggaaaaaatggttaattcgccaaatacatggatcgaggctaccctccccctgcgtatgttgcttatagcgaaaataagcaaatag

SEQ ID NO: 284960 - DNA, 6314 bp, Artificial Sequence
  derived and/or modified sequence
atgattaacagttctttaagcatgctcttttcttatttagaaaagtatttctatgttgcagatgaactgtctcattgtgttgagcctgagccatctcaggtgccaggtggcagttctagagaccgtcagcaaggtaagccccctcctctcccggctctaaaagctaagacatcttcacgttctggtccatatgccactgagataaagaagtcaactgatgattccatatttaaagttctagactggtttaaccgaagttcttattcagatgacaataagtcattcctccaacatccccgaggaatagagtccaaagaaaaaacagactcaaaatcacaggttgctgttgacttggtgacagatgacactactttaagagaaaatggctcaaagaccctatcacccagcaaaattgaattgaagcctgtgagatctgactcaccattccaagcagagggagatatgctggtttctgaaagttgccaagataataatgtgaatatcaaatccaaattcatgaatttgtcccaaaaaggcaccccaaaggaaggcccaggtatattgcaaccatttgaaagctatggcaccccaagtcaagggagtaaaaatatggactatagccaagattcaaaaagcccaggaaaagggaatggggcatctccttcaaatagtaactattcctacagtgttctcaaggaatctgatgcagaaaaccaagttccatgcaacactaataatattggcaacttgggtgaagaagaacccaagtttcatgctcatgaagaaaatagaggacactcagaagtgaattttgactcttcaacagttgtcaaagaaccaggtttgaaagataacatgaatgcagagagaaagagcaaagtaggaaatacctatatcctgaaagcctccttagagccagagaatattaagtcaacacctggggttgccaacaatggctctccttggaagaagcctgaggtccaattccagcaagaagctggtgaggttcccaagaaccaagtgcagagagagaaatacaaaagagtgagtgacagaatatccttttgggaaggagagaaagctggtgctaagataactcatgaaaaacccacatcttcatgtagccaggaacaaccttctgctaaagcatatcagcctgtgaagaagtcacagggtgtatcatccatggacagtttatctacagaccagagtgaatataatcaggccattcccaaacgagtggtcttagatgaggatgatcaagcatcccagctctccaattcttattcctcaaataaatctaaagagaccaagccacaaatagcaggtccatccagatactatctttcagctgagcaatcagataaagtgtctctgtttcagaataagaaaaatgagcctataaaaagatcacaagtggcagacagtttgccttctagaagaaacattactttaccagcactgcaacctccctcaaatgtcgggagtgaacgacatgctccattggagaaagacagacctctagttcgtgaatcaaatgccaactttaaagttatgtccctaaaagaaagaatggatgaacccaatgcagaacaggtctataatccctctcagtttgagaatttgagaaagttttgggacttagaagctaattcaaacagtaaggataatgacaagaatattaccaccacaagccaaaaaaattctgcaccttttaataggcagaaacacaaggaattcagcgacattaaattatcaggtaaaaatacccatgaagcagaggtgcttctaagcccaaaaaaagttatggcaagagaggaaatggagaaattaaattcaaagggcatactccaggtgctaccagatgaaatcacatttcctttgagtccacttagaaagtatacttatcagttgccaggaaatgagtcatcaaaggaaaatgtggaaaagaatacggaagggattgttactccagtgtttaaggaagaaaaggattactcagaacaagagattcaagaatccataataaaaaccaatgttttgtctaaagactgcaaagacacttttaatgacagcttgcagaaactgctttcagaaacctcaacaccagcaattcaaccctctggtggaaaagttcatggaaaacaagtgcttgaaccaagtgtttctgaaaataggacatggcctcaaaaaacagattttgctgatactgaggaagaagtcaaaggacctgagaagatcattaatgagcatgttgacaaaacagtagttcatccaaaggttaaacggaactctttgactgctagtctagacaaactcctgaaggaagcaactggaacttcaccctctcccttgcaagccaagttggcgcctgttatcactggaaccaactctaagctggaagaggggagattttttggaaaagggatagaacagagtcacaatacttcagctgataagagagaaatactagctccttttccagtgagagatgaaacttttggaaatacagctctcctcaagaaagctgaaagtggtgagtgccagctaagcacacagaatttgattcagatggctgcagaagattctcatccattggatccaacttcccagctttccagaaagggttcttttggggatgtggccagccctccccaagatatgctttttccccaggatgctcatcttgttccccaggctagggtacacccttctcaaacggaaatttcggagactgtagagaaagtcattcttccacccagacctgtattgaatgatgtaagtgctgcattacagaagctgtgtggagaagtatggttaagttatccagctggaagggaagtaggtcctggagaagtgaacccagaatttcctgaagcagtacagccagtatgtagccccctaaatcctccaggagtgatatcaccatgggctacgatggacaccatagttccagacaggaaggatttttattcctccaatgtagttcctgataaaactcatgaagttggatcttatttagctgcccaaatgtctccatcagaccagacgcttagctcatttgcttccattgttgctcaatatggcaaaggcctccctcaggaagtggaagaaattgtgagggaaacaattgttcaacccaaatcagagttcctcgaattcagtgctggcttagaaaaactactgaaggaagaaactgaaaccttcccctcaaaatatgaaagtgatacagggaatctttctccatcaaagttaataggtagtacagaggagcccaggcgagccacttctgaatgccatcctgaggaattaaaagaaacagtagaaaaggccgaggctccgttaataactgagagtgcttttgatgctggttttgagaaacttcttaaagaaataactgaagctcctccttatcagccccaggtgtcagtgagagaagaaactcacgagaaggagtcctcacagtcagagcagaccaggttcttggggacagtgccccatttttacagggcagcctcacagacctctgaaatgaaggataaaagtaatggtttggaatctcaagtcaaccaatgtgataaaatgttgggaggagacgcacttgtgactgatttattggtagatttttgtggttccagaagtggagttgagatccctagaaccccacaactttatgtggctcatgaaatagggaccattaaaactgtaacccccccagaggacagggacagtgaaagtggggttgcagggggacaagggactcttcaggaacctggctttggagaggcttctgaagcaattagtgtgtccagaaataggcaacccattcctctcctgatgaacaaagaaaactctacaaaaacaagtaaagttgaattgactctagcatcgccatatatgaaacaagagaaagaggaagaaaaagaaggtttctctgagtctgatttttcagatggaaacaccagttctaatgcagagagctggagaaatccttccagttcagaagaagaacccagtcctgttttgaaaactttggaaaggagtgccgctaggaaaatgccttccaaaagtctagaagacatttcatcagattcatcaaatcaagcaaaagtagataatcagccagaagaattagtgcgtagtgctgaagatgtttccacagtgcctacacaacctgataatccattttctcaccctgacaaactcaaaaggatgagcaagtctgttccagcatttctccaagatgagagtgatgacagagaaacagatacagcatcagaaagcagttaccagctcagcagacacaagaagagcccgagctctttaaccaatcttagcagctcctctggcatgacgtccttgtcttctgtgagtggcagtgtgatgagtgtttatagtggagactttggcaatctggaagttaaaggaaatattcagtttgcaattgaatatgtggagtcactgaaggagttgcatgtttttgtggcccagtgtaaggacttagcagcagcggatgtaaaaaaacagcgttcagacccatatgtaaaggcctatttgctaccagacaaaggcaaaatgggcaagaagaaaacactcgtagtgaagaaaaccttgaatcctgtgtataacgaaatactgcggtataaaattgaaaaacaaatcttaaagacacagaaattgaacctgtccatttggcatcgggatacatttaagcgcaatagtttcctaggggaggtggaacttgatttggaaacatgggactgggataacaaacagaataaacaattgagatggtaccctctgaagcggaagacagcaccagttgcccttgaagcagaaaacagaggtgaaatgaaactagctctccagtatgtcccagagccagtccctggtaaaaagcttcctacaactggagaagtgcacatctgggtgaaggaatgccttgatctaccactgctaaggggaagtcatctaaattcttttgttaaatgtaccatccttccagatacaagtaggaaaagtcgccagaagacaagagctgtagggaaaaccaccaaccctatcttcaaccacactatggtgtatgatgggttcaggcctgaagatctgatggaagcctgtgtagagcttactgtctgggaccattacaaattaaccaaccaatttttgggaggtcttcgtattggctttggaacaggtaaaagttatgggactgaagtggactggatggactctacttcagaggaagttgctctctgggagaagatggtaaactcccccaatacttggattgaagcaacactgcctctcagaatgcttttgattgccaagatttccaaatgagcccaaattccactggctcctccactgaaaactactaaaccggtggaatctgatcttgaaaatctgagtaggtggacaaatatcctcactttctatctattgcacctaaggaatactacacagcatgtaaaagtcaatctgcatgtgcttctttgattacaaggcccaagggatttaaatataacaaaatgtgtaatttgtgactctaatattaaataagatatttgaacaagctaggaaaattgaatttctgctgctgcttcaaagaaaaagctgccccagagcattaaacatggggtattgttaagaagcaaaatgttcttgtttgccatcatgtgtttcacaccacaattctgtgccacagttaagagggtctggtacccttgcaggacctttgtaggttgtgggaaaaagtcgcagaaagatactcaaagtggagcagggaatggagacagacatcagtgatgataaaaaaaaaaatggaccttaagaaactatttactctgtaatctctaataaaatatggaattccatattagggcaatgagactgaaactactggtgtttttctgccttgagaaaacaaacagttaaaacaagcctcaaatgtattttagtgccacccactggccataggtacaattcagttgttggcttgttttgacttaattctaaaataggtctcaagcctgtatttttatgagtttatttttttaaaaccctgcatatatatgattgtttttcttataactttactatatgaaagcagcataagagtagtcacaaacatgttttgcaacaaagttttaattagaatgtaagttgctcagttatactgttcttcttatgtatgtaaaattttcgtattttgtaaaaacccttagaataaattatcatttgatttaaattgtattagaaaattagcgtgacttctcattttaaataaaatattttaggaattctaaacatct

SEQ ID NO: 284961 - DNA, 6250 bp, Artificial Sequence
  derived and/or modified sequence
atgattaacagttctttaagcatgctcttttcttatttagaaaagtatttctatgttgcagatgaactgtctcattgtgttgagcctgagccatctcaggtgccaggtggcagttctagagaccgtcagcaaggtaagccccctcctctcccggctctaaaagctaagacatcttcacgttctggtccatatgccactgagataaagaagtcaactgatgattccatatttaaagttctagactggtttaaccgaagttcttattcagatgacaataagtcattcctccaacatccccgaggaatagagtccaaagaaaaaacagactcaaaatcacaggttgctgttgacttggtgacagatgacactactttaagagaaaatggctcaaagaccctatcacccagcaaaattgaattgaagcctgtgagatctgactcaccattccaagcagagggagatatgctggtttctgaaagttgccaagataataatgtgaatatcaaatccaaattcatgaatttgtcccaaaaaggcaccccaaaggaaggcccaggtatattgcaaccatttgaaagctatggcaccccaagtcaagggagtaaaaatatggactatagccaagattcaaaaagcccaggaaaagggaatggggcatctccttcaaatagtaactattcctacagtgttctcaaggaatctgatgcagaaaaccaagttccatgcaacactaataatattggcaacttgggtgaagaagaacccaagtttcatgctcatgaagaaaatagaggacactcagaagtgaattttgactcttcaacagttgtcaaagaaccaggtttgaaagataacatgaatgcagagagaaagagcaaagtaggaaatacctatatcctgaaagcctccttagagccagagaatattaagtcaacacctggggttgccaacaatggctctccttggaagaagcctgaggtccaattccagcaagaagctggtgaggttcccaagaaccaagtgcagagagagaaatacaaaagagtgagtgacagaatatccttttgggaaggagagaaagctggtgctaagataactcatgaaaaacccacatcttcatgtagccaggaacaaccttctgctaaagcatatcagcctgtgaagaagtcacagggtgtatcatccatggacagtttatctacagaccagagtgaatataatcaggccattcccaaacgagtggtcttagatgaggatgatcaagcatcccagctctccaattcttattcctcaaataaatctaaagagaccaagccacaaatagcaggtccatccagatactatctttcagctgagcaatcagataaagtgtctctgtttcagaataagaaaaatgagcctataaaaagatcacaagtggcagacagtttgccttctagaagaaacattactttaccagcactgcaacctccctcaaatgtcgggagtgaacgacatgctccattggagaaagacagacctctagttcgtgaatcaaatgccaactttaaagttatgtccctaaaagaaagaatggatgaacccaatgcagaacaggtctataatccctctcagtttgagaatttgagaaagttttgggacttagaagctaattcaaacagtaaggataatgacaagaatattaccaccacaagccaaaaaaattctgcaccttttaataggcagaaacacaaggaattcagcgacattaaattatcaggtaaaaatacccatgaagcagaggtgcttctaagcccaaaaaaagttatggcaagagaggaaatggagaaattaaattcaaagggcatactccaggtgctaccagatgaaatcacatttcctttgagtccacttagaaagtatacttatcagttgccaggaaatgagtcatcaaaggaaaatgtggaaaagaatacggaagggattgttactccagtgtttaaggaagaaaaggattactcagaacaagagattcaagaatccataataaaaaccaatgttttgtctaaagactgcaaagacacttttaatgacagcttgcagaaactgctttcagaaacctcaacaccagcaattcaaccctctggtggaaaagttcatggaaaacaagtgcttgaaccaagtgtttctgaaaataggacatggcctcaaaaaacagattttgctgatactgaggaagaagtcaaaggacctgagaagatcattaatgagcatgttgacaaaacagtagttcatccaaaggttaaacggaactctttgactgctagtctagacaaactcctgaaggaagcaactggaacttcaccctctcccttgcaagccaagttggcgcctgttatcactggaaccaactctaagctggaagaggggagattttttggaaaagggatagaacagagtcacaatacttcagctgataagagagaaatactagctccttttccagtgagagatgaaacttttggaaatacagctctcctcaagaaagctgaaagtggtgagtgccagctaagcacacagaatttgattcagatggctgcagaagattctcatccattggatccaacttcccagctttccagaaagggttcttttggggatgtggccagccctccccaagatatgctttttccccaggatgctcatcttgttccccaggctagggtacacccttctcaaacggaaatttcggagactgtagagaaagtcattcttccacccagacctgtattgaatgatgtaagtgctgcattacagaagctgtgtggagaagtatggttaagttatccagctggaagggaagtaggtcctggagaagtgaacccagaatttcctgaagcagtacagccagtatgtagccccctaaatcctccaggagtgatatcaccatgggctacgatggacaccatagttccagacaggaaggatttttattcctccaatgtagttcctgataaaactcatgaagttggatcttatttagctgcccaaatgtctccatcagaccagacgcttagctcatttgcttccattgttgctcaatatggcaaaggcctccctcaggaagtggaagaaattgtgagggaaacaattgttcaacccaaatcagagttcctcgaattcagtgctggcttagaaaaactactgaaggaagaaactgaaaccttcccctcaaaatatgaaagtgatacagggaatctttctccatcaaagttaataggtagtacagaggagcccaggcgagccacttctgaatgccatcctgaggaattaaaagaaacagtagaaaaggccgaggctccgttaataactgagagtgcttttgatgctggttttgagaaacttcttaaagaaataactgaagctcctccttatcagccccaggtgtcagtgagagaagaaactcacgagaaggagtcctcacagtcagagcagaccaggttcttggggacagtgccccatttttacagggcagcctcacagacctctgaaatgaaggataaaagtaatggtttggaatctcaagtcaaccaatgtgataaaatgttgggaggagacgcacttgtgactgatttattggtagatttttgtggttccagaagtggagttgagatccctagaaccccacaactttatgtggctcatgaaatagggaccattaaaactgtaacccccccagaggacagggacagtgaaagtggggttgcagggggacaagggactcttcaggaacctggctttggagaggcttctgaagcaattagtgtgtccagaaataggcaacccattcctctcctgatgaacaaagaaaactctacaaaaacaagtaaagttgaattgactctagcatcgccatatatgaaacaagagaaagaggaagaaaaagaaggtttctctgagtctgatttttcagatggaaacaccagttctaatgcagagagctggagaaatccttccagttcagaagaagaacccagtcctgttttgaaaactttggaaaggagtgccgctaggaaaatgccttccaaaagtctagaagacatttcatcagattcatcaaatcaagcaaaagtagataatcagccagaagaattagtgcgtagtgctgaagatgtttccacagtgcctacacaacctgataatccattttctcaccctgacaaactcaaaaggatgagcaagtctgttccagcatttctccaagatgagagtgatgacagagaaacagatacagcatcagaaagcagttaccagctcagcagacacaagaagagcccgagctctttaaccaatcttagcagctcctctggcatgacgtccttgtcttctgtgagtggcagtgtgatgagtgtttatagtggagactttggcaatctggaagttaaaggaaatattcagtttgcaattgaatatgtggagtcactgaaggagttgcatgtttttgtggcccagtgtaaggacttagcagcagcggatgtaaaaaaacagcgttcagacccatatgtaaaggcctatttgctaccagacaaaggcaaaatgggcaagaagaaaacactcgtagtgaagaaaaccttgaatcctgtgtataacgaaatactgcggtataaaattgaaaaacaaatcttaaagacacagaaattgaacctgtccatttggcatcgggatacatttaagcgcaatagtttcctaggggaggtggaacttgatttggaaacatgggactgggataacaaacagaataaacaattgagatggtaccctctgaagcggaagacagcaccagttgcccttgaagcagaaaacagaggtgaaatgaaactagctctccagtatgtcccagagccagtccctggtaaaaagcttcctacaactggagaagtgcacatctgggtgaaggaatgccttgatctaccactgctaaggggaagtcatctaaattcttttgttaaatgtaccatccttccagatacaagtaggaaaagtcgccagaagacaagagctgtagggaaaaccaccaaccctatcttcaaccacactatggtgtatgatgggttcaggcctgaagatctgatggaagcctgtgtagagcttactgtctgggaccattacaaattaaccaaccaatttttgggaggtcttcgtattggctttggaacaggtaaaagttatgggactgaagtggactggatggactctacttcagaggaagttgctctctgggagaagatggtaaactcccccaatacttggattgaagcaacactgcctctcagaatgcttttgattgccaagatttccaaatgagcccaaattccactggctcctccactgaaaactactaaaccggtggaatctgatcttgaaaatctgagtaggtggacaaatatcctcactttctatctattgcacctaaggaatactacacagcatgtaaaagtcaatctgcatgtgcttctttgattacaaggcccaagggatttaaatataacaaaatgtgtaatttgtgactctaatattaaataagatatttgaacaagctaggaaaattgaatttctgctgctgcttcaaagaaaaagctgccccagagcattaaacatggggtattgttaagaagcaaaatgttcttgtttgccatcatgtgtttcacaccacaattctgtgccacagttaagagggtctggtacccttgcaggacctttgtaggttgtgggaaaaagtcgcagaaagatactcaaagtggagcagggaatggagacagacatcagtgatgataaaaaaaaaaatggaccttaagaaactatttactctgtaatctctaataaaatatggaattccatattagggcaatgagactgaaactactggtgtttttctgccttgagaaaacaaacagttaaaacaagcctcaaatgtattttagtgccacccactggccataggtacaattcagttgttggcttgttttgacttaattctaaaataggtctcaagcctgtatttttatgagtttatttttttaaaaccctgcatatatatgattgtttttcttataactttactatatgaaagcagcataagagtagtcacaaacatgttttgcaacaaagttttaattagaatgtaagttgctcagttatactgttcttcttatgtatgtaaaattttcgtattttgtaaaaacccttagaataaattatcatttgatttaaa

SEQ ID NO: 284962 - protein, 902 aa, Artificial Sequence
  derived and/or modified sequence
MSGQWFYEAKAKRHRDKIHGADIIRASMRKKRPQIAAEQSKDRENGAKESWVNNVNKDAFLPPELAGVVEEPEEDAAPASPSSSVVNPASSVIDMSQENTRKPNVSPEKRKNPFNSSKLPEGHSSQQTKNEQSKNGRTGLFQTSKEDELSESKEKSTVADTSIQKLEKSKQTLPGLSNGSQIKAPIPKARKMIYKSTDLNKDDNQSFPRQRTDSLKARGAPRGILKRNSSSSSTDSETLRYNHNFEPKSKIVSPGLTIHERISEKEHSLEDNSSPNSLEPLKHVRFSAVKDELPQSPGLIHGREVGEFSVLESDRLKNGMEDAGDTEEFQSDPKPSQYRKPSLFHQSTSSPYVSKSETHQPMTSGSFPINGLHSHSEVLTARPQSMENSPTINEPKDKSSELTRLESVLPRSPADELSHCVEPEPSQVPGGSSRDRQQGSEEEPSPVLKTLERSAARKMPSKSLEDISSDSSNQAKVDNQPEELVRSAEDDEKPDQKPVTNECVPRISTVPTQPDNPFSHPDKLKRMSKSVPAFLQDESDDRETDTASESSYQLSRHKKSPSSLTNLSSSSGMTSLSSVSGSVMSVYSGDFGNLEVKGNIQFAIEYVESLKELHVFVAQCKDLAAADVKKQRSDPYVKAYLLPDKGKMGKKKTLVVKKTLNPVYNEILRYKIEKQILKTQKLNLSIWHRDTFKRNSFLGEVELDLETWDWDNKQNKQLRWYPLKRKTAPVALEAENRGEMKLALQYVPEPVPGKKLPTTGEVHIWVKECLDLPLLRGSHLNSFVKCTILPDTSRKSRQKTRAVGKTTNPIFNHTMVYDGFRPEDLMEACVELTVWDHYKLTNQFLGGLRIGFGTGKSYGTEVDWMDSTSEEVALWEKMVNSPNTWIEATLPLRMLLIAKISK

SEQ ID NO: 284963 - DNA, 3049 bp, Artificial Sequence
  derived and/or modified sequence
agtgccgggcgacacccgggccgtgccgccagcgtccgtcgggagagtgaaggctcgcaacgccttgcccgggggaaggtaacgcgccgcgcccggggctgcgcggtttgcaccgccaggccgagggctgggggccagaagacaagagagacggcgaggcgcgctccctgcccggcagcgactcggagacatttgcctgaaaaaattaaggatgaccagcagctgaagaatatgagtggccaatggttttatgaagccaaggcaaaaaggcacagggacaaaatccatggcgcagatatcatcagagcatctatgagaaagaagaggccccagatagcagctgagcagagtaaagacagagaaaatggggcaaaggaaagctgggtgaataatgtcaacaaagatgctttccttcctccagagctggctggcgttgtagaagagccagaagaagatgcagcaccagcaagcccgagttccagtgtggtaaatccagcttccagtgtgattgatatgtcccaggaaaacacaaggaaaccaaatgtgtctccagagaagaggaagaatccgtttaatagctccaagttgccagaaggtcactcatcacaacaaactaaaaatgaacagtcaaaaaatggaagaactggtttatttcagacttcaaaagaggatgaattgtcagagtcaaaagaaaagtcaactgtcgcagatacttcaatccaaaagttagagaaatcaaagcagactttgccaggcctttcaaatgggtcccaaatcaaggctccaatccccaaagccaggaagatgatctacaaatcaactgatttaaacaaagatgataaccagtcttttcctagacaaaggacagactccctgaaagcgagaggggctccgagagggatcctcaagcgcaactccagttccagtagcacagactcagaaacccttcgttataatcacaactttgaacccaaaagcaaaattgtgtcacctggcctaaccatccatgagagaatttctgagaaggagcattctttagaagacaactcttccccaaactccctggagccattaaagcatgtgagattctctgcagtgaaggatgagcttccacagagtcctgggctaatccatggtcgggaagtaggagaatttagtgttttagaatctgacagattgaaaaatggaatggaagatgcaggggacacagaagagtttcagagtgaccctaagccttctcaatacagaaagccttcgctttttcatcaatcaacctcaagcccatatgtatcaaaaagtgaaacacatcagccaatgacttctggttcttttccaattaatgggctgcattctcattcagaagttttaactgcaagaccacagtctatggagaattcaccaaccatcaatgaacccaaagataaatcatcagaattaacaaggcttgaatctgtattacccagaagccctgctgatgaactgtctcattgtgttgagcctgagccatctcaggtgccaggtggcagttctagagaccgtcagcaaggttcagaagaagaacccagtcctgttttgaaaactttggaaaggagtgccgctaggaaaatgccttccaaaagtctagaagacatttcatcagattcatcaaatcaagcaaaagtagataatcagccagaagaattagtgcgtagtgctgaagatgatgagaaaccagatcagaagccagttacaaatgaatgcgtaccaagaatttccacagtgcctacacaacctgataatccattttctcaccctgacaaactcaaaaggatgagcaagtctgttccagcatttctccaagatgagagtgatgacagagaaacagatacagcatcagaaagcagttaccagctcagcagacacaagaagagcccgagctctttaaccaatcttagcagctcctctggcatgacgtccttgtcttctgtgagtggcagtgtgatgagtgtttatagtggagactttggcaatctggaagttaaaggaaatattcagtttgcaattgaatatgtggagtcactgaaggagttgcatgtttttgtggcccagtgtaaggacttagcagcagcggatgtaaaaaaacagcgttcagacccatatgtaaaggcctatttgctaccagacaaaggcaaaatgggcaagaagaaaacactcgtagtgaagaaaaccttgaatcctgtgtataacgaaatactgcggtataaaattgaaaaacaaatcttaaagacacagaaattgaacctgtccatttggcatcgggatacatttaagcgcaatagtttcctaggggaggtggaacttgatttggaaacatgggactgggataacaaacagaataaacaattgagatggtaccctctgaagcggaagacagcaccagttgcccttgaagcagaaaacagaggtgaaatgaaactagctctccagtatgtcccagagccagtccctggtaaaaagcttcctacaactggagaagtgcacatctgggtgaaggaatgccttgatctaccactgctaaggggaagtcatctaaattcttttgttaaatgtaccatccttccagatacaagtaggaaaagtcgccagaagacaagagctgtagggaaaaccaccaaccctatcttcaaccacactatggtgtatgatgggttcaggcctgaagatctgatggaagcctgtgtagagcttactgtctgggaccattacaaattaaccaaccaatttttgggaggtcttcgtattggctttggaacaggtaaaagttatgggactgaagtggactggatggactctacttcagaggaagttgctctctgggagaagatggtaaactcccccaatacttggattgaagcaacactgcctctcagaatgcttttgattgccaagatttccaaatgagcccaaattccactggctcctccactgaaaactactaaaccggtggaatctgatcttgaaaatctgagtaggtggacaaatatcctcactttctatctattgcacctaa

SEQ ID NO: 284964 - DNA, 1176 bp, Artificial Sequence
  derived and/or modified sequence
atgtgggatgtggctgaggagctgaaggcaatgttggtgttcgccgaacataggtactatggcgaaagtctacctttcggggacaactcttttaaagacagccgccatcttaatttcctgaccagcgagcaggcactcgcagattttgcggagttgattaaacatctgaagagaacaattcctggggccgagaaccagccggtcatcgcaatcggcgggtcatacggtgggatgttggcagcctggttccggatgaagtacccccacatggtggtgggcgcactggctgcaagtgcgccgatttggcaatttgaggatttagtgccatgcggtgtgttcatgaagatcgtgactacagatttcaggaaaagtgggccgcattgctcagagagtattcaccggtcctgggacgcaatcaatcgcttgtcaaacaccggcagtgggttacagtggcttactggcgccctgcatctttgttcccccctgacgtcacaagacatccagcacttgaaagactggatctctgaaacatgggtgaacctggctatggtggattatccgtatgcaagcaattttctgcagccactccccgcatggcccatcaaagtggtctgccagtacctaaagaaccccaacgtgagtgattctctgttgcttcaaaatattttccaggctcttaatgtgtattataattatagcggccaggttaaatgcttaaacatctctgagactgcaacctctagcctggggaccctgggttggtcatatcaggcttgtacagaagttgtgatgcccttctgcactaacggggtggacgatatgttcgagcctcatagctggaacctaaaggagctatcagatgactgctttcagcagtggggggtacggccacgaccgtcgtggatcactactatgtatggcgggaaaaacatcagcagccacaccaacatcgtgttctccaatggagaacttgacccctggtcggggggaggggtgacgaaagacatcactgataccttggtcgcagtcacaatttctgagggggcccaccaccttgatctgcgcactaagaacgcccttgaccccatgtctgttttgcttgcgcgttctctggaagtgcgccatatgaagaactggatacgtgacttctacgacagcgcaggaaagcagcactag

SEQ ID NO: 284965 - DNA, 1176 bp, Artificial Sequence
  derived and/or modified sequence
atgtgggatgtggccgaggagctgaaggccatgctggtgtttgctgagcaccgctactacggggagagcctgccctttggagacaacagcttcaaggacagccgccacctgaacttcctgaccagcgagcaggccctggccgactttgctgagctgatcaagcacctgaagaggaccatccctggagctgagaaccagcctgtgattgccatcggcggcagctatggaggcatgctggccgcctggttcaggatgaagtacccccacatggtggtgggcgccctggccgccagcgcccccatctggcagtttgaggacctggtgccctgtggggtcttcatgaagatcgtgaccacagacttcaggaagagcggcccccactgcagcgagagcatccaccgctcctgggatgccatcaaccggctgagcaacacaggcagcggcctgcagtggctgactggagccctgcacctgtgcagccccctgaccagccaggacatccagcacctgaaggactggatcagcgagacctgggtgaacctggccatggtggactacccctatgccagcaacttcctgcagcccctgcctgcctggcccatcaaggtggtgtgccagtacctgaagaaccccaacgtgtctgacagcctgctgctgcagaacatcttccaggccctgaatgtgtactacaactacagcggccaggtgaagtgcctgaacatcagcgagacagccaccagcagcctgggcaccctgggctggagctaccaggcctgcacagaggtggtgatgcccttctgcaccaatggagtggatgacatgtttgagccccacagctggaacctgaaggagctgagtgatgactgcttccagcagtggggcgtgcggccccggcccagctggatcaccaccatgtatggaggcaagaacatcagcagccacaccaacatcgtgttcagcaatggagagctggacccctggagcggcggcggcgtgaccaaggacatcacagacaccctggtggccgtgaccatcagcgagggcgcccaccacctggacctgcggaccaagaatgccctggaccccatgtctgtgctgctggcccggagcctggaggtgcgccacatgaagaactggatccgggacttctatgacagcgctgggaagcagcactag

SEQ ID NO: 284966 - DNA, 1176 bp, Artificial Sequence
  derived and/or modified sequence
atgtgggacgtggccgaggagctgaaggccatgctggtgttcgccgagcataggtattacggagaatctctccccttcggcgataactccttcaaagactctcgccacctgaattttcttacctccgaacaggcgctggccgattttgctgagttgataaaacatttgaagcgaaccatcccaggcgccgagaatcaaccagtcatagctattggaggaagttatggaggtatgctggctgcctggttcaggatgaaatatccacatatggtcgttggcgccttggccgcatccgcccccatctggcagttcgaggacctagtgccttgtggcgtgtttatgaagattgtgacaacagatttccgcaaatcgggcccccactgtagcgagtccatccatagatcttgggacgcaatcaatcgactctctaacaccgggtctggcttacagtggctaacgggtgccctgcatctttgtagccccctgacttctcaagacatccagcaccttaaggattggatcagtgaaacttgggtcaacttagctatggtcgattacccatacgcgagtaacttcctccaacccctaccagcctggccgatcaaggtggtctgccagtatcttaagaatcccaacgttagtgattccttgctgcttcagaacatttttcaggctctgaatgtgtactacaactatagcggacaagtaaaatgtctcaatataagcgaaacggccacatctagccttggaacgctgggctggtcttatcaagcctgtacggaagtggtaatgccattctgcaccaacggcgtggacgacatgtttgagccacactcgtggaatcttaaggaactgagtgatgattgctttcagcagtggggcgttcggcctcgccctagttggatcacgactatgtacggcgggaaaaatatatcaagtcacacgaacatcgtattttcaaacggtgagctggacccttggtccggaggaggtgtcactaaagatataacagacaccctagtggcggtgaccatctccgaaggtgcacaccacctggatctgcggacaaagaacgctctggaccccatgagcgtactcctggcacgctccctggaagttcgccatatgaagaattggataagggatttctacgactcagccggcaaacagcattag

SEQ ID NO: 284967 - DNA, 1176 bp, Artificial Sequence
  derived and/or modified sequence
atgtgggacgtggccgaagaattaaaggcaatgcttgtcttcgctgaacacaggtactatggggagagtctcccttttggcgacaacagttttaaggactcccggcacctgaatttcttgactagcgaacaggcacttgcagattttgcagagttgataaagcatcttaaacggacgatccctggcgctgagaaccagccagtgattgcgattgggggtagctacgggggaatgctggccgcttggtttcggatgaagtacccccatatggttgttggcgcactggcagcttccgctcccatctggcaattcgaagacctcgtaccatgcggcgtgttcatgaagatcgttaccactgattttcggaaatctggaccccattgctccgagagcatacatcgcagttgggatgctatcaacaggttatctaataccggttccggactccagtggctaactggagcactccacctgtgcagtccactaacctcccaggatatacaacatctaaaggattggattagcgaaacgtgggtgaacctggcaatggtggattacccatacgctagtaacttcctacagcccctcccagcctggcccataaaagtagtttgtcagtaccttaaaaaccccaacgtaagcgattctctgctgttgcagaatattttccaggctcttaatgtctactacaactactccggccaagtaaagtgcttgaatatttccgaaacggcaacttcttcccttggcacattgggttggtcctaccaggcctgcacagaagtggtgatgcccttctgtaccaatggagtcgatgacatgttcgagcctcacagctggaacctaaaagagctgagcgatgactgtttccaacagtggggagtgcgaccaaggccttcctggattacaaccatgtacggcggaaaaaatattagctcgcacacaaacatagtgttcagtaacggcgagttagatccttggtctgggggtggggtgacaaaggatattaccgacactctggttgcagttacgatctctgaaggcgctcaccacctcgacctgcgaacaaaaaacgccctggatccaatgtccgtgcttctggcccgtagccttgaagtcagacacatgaaaaattggattagagacttttacgatagcgcaggaaagcaacattag

SEQ ID NO: 284968 - DNA, 1176 bp, Artificial Sequence
  derived and/or modified sequence
atgtgggacgtggccgaggagctgaaggccatgctggtgttcgccgagcacagatactacggcgagagcctgcccttcggcgacaacagcttcaaggacagcagacacctgaacttcctgaccagcgagcaggccctggccgacttcgccgagctgatcaagcacctgaagagaaccatccccggcgccgagaaccagcccgtgatcgccatcggcggcagctacggcggcatgctggccgcctggttcagaatgaagtacccccacatggtggtgggcgccctggccgccagcgcccccatctggcagttcgaggacctggtgccctgcggcgtgttcatgaagatcgtgaccaccgacttcagaaagagcggcccccactgcagcgagagcatccacagaagctgggacgccatcaacagactgagcaacaccggcagcggcctgcagtggctgaccggcgccctgcacctgtgcagccccctgaccagccaggacatccagcacctgaaggactggatcagcgagacctgggtgaacctggccatggtggactacccctacgccagcaacttcctgcagcccctgcccgcctggcccatcaaggtggtgtgccagtacctgaagaaccccaacgtgagcgacagcctgctgctgcagaacatcttccaggccctgaacgtgtactacaactacagcggccaggtgaagtgcctgaacatcagcgagaccgccaccagcagcctgggcaccctgggctggagctaccaggcctgcaccgaggtggtgatgcccttctgcaccaacggcgtggacgacatgttcgagccccacagctggaacctgaaggagctgagcgacgactgcttccagcagtggggcgtgagacccagacccagctggatcaccaccatgtacggcggcaagaacatcagcagccacaccaacatcgtgttcagcaacggcgagctggacccctggagcggcggcggcgtgaccaaggacatcaccgacaccctggtggccgtgaccatcagcgagggcgcccaccacctggacctgagaaccaagaacgccctggaccccatgagcgtgctgctggccagaagcctggaggtgagacacatgaagaactggatcagagacttctacgacagcgccggcaagcagcactag

SEQ ID NO: 284969 - protein, 781 aa, Artificial Sequence
  derived and/or modified sequence
MWFFARDPVRDFPFELIPEPPEGGLPGPWALHRGRKKATGSPVSIFVYDVKPGAEEQTQVAKAAFKRFKTLRHPNILAYIDGLETEKCLHVVTEAVTPLGIYLKARVEAGGLKELEISWGLHQIVKALSFLVNDCSLIHNNVCMAAVFVDRAGEWKLGGLDYMYSAQGNGGGPPRKGIPELEQYDPPELADSSGRVVREKWSADMWRLGCLIWEVFNGPLPRAAALRNPGKIPKTLVPHYCELVGANPKVRPNPARFLQNCRAPGGFMSNRFVETNLFLEEIQIKEPAEKQKFFQELSKSLDAFPEDFCRHKVLPQLLTAFEFGNAGAVVLTPLFKVGKFLSAEEYQQKIIPVVVKMFSSTDRAMRIRLLQQMEQFIQYLDEPTVNTQIFPHVVHGFLDTNPAIREQTVKSMLLLAPKLNEANLNVELMKHFARLQAKDEQGPIRCNTTVCLGKIGSYLSASTRHRVLTSAFSRATRDPFAPSRVAGVLGFAATHNLYSMNDCAQKILPVLCGLTVDPEKSVRDQAFKAIRSFLSKLESVSEDPTQLEEVEKDVHAASSPGMGGAAASWAGWAVTGVSSLTSKLIRSHPTTAPTETNIPQRPTPEGVPAPAPTPVPATPTTSGHWETQEEDKDTAEDSSTADRWDDEDWGSLEQEAESVLAQQDDWSTGGQVSRASQVSNSDHKSSKSPESDWSSWEAEGSWEQGWQEPSSQEPPPDGTRLASEYNWGGPESSDKGDPFATLSARPSTQDRSRLSWPGRSARSGGGRWRPNAPRGRWPRAP

SEQ ID NO: 284970 - DNA, 2346 bp, Artificial Sequence
  derived and/or modified sequence
atgtggttctttgccagagatcctgtgagggactttccattcgagttgatccctgaaccaccagaaggtggtctacccggaccgtgggccctgcatagaggtcgcaaaaaagccacagggtccccagtgagcatctttgtctacgatgttaagcccggcgctgaagagcaaacacaggtggccaaagccgcttttaaaaggttcaagaccctaagacatccgaatatcctcgcatatatcgacggactggaaactgaaaagtgtttgcatgtcgttaccgaggccgtcacacccctgggcatctaccttaaagcacgcgtcgaagccggagggctcaaagaactggaaattagctggggattgcaccaaatcgtcaaagctctctcattcctggttaacgactgctcacttattcacaataatgtgtgcatggcagctgtcttcgttgaccgagccggcgagtggaagctggggggcctcgactacatgtactccgcacaaggcaatggaggagggcctcctaggaagggaattccagagctcgaacaatacgatcccccagaactcgctgatagcagcggtcgcgtggtgagggaaaagtggagcgctgatatgtggcggctcggatgcctgatctgggaagtgtttaatggtccactcccccgggccgccgcgttacgtaaccctggcaagatccctaaaaccctggtgccacactattgtgaactggtcggggcgaacccaaaggtccgcccgaatcccgcaaggttccttcagaattgcagggcacccgggggatttatgtctaatcggttcgttgagactaacctcttcttggaggagattcagatcaaggaaccggccgagaaacaaaaattctttcaggagctgtccaagtcactggacgcgttccccgaagatttttgtcgccataaggtgctgccgcaactactcactgccttcgaattcgggaatgctggagccgtggtgctaacaccattatttaaggttgggaagtttctttctgctgaagaataccagcagaaaatcattcccgttgtcgtgaagatgtttagttcaaccgaccgggctatgcgcattagactgcttcagcagatggagcagttcattcagtatctcgacgaacccacggtgaacacccagatctttccgcacgtcgtgcacggattcctagataccaaccctgccataagggaacagacagttaagtcaatgctgctgctggccccgaaactgaacgaagccaatctgaatgtggagctgatgaaacactttgctaggctccaggcgaaagacgaacagggtccgatcagatgcaataccaccgtgtgcctcgggaagattgggtcatacctgtcagcgtccacgaggcatcgcgtactgacttctgcattttcccgggctaccagggacccattcgccccctccagggtcgcaggagtgctgggcttcgccgccactcataatttgtattcaatgaacgactgcgcccagaagattcttcccgtgctctgcggactgactgtagatccagaaaaaagcgtgcgtgaccaggccttcaaggcgatcaggtcctttctgagcaagctcgagagtgtgtcagaagatcctacccaactagaggaggtggagaaggatgttcacgcggccagctcacccggtatgggtggggctgccgcttcatgggctggctgggcagtgactggagtatcatctctcacatcaaagctaattaggtctcaccccactactgctcccactgagacaaatattccacagaggcccactcccgagggcgtgccagccccggccccaacccccgtgccagcaacacctacaaccagcggtcattgggaaacacaggaagaagataaagacaccgcagaagactcttctacggcagaccgatgggacgacgaggactggggaagtctggaacaggaggcggagtccgtgcttgcccagcaagacgactggtcaacagggggtcaagtctcacgagcatcacaggtgtctaattcagaccataagtcgtctaagagtcctgagtccgattggtccagttgggaggccgagggatcttgggaacagggatggcaggagccaagttctcaagagcccccgcccgacggcaccagactggcaagcgagtacaattggggtggaccagagtcctctgataaaggggatccattcgccaccttgtcggcccggccaagtacacaggaccggagccggttgtcctggccaggtagatcagcccggagcggcgggggcagatggcgacctaatgcaccacgggggcggtggccccgcgctccgtag

SEQ ID NO: 284971 - DNA, 2364 bp, Artificial Sequence
  derived and/or modified sequence
atgtggtttttcgcacgtgaccccgtgcgcgatttcccatttgagctgatccctgagcctccagaagggggactgccaggaccctgggcactgcacagaggtaggaaaaaggccaccggcagccctgtgtccatcttcgtctatgatgtcaagccgggggccgaagaacagacccaggtcgcaaaagcagccttcaaacgctttaaaaccctgcggcaccctaatatcctcgcatacatcgacggactggaaactgaaaagtgcctccatgtcgtgacggaagctgtcactcctctggggatttatttaaaagctcgtgtggaggcagggggcttaaaggagttggaaatcagctgggggttgcatcaaatcgtaaaggccctttccttcctcgtgaatgattgctccctcattcacaataatgtgtgcatggcggccgtgtttgtcgatcgggccggtgagtggaaactcggggggctcgattacatgtatagcgcccagggtaacggaggggggccgcctcgcaagggcattccagaactcgagcaatacgatcctccggaattggctgactcctccgggcgcgtggtgagggagaagtggtctgccgacatgtggagactgggctgtctgatttgggaagtgttcaatggaccattgcctcgagctgcagcacttcgtaatccaggcaaaatcccaaaaactcttgtccctcattactgcgaactggtgggagcaaacccaaaggttagacctaacccagccagattcttgcagaactgcagagcacccggggggttcatgtccaatcgttttgtggagaccaatttattcttggaagaaattcagatcaaagagcccgcggaaaaacagaaatttttccaagaacttagcaagtctcttgatgccttcccagaagacttctgcagacataaggtacttcctcaactcctgacagcgtttgagttcggcaacgcaggcgcagtggtgctgacccctctgttcaaggtcgggaagtttctgtccgcagaggaatatcagcagaaaataattcccgtggtcgtgaagatgttctcttctacagaccgggccatgcggattagactattacaacaaatggagcagttcatccagtaccttgacgagccaaccgtgaatactcagatattcccccatgtggtgcatggatttcttgacactaatcccgccatccgcgagcaaacagtgaaaagcatgctcttgctcgcaccgaaactaaacgaagccaacttgaatgtggagctgatgaagcacttcgcgcgactccaggcaaaagacgaacaaggtccgattcgctgtaacacaaccgtctgcctggggaagatcggcagttacctttctgcttctacgagacacagggtacttacctcagctttctccagggcaacacgggacccatttgccccgtcacgggtggccggtgttctggggtttgcagccacccacaacctgtactcaatgaacgactgcgcccagaaaattctccctgtactgtgtggcctgacagtcgatcccgagaaatctgtccgcgaccaagccttcaaagctataaggagtttcttatcaaaattagagtccgtaagtgaggatccaacgcagttagaagaggtggaaaaagatgtgcatgcagcatcatcccccggaatggggggagcagcagcaagttgggccggttgggccgtcacaggggtaagttccttaacgagcaaactgatcagaagccacccaacgactgcacccacagagaccaatataccacagcggcctacccctgagggcgttccagcgccagcccctacccccgtccctgccacacccaccacatcagggcactgggagacccaggaggaagataaagacaccgctgaggatagctctaccgccgaccgctgggatgacgaggattggggctccctcgaacaggaggccgaatccgttctggcacagcaggatgattggtccacaggcggacaggtgagccgggcttcgcagtctccgaccggcgcagctggcaagctgcgagctccaggcaatcgggcaggcaggtcccaggcacctcgctcacacttgctgacggtccacgggtggcctgcctccattactggagttgcgcagtctcccgctactcgagccactccgagtctgccatgcctgcacgttccagcccctagcagaggtcagacacttggagtgaggactaccggccgcgcttcccgacttacggtcgaccgatcccgtctctcttggccgggacgaagtgcgaggagtggcggaggccgatggaggcctaacgcacctaggggacgttggcctagggctccctag

SEQ ID NO: 284972 - DNA, 2346 bp, Artificial Sequence
  derived and/or modified sequence
atgtggttctttgcccgggaccctgtgcgggacttcccctttgagctgatccctgagcccccagagggcggcctgcccggcccctgggccctgcaccggggcaggaagaaggccaccggcagccctgtgtccatctttgtgtatgatgtgaagccaggagctgaggagcagacccaggtggccaaggccgccttcaagcgcttcaagaccctgcggcaccccaacatcctggcctacattgatggcctggagacagagaagtgcctgcacgtggtgacagaagctgtgacccccctgggcatctacctgaaggcccgggtggaggccggcggcctgaaggagctggagatctcctggggcctgcaccagatcgtgaaggccctgtccttcctggtgaatgactgcagcctcatccacaacaacgtgtgcatggctgctgtgtttgtggaccgggccggggagtggaagctgggcggcctggactacatgtacagcgcccagggcaatggaggcggcccccccaggaagggcatccctgagctggagcagtatgaccccccagagctggccgacagcagcggccgggtggtgcgggagaagtggagcgctgacatgtggaggctgggctgcctgatctgggaggtgttcaacggccccctgcccagggctgctgccctgagaaatcctgggaagatccccaagaccctggtgccccactactgtgagctggtgggcgccaaccccaaggtgcggcccaacccagcccgcttcctgcagaactgccgggcccctgggggcttcatgagcaacagatttgtggagaccaacctcttcctggaggagatccagatcaaggagcctgctgagaagcagaagttcttccaggagctgagcaagagcctggatgccttccctgaggacttctgccgccacaaggtgctgccccagctgctgacagcctttgaatttggaaatgctggagctgtggtgctgacccccctcttcaaggtgggcaagttcctgtctgctgaggagtaccagcagaagatcatccctgtggtggtgaagatgttcagcagcacagaccgggccatgaggatccggctgctgcagcagatggagcagttcatccagtacctggatgagcccaccgtgaacacccagatcttcccccacgtggtgcacggcttcctggacaccaacccagccatccgggagcagacagtgaagtccatgctgctgctggcccccaagctgaatgaggccaacctgaatgtggagctgatgaagcactttgcccggctgcaggccaaggatgagcagggccccatccgctgcaacaccaccgtgtgcctgggcaagattggcagctacctgagcgccagcaccaggcaccgggtgctgaccagcgccttcagccgggccacccgggacccctttgcccccagccgggtggccggcgtgctgggctttgctgccacccacaacctgtacagcatgaatgactgtgcccagaagatcctgcctgtgctgtgtggcctgactgtggaccctgagaagtctgtgcgggaccaggccttcaaggccatccgctccttcctgagcaagctggagagcgtgtctgaggaccccacccagctggaggaggtggagaaggatgtgcacgccgccagcagccctggcatgggcggggccgccgcctcctgggccggctgggccgtgactggagtgagcagcctgaccagcaagctgatccgcagccaccccaccacagcccccacagagaccaacatcccccagaggcccaccccagagggcgtgcctgccccagcccccacccctgtgcctgccacccccaccaccagcggccactgggagacccaggaggaggacaaggacacagctgaggacagcagcacagctgaccgctgggatgatgaggactggggcagcctggagcaggaggccgagagcgtgctggcccagcaggatgactggagcactggaggccaggtgtcccgggccagccaggtgagcaacagcgaccacaagagcagcaagagccctgagagtgactggagctcctgggaggccgagggctcctgggagcagggctggcaggagcccagcagccaggagcccccaccagatggcacccggctggccagcgagtacaactggggcggccctgagagcagtgacaagggggacccctttgccaccctgagcgcccggcccagcacccaggacaggagccggctgtcctggccaggccgcagcgcccggagcggcggcggccgctggaggcccaatgccccccggggccgctggccccgggccccctag

SEQ ID NO: 284973 - DNA, 2364 bp, Artificial Sequence
  derived and/or modified sequence
atgtggttctttgcccgggaccctgtgcgggacttcccctttgagctgatccctgagcccccagagggcggcctgcccggcccctgggccctgcaccggggcaggaagaaggccaccggcagccctgtgtccatctttgtgtatgatgtgaagccaggagctgaggagcagacccaggtggccaaggccgccttcaagcgcttcaagaccctgcggcaccccaacatcctggcctacattgatggcctggagacagagaagtgcctgcacgtggtgacagaagctgtgacccccctgggcatctacctgaaggcccgggtggaggccggcggcctgaaggagctggagatctcctggggcctgcaccagatcgtgaaggccctgtccttcctggtgaatgactgcagcctcatccacaacaacgtgtgcatggctgctgtgtttgtggaccgggccggggagtggaagctgggcggcctggactacatgtacagcgcccagggcaatggaggcggcccccccaggaagggcatccctgagctggagcagtatgaccccccagagctggccgacagcagcggccgggtggtgcgggagaagtggagcgctgacatgtggaggctgggctgcctgatctgggaggtgttcaacggccccctgcccagggctgctgccctgagaaatcctgggaagatccccaagaccctggtgccccactactgtgagctggtgggcgccaaccccaaggtgcggcccaacccagcccgcttcctgcagaactgccgggcccctgggggcttcatgagcaacagatttgtggagaccaacctcttcctggaggagatccagatcaaggagcctgctgagaagcagaagttcttccaggagctgagcaagagcctggatgccttccctgaggacttctgccgccacaaggtgctgccccagctgctgacagcctttgaatttggaaatgctggagctgtggtgctgacccccctcttcaaggtgggcaagttcctgtctgctgaggagtaccagcagaagatcatccctgtggtggtgaagatgttcagcagcacagaccgggccatgaggatccggctgctgcagcagatggagcagttcatccagtacctggatgagcccaccgtgaacacccagatcttcccccacgtggtgcacggcttcctggacaccaacccagccatccgggagcagacagtgaagtccatgctgctgctggcccccaagctgaatgaggccaacctgaatgtggagctgatgaagcactttgcccggctgcaggccaaggatgagcagggccccatccgctgcaacaccaccgtgtgcctgggcaagattggcagctacctgagcgccagcaccaggcaccgggtgctgaccagcgccttcagccgggccacccgggacccctttgcccccagccgggtggccggcgtgctgggctttgctgccacccacaacctgtacagcatgaatgactgtgcccagaagatcctgcctgtgctgtgtggcctgactgtggaccctgagaagtctgtgcgggaccaggccttcaaggccatccgctccttcctgagcaagctggagagcgtgtctgaggaccccacccagctggaggaggtggagaaggatgtgcacgccgccagcagccctggcatgggcggggccgccgcctcctgggccggctgggccgtgactggagtgagcagcctgaccagcaagctgatccgcagccaccccaccacagcccccacagagaccaacatcccccagaggcccaccccagagggcgtgcctgccccagcccccacccctgtgcctgccacccccaccaccagcggccactgggagacccaggaggaggacaaggacacagctgaggacagcagcacagctgaccgctgggatgatgaggactggggcagcctggagcaggaggccgagagcgtgctggcccagcaggatgactggagcactggaggccaggtgtcccgggccagccagagccccaccggggctgctgggaagctgcgggcccctggcaacagagctggccgcagccaggcccccaggagccacctgctgactgtgcacggctggccagccagcatcaccggggtggcccagagccctgccacccgggccacccccagcctgccctgcctgcacgtgcctgcccccagccggggccagaccctgggcgtgaggaccaccggccgggccagccggctgactgtggacaggagccggctgtcctggccaggccgcagcgcccggagcggcggcggccgctggaggcccaatgccccccggggccgctggccccgggccccctag

SEQ ID NO: 284974 - DNA, 2346 bp, Artificial Sequence
  derived and/or modified sequence
atgtggttcttcgcccgggaccccgtgcgggacttccccttcgagctcattccagaacctcctgagggtggtctccctggaccctgggctttgcaccgggggcggaagaaggctaccggcagccccgtctccatattcgtgtacgatgtaaagccaggagccgaagagcagacccaggtcgctaaagctgctttcaagcggttcaaaacgttgcggcacccaaacatccttgcttatatcgacggactagagacagaaaagtgtttgcacgtcgtgacagaagctgtcacccctctagggatttatctcaaggctcgagtggaagccggcggactgaaggagctagaaatctcctgggggttacatcagattgtgaaagctctcagctttttagttaacgattgctccttgatccacaataatgtctgtatggcagcagtcttcgtggaccgcgcaggagagtggaagcttggcggtctcgactacatgtactctgctcagggtaatggcgggggtcccccaaggaagggcattccagagcttgagcagtatgatccccccgaactcgcggactctagtggccgcgtcgtgagagagaagtggagtgccgatatgtggcgcctgggctgcctgatttgggaagttttcaatggtcccctcccacgagccgctgccctcagaaaccccggaaaaattccaaagaccttggtcccacactattgcgaacttgtgggcgctaatcctaaggtccgccctaatcccgctaggttcttgcagaactgtagggctccggggggcttcatgagtaaccgtttcgttgaaaccaacctgtttttggaagaaatccagattaaagaaccggccgaaaaacaaaagttttttcaggagctgagcaagtcgctggatgcattccccgaggacttttgtaggcataaagtacttcctcaactgttgacagcctttgagtttgggaatgccggtgccgttgtcctgacgccactctttaaggtcggaaagttcctgagcgccgaggagtatcagcagaagatcataccagtggtcgtaaagatgttctcttccacagatcgggccatgaggatacggctgctgcagcagatggaacagttcattcagtatctcgatgagcccactgtcaatacccagatcttcccccatgtggtgcatggttttttggacaccaatccggcaatcagagaacagactgttaagtccatgttattactcgcgccaaagctgaatgaagcgaatttgaatgttgagctgatgaaacatttcgctcgcctccaggccaaggatgagcagggccctataagatgtaataccaccgtgtgcctgggcaaaattggctcgtacctcagcgcttcaactcgccatcgggtcttaacctcagccttttctagagctacacgagaccccttcgctccttctcgagtggccggggtgctgggctttgccgcaacgcacaatctgtacagtatgaatgactgcgcacagaagattctcccagtactgtgcgggctgaccgttgaccccgaaaaaagcgtgcgtgatcaagcctttaaagcaattcgttcatttctgagcaagctcgaatcagtgagcgaggatcctacgcagctagaagaggtagaaaaagatgtgcatgcagctagctctcctggcatgggtggagccgcagcaagttgggcaggctgggctgtgaccggcgtgtcgtcacttacctctaagctgattcgcagtcatccaactaccgcgcccaccgaaaccaatattccccagcgacctacccccgaaggcgtgcccgcccccgccccaacaccagtccccgcaacacctacaacttctggtcattgggaaactcaggaggaagacaaagacacagccgaggactcctctacagctgaccgctgggacgatgaggactggggcagcctggagcaggaggccgagtcagttctggctcagcaggatgactggtctacaggcgggcaggtgtcccgagcttcccaggtctctaatagtgatcacaaatcctcgaaatccccagagagcgactggtcctcatgggaagcggaagggtcttgggaacaggggtggcaggaaccctccagccaggagccaccacctgatgggacaaggttggcctccgaatataattggggagggccagagagcagcgacaaaggcgacccgttcgctacattgtcggccaggccctccacacaagaccgatctcgtctaagctggcccggcagatccgcccggtccggggggggccgttggcgcccaaacgcccctagaggccgatggccccgcgcaccctag

SEQ ID NO: 284975 - DNA, 2364 bp, Artificial Sequence
  derived and/or modified sequence
atgtggttcttcgcccgggaccccgtgcgggacttccccttcgagctgatcccagagccccctgaggggggcttgcctgggccgtgggctctgcatagaggccgcaagaaagctacaggatctcctgtgagcatttttgtgtacgatgtgaagcctggcgccgaggagcaaacgcaggttgccaaagctgctttcaaaagattcaagaccctaagacaccctaatatactcgcatacatcgatggattggagactgagaaatgcttgcatgtcgttacagaagcggtaactccattaggcatctacctcaaagcccgggttgaagccggggggctgaaggagctcgaaataagctgggggctccaccagatcgtgaaagcactcagttttcttgtcaatgactgtagcctgatccataataacgtgtgcatggccgcagtgtttgtggatcgcgccggagagtggaaacttggcggtttggattacatgtacagcgcccagggaaacggaggcggcccgccacgcaagggcataccggagctcgagcagtacgatcctcctgagttagccgactcctcaggccgcgttgtgagggagaaatggtcagccgatatgtggcggctggggtgtcttatttgggaagtgtttaatggtccccttccaagggcggccgccctcagaaacccaggtaagattcctaaaactctggtaccccactattgcgagctggtgggagctaacccgaaggtcagacctaatcctgctcgctttctgcagaattgtcgagctccgggcggattcatgagtaatcgctttgtggagacaaaccttttccttgaagagatccagattaaggaacccgccgaaaagcaaaagtttttccaggagctaagcaagagtctggacgccttcccggaggacttctgcagacacaaggtgctgccgcagctgctgaccgcgtttgagttcggaaatgccggagccgtcgtgctgactcctctgtttaaggtgggtaaatttctctctgctgaggagtaccagcagaaaattataccagtagtcgtgaagatgtttagttcaacggatagggcaatgcgcatccggctgctgcagcagatggagcagttcatccagtacctggatgagcctacagtgaacacccagatattcccacacgttgtgcatgggtttctggacactaatccggccatccgcgaacagactgttaagtcaatgctgttgttggcccctaagctgaacgaggccaatctcaacgtcgaactcatgaaacattttgcacggcttcaggcaaaggacgagcagggtcctataaggtgcaacacaaccgtgtgccttggcaaaattggctcatatctttccgcttctaccaggcatcgtgtgctcacgtccgccttttccagggctacacgggacccatttgcaccttcacgggtggccggtgtcctggggtttgccgccactcacaacctgtatagtatgaacgactgcgcacaaaaaatactgcccgtgctttgcgggctgaccgtggacccggaaaaatccgtgagggaccaggccttcaaggccattaggtcttttctgtctaagttggaaagcgtcagtgaagatccaacacagctggaagaggtcgaaaaagacgtccacgctgcaagttctcccggaatgggaggagccgccgccagttgggctggctgggcagtgacgggcgtgagctctctcacaagtaagctgatccgctcacatccgactacggccccgaccgagaccaacatcccccaaagacccaccccagagggggttcccgcacctgcacccactccagtccctgccaccccgaccacctcggggcactgggagactcaagaagaagataaggatacagcagaggactctagcactgctgatcgatgggacgacgaggactggggcagcttagagcaggaggccgaatcagttttggcccagcaggatgattggagcaccggagggcaggtgtctagggcctcccagtcccctacaggcgccgccggtaaactgagagcccctggcaacagggctgggcggtcacaagcccccaggagtcacctcctcacagtccacggctggcccgcctctataacaggagtggcccaatcccccgctactagagctacccccagcctgccttgtctgcacgtgccggcgccctcacggggccagactctgggagttcgaaccacaggccgcgcctcgaggttaacagtagatagaagcaggctcagctggccgggtcgctccgcccgctcgggcggcggacgttggaggcccaacgctccccggggaagatggcctagggccccttag

SEQ ID NO: 284976 - DNA, 2346 bp, Artificial Sequence
  derived and/or modified sequence
atgtggttcttcgccagggaccccgtacgcgatttcccattcgaactgatacccgaacctcctgagggaggcctgcctggtccctgggccctacatagagggagaaagaaggcaactggcagtccagtgagcatttttgtttatgacgtgaagcctggggctgaagaacagactcaggtcgccaaagcagcttttaaaagattcaaaacattgaggcatcctaatatcctagcatacatcgatggtctggagactgagaagtgcctgcatgttgtgaccgaggcagtgactccacttgggatatatcttaaggcccgagtcgaagctggcggattgaaggagctggagatttcatgggggctgcaccaaatcgtgaaggcactcagctttttggtgaatgattgctccctgatccacaataatgtgtgtatggcggctgtgtttgtcgatagggcaggtgaatggaaactcggagggttggattacatgtatagcgctcaaggcaacgggggtggaccaccaaggaagggcattcctgaactggagcagtacgacccgccagagctcgccgatagtagtggtcgagtggttcgtgaaaagtggagcgccgatatgtggcgtcttggatgtctgatctgggaagttttcaacgggcctctgcctcgcgcagctgccctcagaaatccaggtaagattcccaaaacgctcgttcctcattattgtgaattggttggggctaatcccaaagtgcgaccaaacccagccaggttcctgcagaattgccgcgctcccggtgggttcatgagcaacaggtttgtggagacaaacctcttcctggaggagatccaaattaaggaacccgcagaaaagcagaaattttttcaggagctaagtaagtcccttgatgctttcccagaagatttctgtcgtcataaggtgctgccgcagttactgaccgcctttgaatttgggaatgcaggcgctgtcgtcctaactccactcttcaaagtaggtaagtttctgagtgccgaagaatatcagcagaaaatcatcccagttgttgtgaaaatgttcagcagcactgatcgggctatgcgcatcagattactgcagcagatggagcagtttatccagtacctagacgagcctaccgtgaacactcaaatcttcccacacgttgtgcacggctttctcgatacaaacccagccattcgtgagcagaccgtgaagagcatgcttcttctggcccctaagctgaacgaagcgaatctgaacgttgagcttatgaagcatttcgcccgactgcaggccaaggacgaacaaggcccaattcgctgtaatactactgtctgtctagggaaaatcggcagctatttgagtgcatcaacaagacatagagtactgacaagcgccttcagccgggcaactcgggatccgtttgccccaagccgcgtggccggagttttgggattcgcagccacacacaatctgtatagtatgaacgactgtgcacagaagattcttcccgtcctgtgcggcctgacagtggaccctgagaagagcgtacgagatcaggccttcaaagccatccggtcatttctgagcaagctggaatccgtgtctgaggatcctactcagttggaagaggtcgaaaaggatgtccacgccgcttctagccccggtatgggcggagccgctgcaagctgggcaggatgggcggtgacaggggtttcttccctgacaagcaaactcataagatcccacccaacaaccgcccctactgagacgaatattccccaacggcctacacctgaaggagtacctgctcccgctccgactcccgttccagctacaccaactacaagcggtcactgggagacccaagaggaggacaaggataccgctgaggatagctctaccgcagaccggtgggacgatgaggattggggctcgctcgaacaagaggctgagtcagtcctcgcacagcaggatgactggagcacaggcggacaggtctcccgcgcatctcaggtaagtaactctgaccacaagtcaagcaaaagcccagagagtgactggagtagctgggaagctgaaggaagctgggagcagggctggcaggagcccagtagccaggagcctccaccagacgggacccgtcttgccagtgaatataactgggggggaccagagagtagcgacaaaggtgacccatttgcaacgctgagtgccagaccatccacgcaggatagatcccgtttgagctggcctggcaggtctgctcggagcggaggaggccgttggcgacccaacgcccctcgcggaaggtggcctcgagctccctag

SEQ ID NO: 284977 - DNA, 2364 bp, Artificial Sequence
  derived and/or modified sequence
atgtggtttttcgcacgtgatcctgttcgcgactttccttttgagctaatccccgagccgccagagggcggtttgccagggccttgggcactgcacaggggcaggaagaaggctaccggatctcccgtatcaatctttgtgtacgatgttaagccgggtgcggaggaacagacccaggtggctaaggccgctttcaagcgcttcaagactcttaggcaccccaatatacttgcatacattgatggcctggaaaccgagaagtgcttacacgtggtgaccgaggcagttaccccccttggaatatacctgaaggcccgagtagaggccggtggcctgaaagaactcgaaatatcctggggcctgcatcagattgtcaaggctctgagcttcctggtcaatgattgtagcctaattcataacaatgtatgtatggccgctgtgttcgtcgacagagcaggtgaatggaagttaggtggtctggattacatgtattccgctcaggggaacggcggaggaccgcctagaaaaggtattcccgagctggagcagtatgacccacccgaactcgctgactcttctgggagggtggttagagaaaaatggtctgctgacatgtggagactcggctgcctgatatgggaggtctttaacggtccactcccacgggctgctgctctgaggaaccccggaaaaatcccaaaaactctggtgccgcactactgcgagctcgtcggcgctaaccccaaggtcagaccgaacccggctaggtttctgcagaattgtcgggctcctgggggatttatgtccaatagatttgtcgagacaaatttatttctcgaagagattcagataaaggagcccgcagaaaagcagaaatttttccaagagctcagtaagtcgctggacgctttcccggaagacttctgtagacacaaggtgttaccccagctgctaaccgcttttgaattcggaaatgctggcgctgtcgtcctgaccccactcttcaaagtcggaaagtttctgagtgctgaggaatatcagcagaagatcatccccgtcgtggtgaagatgttctccagcactgaccgcgcaatgcggatcaggctgctgcagcagatggagcaatttattcagtatctcgatgaaccaaccgttaatactcagatctttcctcatgtcgtacacggattcctggacacaaatcccgctatcagagaacagacggttaagtctatgctgctgctcgcccctaagctgaacgaagctaatctcaatgtggagctgatgaagcattttgccaggttgcaagcaaaagatgagcaggggcctatccggtgcaatactacagtgtgtctgggaaaaataggctcctacttatcagcaagcaccaggcacagggtactaacaagcgctttcagccgcgcaacaagggacccctttgctccaagcagagtagctggggtccttggctttgctgccactcataacctgtactcaatgaatgattgtgcccaaaaaatcctccccgtgctgtgtgggctaactgtagaccccgagaaatcagttcgagatcaggcctttaaggcaattcggtctttcctctcaaagttagaatctgtgtccgaggatcctactcagctcgaggaagtcgaaaaggatgtccatgctgccagcagcccaggaatgggcggagctgcagcaagctgggcaggctgggctgttactggggtgagcagtctgacctcaaagctcattaggtctcatccaacaaccgctccaaccgagaccaacattcctcaaaggcccaccccggaaggggtaccagcaccggcacccacccccgtgcccgcaactccgacaacttctgggcattgggaaactcaggaggaggataaagacaccgccgaagattcaagcaccgccgaccgatgggatgacgaagattggggctcgctcgagcaggaagccgaatccgtcctggctcagcaggacgattggagcaccggcggtcaagtgtcccgcgcatcacagtcccccacgggagccgcaggaaagctgcgtgcccctggcaaccgggctgggaggagccaagcgccacggtctcatttgctaacagtacacggatggccagccagtatcaccggcgtggcacaaagccccgctaccagagctactccgtccctgccctgcctccacgtgccagccccttcaagggggcagacgttgggtgtgcggaccaccggtagggcctcaagactcacggtggatcgaagcaggctgtcttggcccggtaggagcgctagaagcggcggtggccgttggcgaccaaacgccccaagaggtaggtggcctcgagcaccatag

SEQ ID NO: 284978 - DNA, 2548 bp, Artificial Sequence
  derived and/or modified sequence
ccggagctaaggcgcccgaacccgcggcggcggtggggacgatgtggttctttgcccgggacccggtccgggactttccgttcgagctcatcccggagcccccagagggcggcctgcccgggccctgggccctgcaccgcggccgcaagaaggccacaggcagccccgtgtccatcttcgtctatgatgtgaagcctggcgcggaagagcagacccaggtggccaaagctgccttcaagcgcttcaaaactctacggcaccccaacatcctggcttacatcgatggactggagacagaaaaatgcctccacgtcgtgacagaggctgtgaccccgttgggaatatacctcaaggcgagagtggaggctggtggcctgaaggagctggagatctcctgggggctacaccagatcgtgaaagccctcagcttcctggtcaacgactgcagcctcatccacaacaatgtctgcatggccgccgtgttcgtggaccgagctggcgagtggaagcttgggggcctggactacatgtattcggcccagggcaacggtgggggacctccccgcaaggggatccccgagcttgagcagtatgaccccccggagttggctgacagcagtggcagagtggtcagagagaagtggtcagcagacatgtggcgcttgggctgcctcatttgggaagtcttcaatgggcccctacctcgggcagcagccctacgcaaccctgggaagatccccaaaacgctggtgccccattactgtgagctggtgggagcaaaccccaaggtgcgtcccaacccagcccgcttcctgcagaactgccgggcacctggtggcttcatgagcaaccgctttgtagaaaccaacctcttcctggaggagattcagatcaaagagccagccgagaagcaaaaattcttccaggagctgagcaagagcctggacgcattccctgaggatttctgtcggcacaaggtgctgccccagctgctgaccgccttcgagttcggcaatgctggggccgttgtcctcacgcccctcttcaaggtgggcaagttcctgagcgctgaggagtatcagcagaagatcatccctgtggtggtcaagatgttctcatccactgaccgggccatgcgcatccgcctcctgcagcagatggagcagttcatccagtaccttgacgagccaacagtcaacacccagatcttcccccacgtcgtacatggcttcctggacaccaaccctgccatccgggagcagacggtcaagtccatgctgctcctggccccaaagctgaacgaggccaacctcaatgtggagctgatgaagcactttgcacggctacaggccaaggatgaacagggccccatccgctgcaacaccacagtctgcctgggcaaaatcggctcctacctcagtgctagcaccagacacagggtccttacctctgccttcagccgagccactagggacccgtttgcaccgtcccgggttgcgggtgtcctgggctttgctgccacccacaacctctactcaatgaacgactgtgcccagaagatcctgcctgtgctctgcggtctcactgtagatcctgagaaatccgtgcgagaccaggccttcaaggccattcggagcttcctgtccaaattggagtctgtgtcggaggacccgacccagctggaggaagtggagaaggatgtccatgcagcctccagccctggcatgggaggagccgcagctagctgggcaggctgggccgtgaccggggtctcctcactcacctccaagctgatccgttcgcacccaaccactgccccaacagaaaccaacattccccaaagacccacgcctgaaggagttcctgccccagcccccacccctgttcctgccacccctacaacctcaggccactgggagacgcaggaggaggacaaggacacagcagaggacagcagcactgctgacagatgggacgacgaagactggggcagcctggagcaggaggccgagtctgtgctggcccagcaggacgactggagcaccgggggccaagtgagccgtgctagtcaggtcagcaactccgaccacaaatcctccaaatccccagagtccgactggagcagctgggaagctgagggctcctgggaacagggctggcaggagccaagctcccaggagccacctcctgacggtacacggctggccagcgagtataactggggtggcccagagtccagcgacaagggcgaccccttcgctaccctgtctgcacgtcccagcacccaggacaggtcaaggctgagctggcccggaagaagcgcgaggagcggcggcgggagatggaggccaaacgcgccgagaggaaggtggccaagggccccatgaagctgggagcccggaagctggactgaaccgtggcggtggcccttcccggctgcggagagcccgccccacagatgtatttattgtacaaaccatgtgagcccggccggcccagccaggccatctcacgtgtacataatcagagccacaataaattctatttc

SEQ ID NO: 284979 - DNA, 2570 bp, Artificial Sequence
  derived and/or modified sequence
cccggagctaaggcgcccgaacccgcggcggcggtggggacgatgtggttctttgcccgggacccggtccgggactttccgttcgagctcatcccggagcccccagagggcggcctgcccgggccctgggccctgcaccgcggccgcaagaaggccacaggcagccccgtgtccatcttcgtctatgatgtgaagcctggcgcggaagagcagacccaggtggccaaagctgccttcaagcgcttcaaaactctacggcaccccaacatcctggcttacatcgatggactggagacagaaaaatgcctccacgtcgtgacagaggctgtgaccccgttgggaatatacctcaaggcgagagtggaggctggtggcctgaaggagctggagatctcctgggggctacaccagatcgtgaaagccctcagcttcctggtcaacgactgcagcctcatccacaacaatgtctgcatggccgccgtgttcgtggaccgagctggcgagtggaagcttgggggcctggactacatgtattcggcccagggcaacggtgggggacctccccgcaaggggatccccgagcttgagcagtatgaccccccggagttggctgacagcagtggcagagtggtcagagagaagtggtcagcagacatgtggcgcttgggctgcctcatttgggaagtcttcaatgggcccctacctcgggcagcagccctacgcaaccctgggaagatccccaaaacgctggtgccccattactgtgagctggtgggagcaaaccccaaggtgcgtcccaacccagcccgcttcctgcagaactgccgggcacctggtggcttcatgagcaaccgctttgtagaaaccaacctcttcctggaggagattcagatcaaagagccagccgagaagcaaaaattcttccaggagctgagcaagagcctggacgcattccctgaggatttctgtcggcacaaggtgctgccccagctgctgaccgccttcgagttcggcaatgctggggccgttgtcctcacgcccctcttcaaggtgggcaagttcctgagcgctgaggagtatcagcagaagatcatccctgtggtggtcaagatgttctcatccactgaccgggccatgcgcatccgcctcctgcagcagatggagcagttcatccagtaccttgacgagccaacagtcaacacccagatcttcccccacgtcgtacatggcttcctggacaccaaccctgccatccgggagcagacggtcaagtccatgctgctcctggccccaaagctgaacgaggccaacctcaatgtggagctgatgaagcactttgcacggctacaggccaaggatgaacagggccccatccgctgcaacaccacagtctgcctgggcaaaatcggctcctacctcagtgctagcaccagacacagggtccttacctctgccttcagccgagccactagggacccgtttgcaccgtcccgggttgcgggtgtcctgggctttgctgccacccacaacctctactcaatgaacgactgtgcccagaagatcctgcctgtgctctgcggtctcactgtagatcctgagaaatccgtgcgagaccaggccttcaaggccattcggagcttcctgtccaaattggagtctgtgtcggaggacccgacccagctggaggaagtggagaaggatgtccatgcagcctccagccctggcatgggaggagccgcagctagctgggcaggctgggccgtgaccggggtctcctcactcacctccaagctgatccgttcgcacccaaccactgccccaacagaaaccaacattccccaaagacccacgcctgaaggagttcctgccccagcccccacccctgttcctgccacccctacaacctcaggccactgggagacgcaggaggaggacaaggacacagcagaggacagcagcactgctgacagatgggacgacgaagactggggcagcctggagcaggaggccgagtctgtgctggcccagcaggacgactggagcaccgggggccaagtgagccgtgctagtcagagtccgactggagcagctgggaagctgagggctcctgggaacagggctggcaggagccaagctcccaggagccacctcctgacggtacacggctggccagcgagtataactggggtggcccagagtccagcgacaagggcgaccccttcgctaccctgtctgcacgtcccagcacccagccgaggccagactcttggggtgaggacaactgggagggcctcgagactgacagtcgacaggtcaaggctgagctggcccggaagaagcgcgaggagcggcggcgggagatggaggccaaacgcgccgagaggaaggtggccaagggccccatgaagctgggagcccggaagctggactgaaccgtggcggtggcccttcccggctgcggagagcccgccccacagatgtatttattgtacaaaccatgtgagcccggccggcccagccaggccatctcacgtgtacataatcagagccacaataaattctatttcaca

SEQ ID NO: 284980 - DNA, 2346 bp, Artificial Sequence
  derived and/or modified sequence
atgtggttcttcgccagagaccccgtgagagacttccccttcgagctgatccccgagccccccgagggcggcctgcccggcccctgggccctgcacagaggcagaaagaaggccaccggcagccccgtgagcatcttcgtgtacgacgtgaagcccggcgccgaggagcagacccaggtggccaaggccgccttcaagagattcaagaccctgagacaccccaacatcctggcctacatcgacggcctggagaccgagaagtgcctgcacgtggtgaccgaggccgtgacccccctgggcatctacctgaaggccagagtggaggccggcggcctgaaggagctggagatcagctggggcctgcaccagatcgtgaaggccctgagcttcctggtgaacgactgcagcctgatccacaacaacgtgtgcatggccgccgtgttcgtggacagagccggcgagtggaagctgggcggcctggactacatgtacagcgcccagggcaacggcggcggcccccccagaaagggcatccccgagctggagcagtacgacccccccgagctggccgacagcagcggcagagtggtgagagagaagtggagcgccgacatgtggagactgggctgcctgatctgggaggtgttcaacggccccctgcccagagccgccgccctgagaaaccccggcaagatccccaagaccctggtgccccactactgcgagctggtgggcgccaaccccaaggtgagacccaaccccgccagattcctgcagaactgcagagcccccggcggcttcatgagcaacagattcgtggagaccaacctgttcctggaggagatccagatcaaggagcccgccgagaagcagaagttcttccaggagctgagcaagagcctggacgccttccccgaggacttctgcagacacaaggtgctgccccagctgctgaccgccttcgagttcggcaacgccggcgccgtggtgctgacccccctgttcaaggtgggcaagttcctgagcgccgaggagtaccagcagaagatcatccccgtggtggtgaagatgttcagcagcaccgacagagccatgagaatcagactgctgcagcagatggagcagttcatccagtacctggacgagcccaccgtgaacacccagatcttcccccacgtggtgcacggcttcctggacaccaaccccgccatcagagagcagaccgtgaagagcatgctgctgctggcccccaagctgaacgaggccaacctgaacgtggagctgatgaagcacttcgccagactgcaggccaaggacgagcagggccccatcagatgcaacaccaccgtgtgcctgggcaagatcggcagctacctgagcgccagcaccagacacagagtgctgaccagcgccttcagcagagccaccagagaccccttcgcccccagcagagtggccggcgtgctgggcttcgccgccacccacaacctgtacagcatgaacgactgcgcccagaagatcctgcccgtgctgtgcggcctgaccgtggaccccgagaagagcgtgagagaccaggccttcaaggccatcagaagcttcctgagcaagctggagagcgtgagcgaggaccccacccagctggaggaggtggagaaggacgtgcacgccgccagcagccccggcatgggcggcgccgccgccagctgggccggctgggccgtgaccggcgtgagcagcctgaccagcaagctgatcagaagccaccccaccaccgcccccaccgagaccaacatcccccagagacccacccccgagggcgtgcccgcccccgcccccacccccgtgcccgccacccccaccaccagcggccactgggagacccaggaggaggacaaggacaccgccgaggacagcagcaccgccgacagatgggacgacgaggactggggcagcctggagcaggaggccgagagcgtgctggcccagcaggacgactggagcaccggcggccaggtgagcagagccagccaggtgagcaacagcgaccacaagagcagcaagagccccgagagcgactggagcagctgggaggccgagggcagctgggagcagggctggcaggagcccagcagccaggagcccccccccgacggcaccagactggccagcgagtacaactggggcggccccgagagcagcgacaagggcgaccccttcgccaccctgagcgccagacccagcacccaggacagaagcagactgagctggcccggcagaagcgccagaagcggcggcggcagatggagacccaacgcccccagaggcagatggcccagagccccctag

SEQ ID NO: 284981 - DNA, 2364 bp, Artificial Sequence
  derived and/or modified sequence
atgtggttcttcgccagagaccccgtgagagacttccccttcgagctgatccccgagccccccgagggcggcctgcccggcccctgggccctgcacagaggcagaaagaaggccaccggcagccccgtgagcatcttcgtgtacgacgtgaagcccggcgccgaggagcagacccaggtggccaaggccgccttcaagagattcaagaccctgagacaccccaacatcctggcctacatcgacggcctggagaccgagaagtgcctgcacgtggtgaccgaggccgtgacccccctgggcatctacctgaaggccagagtggaggccggcggcctgaaggagctggagatcagctggggcctgcaccagatcgtgaaggccctgagcttcctggtgaacgactgcagcctgatccacaacaacgtgtgcatggccgccgtgttcgtggacagagccggcgagtggaagctgggcggcctggactacatgtacagcgcccagggcaacggcggcggcccccccagaaagggcatccccgagctggagcagtacgacccccccgagctggccgacagcagcggcagagtggtgagagagaagtggagcgccgacatgtggagactgggctgcctgatctgggaggtgttcaacggccccctgcccagagccgccgccctgagaaaccccggcaagatccccaagaccctggtgccccactactgcgagctggtgggcgccaaccccaaggtgagacccaaccccgccagattcctgcagaactgcagagcccccggcggcttcatgagcaacagattcgtggagaccaacctgttcctggaggagatccagatcaaggagcccgccgagaagcagaagttcttccaggagctgagcaagagcctggacgccttccccgaggacttctgcagacacaaggtgctgccccagctgctgaccgccttcgagttcggcaacgccggcgccgtggtgctgacccccctgttcaaggtgggcaagttcctgagcgccgaggagtaccagcagaagatcatccccgtggtggtgaagatgttcagcagcaccgacagagccatgagaatcagactgctgcagcagatggagcagttcatccagtacctggacgagcccaccgtgaacacccagatcttcccccacgtggtgcacggcttcctggacaccaaccccgccatcagagagcagaccgtgaagagcatgctgctgctggcccccaagctgaacgaggccaacctgaacgtggagctgatgaagcacttcgccagactgcaggccaaggacgagcagggccccatcagatgcaacaccaccgtgtgcctgggcaagatcggcagctacctgagcgccagcaccagacacagagtgctgaccagcgccttcagcagagccaccagagaccccttcgcccccagcagagtggccggcgtgctgggcttcgccgccacccacaacctgtacagcatgaacgactgcgcccagaagatcctgcccgtgctgtgcggcctgaccgtggaccccgagaagagcgtgagagaccaggccttcaaggccatcagaagcttcctgagcaagctggagagcgtgagcgaggaccccacccagctggaggaggtggagaaggacgtgcacgccgccagcagccccggcatgggcggcgccgccgccagctgggccggctgggccgtgaccggcgtgagcagcctgaccagcaagctgatcagaagccaccccaccaccgcccccaccgagaccaacatcccccagagacccacccccgagggcgtgcccgcccccgcccccacccccgtgcccgccacccccaccaccagcggccactgggagacccaggaggaggacaaggacaccgccgaggacagcagcaccgccgacagatgggacgacgaggactggggcagcctggagcaggaggccgagagcgtgctggcccagcaggacgactggagcaccggcggccaggtgagcagagccagccagagccccaccggcgccgccggcaagctgagagcccccggcaacagagccggcagaagccaggcccccagaagccacctgctgaccgtgcacggctggcccgccagcatcaccggcgtggcccagagccccgccaccagagccacccccagcctgccctgcctgcacgtgcccgcccccagcagaggccagaccctgggcgtgagaaccaccggcagagccagcagactgaccgtggacagaagcagactgagctggcccggcagaagcgccagaagcggcggcggcagatggagacccaacgcccccagaggcagatggcccagagccccctag

SEQ ID NO: 284982 - protein, 780 aa, Artificial Sequence
  derived and/or modified sequence
MWFFARDPVRDFPFELIPEPPEGGLPGPWALHRGRKKATGSPVSIFVYDVKPGAEEQTQVAKAAFKRFKTLRHPNILAYIDGLETEKCLHVVTEAVTPLGIYLKARVEAGGLKELEISWGLHQIVKALSFLVNDCSLIHNNVCMAAVFVDRAGEWKLGGLDYMYSAQGNGGGPPRKGIPELEQYDPPELADSSGRVVREKWSADMWRLGCLIWEVFNGPLPRAAALRNPGKIPKTLVPHYCELVGANPKVRPNPARFLQNCRAPGGFMSNRFVETNLFLEEIQIKEPAEKQKFFQELSKSLDAFPEDFCRHKVLPQLLTAFEFGNAGAVVLTPLFKVGKFLSAEEYQQKIIPVVVKMFSSTDRAMRIRLLQQMEQFIQYLDEPTVNTQIFPHVVHGFLDTNPAIREQTVKSMLLLAPKLNEANLNVELMKHFARLQAKDEQGPIRCNTTVCLGKIGSYLSASTRHRVLTSAFSRATRDPFAPSRVAGVLGFAATHNLYSMNDCAQKILPVLCGLTVDPEKSVRDQAFKAIRSFLSKLESVSEDPTQLEEVEKDVHAASSPGMGGAAASWAGWAVTGVSSLTSKLIRSHPTTAPTETNIPQRPTPEGVPAPAPTPVPATPTTSGHWETQEEDKDTAEDSSTADRWDDEDWGSLEEAESVLAQQDDWSTGGQVSRASQVSNSDHKSSKSPESDWSSWEAEGSWEQGWQEPSSQEPPPDGTRLASEYNWGGPESSDKGDPFATLSARPSTQDRSRLSWPGRSARSGGGRWRPNAPRGRWPRAP

SEQ ID NO: 284983 - DNA, 1071 bp, Artificial Sequence
  derived and/or modified sequence
atgtggttttttgcgcgagatccagtcagagactttcccttcgagcttatacccgaacctccagagggcgggctcccagggccctgggcattgcacaggggaagaaaaaaggctaccgggtcccctgtgtctatcttcgtgtatgatgtgaaacctggcgcggaagagcaaactcaggtggctaaagctgcattcaagcgcttcaagacactaaggcatcccaatattctcgcctacattgacggtctggagaccgagaagtgtctccacgtagtgactgaagcagttacaccgctgggtatctacctgaaagcaagagttgaggctggaggccttaaggagctggagatctcttggggcttgcaccaaatcgtgaaagcgttatctttcttggtgaatgactgtagcctgatccataataacgtttgcatggctgccgtcttcgtggatagggctggagagtggaagttgggaggactggactacatgtactccgctcaaggaaatggaggaggtccaccaaggaaaggcattcctgaattggagcagtacgaccctcctgagttggctgattcctctggccgggtggtgcgcgagaaatggtctgcagacatgtggcgactggggtgcctgatttgggaagttttcaacggacctcttccgagagccgccgctctgcggaaccctggaaagatccctaaaacacttgtgccccactactgcgagctcgtgggggccaacccaaaggtccgtccaaaccccgccagattcctgcagaactgccgcgctccaggcggtttcatgtccaacaggtttgtagagacaaacttgtttctggaggagatccagccaaaggatcctagactaaaggaatttcttccccagcctccccccctctttcttccccccttacaacctcaggcaactggccggcggaggcggcgaactcggacacagcagagaacagcagcattgctgacagacgggacgacaaagaccggcgctgcctggagcagacgcccgagcttgtgttggccatcaaggactacaggcgcaccaggggctaagtag

SEQ ID NO: 284984 - DNA, 2343 bp, Artificial Sequence
  derived and/or modified sequence
atgtggttcttcgccagagatcccgtccgagattttcctttcgagttaattccagaaccacctgaagggggcttaccaggaccctgggcactgcataggggccgcaaaaaagctactggaagccctgtatcgatcttcgtgtacgacgtgaagcctggtgcggaggagcagacgcaggttgccaaggccgctttcaagaggttcaagacgttaagacacccaaatatcttggcctacattgatggattggaaactgagaagtgcctacatgtggttacagaggctgtgaccccactggggatctatttgaaggcacgtgtggaggccggaggactcaaggagcttgaaattagctggggcctgcatcagatagtgaaagcactgagctttctagtgaacgattgttccctcatccataataatgtgtgtatggctgccgtgtttgtcgaccgagccggcgagtggaagctgggggggctagattacatgtatagcgctcaaggaaacgggggcggcccgccaaggaagggcatccctgagcttgaacagtatgatcctcccgaacttgctgacagctcgggccgtgtcgttcgagagaaatggagcgcagatatgtggagactggggtgtctcatttgggaagtcttcaatgggcctctccctcgagctgccgcattgcgaaaccccggaaaaataccgaaaactctggtgcctcattactgtgaactggttggggctaacccaaaggtgcggcctaaccccgccaggttcctccagaactgtagggccccgggagggttcatgtcgaacagattcgtggagaccaatcttttcctggaggagatacaaataaaggaacccgccgagaagcagaagtttttccaggagctgtccaaaagtcttgacgctttccctgaggatttttgtaggcacaaggttctgccacaactgcttacagctttcgagttcggcaatgccggcgctgtcgtcctgacccccctgtttaaggtcgggaagtttctttctgctgaggagtaccagcagaaaatcatccccgttgtcgtgaagatgttttccagcacagaccgagcaatgcggattaggctgctccagcaaatggaacagtttatccagtatttagacgagcctaccgttaatacccaaatctttccccatgtggtgcacggattcctggacaccaacccagcaatacgggaacaaacagtcaagagcatgctactgttggcgcctaaactaaacgaggctaatcttaatgtggaactgatgaaacactttgcaagattacaagccaaggatgaacaggggccaatccggtgcaatactaccgtgtgtctaggtaagatcggctcatatctgagcgcttccacaaggcaccgtgtccttacgtccgctttcagccgggcaacaagagacccttttgctccgtccagggtcgcaggggtcctcgggttcgccgctacccataacctctatagtatgaatgattgcgcacaaaaaatcctgccagtattgtgcggtctgactgtcgaccccgaaaaatctgtgagggatcaggctttcaaggccatcaggtcttttctaagcaaactcgaaagcgtcagtgaggaccctacacagctggaggaagttgaaaaggatgttcacgccgcttctagcccaggaatgggaggcgcagcagcaagctgggctggttgggccgtgaccggagtgagttcattgacctcaaaactcatccgctcccacccaactaccgctccaacagagactaatattccacagaggcctaccccagaaggggtccccgccccagcacctacaccggtaccagccacacctacaacctcaggccactgggagactcaggaagaagataaagatacagcagaggactcctccacagcagatagatgggatgacgaggactggggatcgctggaggaggccgaatcggttctggcccagcaggatgattggtctacaggaggccaggttagcagagcttcacaggtgtctaacagcgaccataaatctagcaaatcacctgagtcagattggagctcttgggaggccgaaggatcttgggaacagggctggcaggagccctcatcacaagaaccccctcccgatggaaccaggctggcgagtgagtacaattggggtggccccgagtccagcgataaaggggatccctttgccaccctgtcagcccgaccgtctacccaagatcgctctaggttgagctggccaggtcggtccgcgcggtccggtggcggccgctggagaccaaatgcaccacgagggcggtggcccagagctccctag

SEQ ID NO: 284985 - DNA, 1071 bp, Artificial Sequence
  derived and/or modified sequence
atgtggttctttgcccgggaccctgtgcgggacttcccctttgagctgatccctgagcccccagagggcggcctgcccggcccctgggccctgcaccggggcaggaagaaggccaccggcagccctgtgtccatctttgtgtatgatgtgaagccaggagctgaggagcagacccaggtggccaaggccgccttcaagcgcttcaagaccctgcggcaccccaacatcctggcctacattgatggcctggagacagagaagtgcctgcacgtggtgacagaagctgtgacccccctgggcatctacctgaaggcccgggtggaggccggcggcctgaaggagctggagatctcctggggcctgcaccagatcgtgaaggccctgtccttcctggtgaatgactgcagcctcatccacaacaacgtgtgcatggctgctgtgtttgtggaccgggccggggagtggaagctgggcggcctggactacatgtacagcgcccagggcaatggaggcggcccccccaggaagggcatccctgagctggagcagtatgaccccccagagctggccgacagcagcggccgggtggtgcgggagaagtggagcgctgacatgtggaggctgggctgcctgatctgggaggtgttcaacggccccctgcccagggctgctgccctgagaaatcctgggaagatccccaagaccctggtgccccactactgtgagctggtgggcgccaaccccaaggtgcggcccaacccagcccgcttcctgcagaactgccgggcccctgggggcttcatgagcaacagatttgtggagaccaacctcttcctggaggagatccagcccaaggacccccggctgaaggagttcctgccccagcccccacccctcttcctgccccccctgcagccccaggccactggaagaagaagaagaaggaccaggacccagcagaggacagctgccctgctgacagatggcaccaccaagacaggagctgcctggagcagaagacccagcctgtgctggcccagcaggaccaccggggcccctggggccaagtag

SEQ ID NO: 284986 - DNA, 2343 bp, Artificial Sequence
  derived and/or modified sequence
atgtggttctttgcccgggaccctgtgcgggacttcccctttgagctgatccctgagcccccagagggcggcctgcccggcccctgggccctgcaccggggcaggaagaaggccaccggcagccctgtgtccatctttgtgtatgatgtgaagccaggagctgaggagcagacccaggtggccaaggccgccttcaagcgcttcaagaccctgcggcaccccaacatcctggcctacattgatggcctggagacagagaagtgcctgcacgtggtgacagaagctgtgacccccctgggcatctacctgaaggcccgggtggaggccggcggcctgaaggagctggagatctcctggggcctgcaccagatcgtgaaggccctgtccttcctggtgaatgactgcagcctcatccacaacaacgtgtgcatggctgctgtgtttgtggaccgggccggggagtggaagctgggcggcctggactacatgtacagcgcccagggcaatggaggcggcccccccaggaagggcatccctgagctggagcagtatgaccccccagagctggccgacagcagcggccgggtggtgcgggagaagtggagcgctgacatgtggaggctgggctgcctgatctgggaggtgttcaacggccccctgcccagggctgctgccctgagaaatcctgggaagatccccaagaccctggtgccccactactgtgagctggtgggcgccaaccccaaggtgcggcccaacccagcccgcttcctgcagaactgccgggcccctgggggcttcatgagcaacagatttgtggagaccaacctcttcctggaggagatccagatcaaggagcctgctgagaagcagaagttcttccaggagctgagcaagagcctggatgccttccctgaggacttctgccgccacaaggtgctgccccagctgctgacagcctttgaatttggaaatgctggagctgtggtgctgacccccctcttcaaggtgggcaagttcctgtctgctgaggagtaccagcagaagatcatccctgtggtggtgaagatgttcagcagcacagaccgggccatgaggatccggctgctgcagcagatggagcagttcatccagtacctggatgagcccaccgtgaacacccagatcttcccccacgtggtgcacggcttcctggacaccaacccagccatccgggagcagacagtgaagtccatgctgctgctggcccccaagctgaatgaggccaacctgaatgtggagctgatgaagcactttgcccggctgcaggccaaggatgagcagggccccatccgctgcaacaccaccgtgtgcctgggcaagattggcagctacctgagcgccagcaccaggcaccgggtgctgaccagcgccttcagccgggccacccgggacccctttgcccccagccgggtggccggcgtgctgggctttgctgccacccacaacctgtacagcatgaatgactgtgcccagaagatcctgcctgtgctgtgtggcctgactgtggaccctgagaagtctgtgcgggaccaggccttcaaggccatccgctccttcctgagcaagctggagagcgtgtctgaggaccccacccagctggaggaggtggagaaggatgtgcacgccgccagcagccctggcatgggcggggccgccgcctcctgggccggctgggccgtgactggagtgagcagcctgaccagcaagctgatccgcagccaccccaccacagcccccacagagaccaacatcccccagaggcccaccccagagggcgtgcctgccccagcccccacccctgtgcctgccacccccaccaccagcggccactgggagacccaggaggaggacaaggacacagctgaggacagcagcacagctgaccgctgggatgatgaggactggggcagcctggaggaggccgagagcgtgctggcccagcaggatgactggagcactggaggccaggtgtcccgggccagccaggtgagcaacagcgaccacaagagcagcaagagccctgagagtgactggagctcctgggaggccgagggctcctgggagcagggctggcaggagcccagcagccaggagcccccaccagatggcacccggctggccagcgagtacaactggggcggccctgagagcagtgacaagggggacccctttgccaccctgagcgcccggcccagcacccaggacaggagccggctgtcctggccaggccgcagcgcccggagcggcggcggccgctggaggcccaatgccccccggggccgctggccccgggccccctag

SEQ ID NO: 284987 - DNA, 1071 bp, Artificial Sequence
  derived and/or modified sequence
atgtggttcttcgcccgggaccccgtgcgggacttccccttcgagctgatccccgagcccccggaaggcggattacctggcccctgggctttgcatagaggcagaaagaaggccacgggaagccctgtgtctatctttgtgtacgacgttaagcctggagccgaagagcagacacaggttgctaaagcggcgtttaagcggtttaagaccttgcgccatcctaacatactcgcctacatagacgggttggagactgagaagtgtttacacgttgtcaccgaggcggtgacccctctcgggatctacctgaaggccagagtggaagccggaggcctgaaagagctagagatatcatggggcctgcatcagatcgttaaagcccttagttttctggtcaatgactgttccctcattcataataacgtctgtatggctgctgtatttgtggacagagcgggggagtggaagctcggcggtttggactacatgtactcggcgcaaggcaacggaggaggaccccctcgaaagggtattcccgagttagagcaatatgatcctccagagttggccgactctagcggtcgcgtggttcgagaaaaatggtctgctgatatgtggaggcttggctgtctcatctgggaggtattcaatggacctctacctagggcagcagcactgaggaatcccgggaagattcccaagactctcgtgcctcactattgtgaactggttggcgccaaccccaaggtgaggccgaaccccgctagatttctgcagaactgcagggcccccgggggcttcatgagcaatagattcgtggagactaatctgtttcttgaagaaattcagccgaaggaccccaggttaaaggaattcctcccacagcctcccccactgttcctaccacccttgcagcctcaagctaccgggcggaggcgccgcagaactcggacccagcagcgaactgctgcccttctgactgatgggactaccaagactggcgccgcgtggtctcggcggccctccctgtgttggccctctagaaccacgggagcgcctggagcaaaatag

SEQ ID NO: 284988 - DNA, 2343 bp, Artificial Sequence
  derived and/or modified sequence
atgtggttcttcgcccgggaccccgtgcgggacttccccttcgagcttatccctgagccccccgagggcggcctacccggcccttgggccttgcaccgggggcgaaaaaaggccaccggttcacctgtgtcaatctttgtctacgatgtcaagcctggtgccgaggaacagacacaagtggcaaaggctgccttcaagcgattcaagacattgagacaccctaatattctggcttatattgatgggctagaaacggaaaagtgtctgcacgtggtgaccgaagcggtgacaccactcggcatctatttgaaggctagagtggaagccggcggtttaaaggaattagagatcagctggggactgcaccagattgtgaaggcattgagcttcttagtgaacgactgctcattgattcataacaatgtgtgtatggctgccgtgttcgtcgacagggctggcgagtggaaactcggaggacttgactacatgtactcagcccagggcaatggtgggggaccgcctagaaagggcatccccgaacttgaacagtacgaccctcccgaattggccgattcttccgggagagtcgttagggagaaatggtcagcagatatgtggagattggggtgcctgatctgggaggtatttaacgggccgctgccccgagctgccgccttgcggaatccaggtaaaattcctaagacactggtgccccactactgtgaacttgtaggcgcaaatcctaaagtccggcccaacccagcccgattcttacagaattgtcgggccccgggaggcttcatgagtaataggtttgtggaaactaatttattcctggaagagatccagatcaaggaacccgcagagaaacagaagtttttccaggaactcagcaagagcttagacgcctttcctgaagatttctgccgccataaggtgctccctcaactccttacagcttttgaatttggcaatgccggcgccgtggtgctcacgcctcttttcaaggttgggaaattcttaagcgccgaggaataccaacagaagatcattcctgtggtcgtcaagatgttcagctcaaccgaccgcgccatgcgcatcaggctgctccaacagatggaacagttcattcagtatctggacgaacccacagtgaatacccagatatttccccatgttgtgcacgggttcctggacaccaacccagcaatcagagagcaaaccgtgaagagcatgctcctgctggcgcctaagctaaacgaggccaacctgaatgtggagcttatgaagcattttgctcgactccaggccaaagatgagcagggtccaatccgctgtaatacaaccgtttgcctcggcaaaattggctcctatctgtcagcaagtacccggcaccgagtactgacctcagctttttcacgggccacccgggaccccttcgccccatctcgggttgccggggtgttgggattcgctgccacccataatctgtactccatgaacgattgcgcacaaaagatcttgccagtgctctgtggactgactgtggatcctgagaagtcggtacgcgatcaggccttcaaggccattaggtctttcctgtccaagctagagagcgtctccgaggacccaacccaattagaggaggtggaaaaggatgtgcatgccgcctcttcgcctggcatgggcggcgcagccgcttcatgggctgggtgggccgtgacaggtgtcagctcactaaccagcaaattgatccgaagtcaccctactaccgcccccaccgaaacgaacatcccacaaaggccaactcccgaaggagtgccagctccagcacctacacccgtccctgccacgcccacgacctccggtcactgggaaacccaggaggaggataaagacaccgctgaagattcttccacagccgaccgctgggatgacgaggactggggtagcctggaggaagccgagagtgtcttggctcaacaggatgattggagcacaggaggccaggtgtctcgcgccagccaggtcagcaatagcgatcataagtcatctaagtctccagagtcagattggagttcctgggaggccgagggcagctgggagcagggatggcaggagccttcgtctcaggagcccccacccgatggaacacgacttgcttccgagtacaactggggagggcctgaatcctctgacaaaggagatccattcgctaccttatcagcgcgcccatctacacaggaccggtcacgtttgagctggcctgggcgttcagcccgcagcggcggtggaaggtggcggccgaacgctccaaggggtcgttggcctagggctccttag

SEQ ID NO: 284989 - DNA, 1071 bp, Artificial Sequence
  derived and/or modified sequence
atgtggttttttgcccgtgatccagtccgcgacttcccttttgaattaatccccgaaccgcctgagggcggactgcctgggccatgggccctccaccgagggcgaaaaaaggcaactgggagccctgtgtccatcttcgtctacgatgtcaagccaggcgctgaggaacaaactcaagtcgccaaagcagctttcaagagatttaagacccttcgccatccgaatatacttgcctatattgatggcctggaaaccgagaaatgcctgcacgtggtgaccgaggcagtcacgccactgggcatttatttaaaggccagggtcgaagcaggtggactgaaagagttagaaatctcctggggcctgcaccaaatcgtcaaagctttgagcttcttggtgaacgattgcagccttatccacaataacgtttgcatggctgcagtatttgtggatcgagccggagaatggaaactcggcggactcgattatatgtacagcgcgcaggggaatggtggtggacccccaaggaagggcattccggaactggagcagtacgacccccctgaactagcggactcaagcgggagggtggtacgagagaaatggtccgcagatatgtggcggctaggttgcttgatttgggaggttttcaatggccctcttccaagagcggctgctctgcgcaaccctggtaagattccaaagaccctggtcccgcattattgtgaattagtaggcgctaaccccaaagtgcggccaaatcccgcacgtttcctgcaaaactgtagagcacccggtgggttcatgagtaacaggttcgttgaaaccaaccttttcctggaggagatacagcccaaggaccccagactgaaagaattcctgccacagcctccaccactgttcctgccccctctgcagccccaggctacaggcagaagaaggcggcgtacccgaacacagcagcggacagccgcactgcttactgacgggaccacaaagacgggagccgcatggtcaagacgtccatctttgtgttggcctagcagaaccacaggtgccccaggggcaaagtag

SEQ ID NO: 284990 - DNA, 2343 bp, Artificial Sequence
  derived and/or modified sequence
atgtggttttttgctcgggatcccgtgcgtgactttcctttcgaacttataccagagccgccagaaggagggctgcccggtccgtgggccttgcacagaggacggaagaaggctactggatcacccgtctctatcttcgtctatgatgtcaagcctggcgcagaggagcagacgcaggtggctaaagcagctttcaaacgtttcaaaactctgaggcacccaaacatcctcgcttatatagacggcctagagacagaaaagtgtctgcacgtcgtgacagaggctgttactcctctgggcatttatctcaaggcaagagtggaggctggcggactgaaggagctggaaattagttggggcctgcaccagattgtgaaagccctgagctttctggtgaatgattgcagtctgatccataataatgtgtgcatggctgctgtgtttgtggatcgcgcaggggaatggaagttgggcggtttagactacatgtacagcgctcagggcaacggcggaggcccaccccgaaagggaatcccagaacttgaacaatatgatcctcccgagctggccgatagctctggacgggtagtaagagagaaatggagcgctgatatgtggcgcctgggatgtctcatttgggaagtctttaatggccctttgcccagagccgcagcacttagaaatcctggaaaaatcccgaaaacgctcgttccacattattgcgaacttgtcggagcgaatcccaaggttagacctaaccctgcaagattcctccagaattgccgggctcctgggggttttatgagcaaccggtttgtggagacgaacctcttcctggaagaaattcagatcaaagagccagctgaaaagcaaaaatttttccaggaactcagcaagtcactcgacgccttccctgaagatttttgtcgccacaaggtccttccccagctattgaccgcattcgagttcgggaacgcgggagcagttgtgttgacacccctgttcaaggtcgggaagtttctatcagcagaggagtaccaacagaagattattcctgtggttgtcaaaatgttcagttcaacagatcgcgctatgcgaatccgtctgctgcagcagatggagcagttcattcagtatctcgatgaacctacagtcaacacacagatctttccgcacgtggtgcacggtttcctggacaccaaccctgccatcagggaacaaaccgtgaagagcatgctgttgctggccccaaagctgaacgaagcaaatctcaatgtcgagctgatgaaacatttcgcacgcctgcaggcgaaggacgaacaaggaccgatcagatgtaacacaaccgtatgcctgggcaagattggctcctacctgtctgcatccaccaggcatagagtgttaaccagtgccttctcaagggccacccgtgacccattcgcaccctctcgcgttgcaggggtgctggggtttgcggcaacccataatctgtatagcatgaacgattgcgcccaaaaaattctgcccgtgctgtgcggactgacggtggatccagaaaaaagtgtcagagatcaggcttttaaagccattcggtctttcctgtctaaactcgagagtgtctctgaggaccccacgcagctcgaagaggtggagaaggacgtgcatgcagcctctagccccggaatgggcggagctgccgcttcctgggccggatgggccgtaaccggtgtgagcagcctgaccagcaagcttatacgcagccatcctacaacagcaccaacagagaccaacatccctcagaggccaactccagagggagtaccggctcctgccccaacccctgtgcctgcgacgccaaccacttctggccattgggagactcaagaagaggataaagacaccgccgaggattcctcaactgccgataggtgggacgatgaggactgggggagcttggaagaggcagagagcgtgcttgcccagcaggacgactggagcaccggcggacaagtgtctcgggcaagccaggtgagtaactcagatcataaatcgagtaaatctccagaatctgattggtcaagctgggaagcggagggctcctgggagcagggatggcaggagcctagttcccaggaacctccccctgacggaactagactcgccagcgagtacaactgggggggaccagagtctagcgacaaaggcgacccattcgccactttgtcagctcgcccaagcacccaggacaggtcgcgcctctcctggccaggccgatccgccagatcgggcggagggcgatggcggccaaacgcaccacgcggacgatggccccgagcgccttag

SEQ ID NO: 284991 - DNA, 1175 bp, Artificial Sequence
  derived and/or modified sequence
gaacccgcggcggcggtggggacgatgtggttctttgcccgggacccggtccgggactttccgttcgagctcatcccggagcccccagagggcggcctgcccgggccctgggccctgcaccgcggccgcaagaaggccacaggcagccccgtgtccatcttcgtctatgatgtgaagcctggcgcggaagagcagacccaggtggccaaagctgccttcaagcgcttcaaaactctacggcaccccaacatcctggcttacatcgatggactggagacagaaaaatgcctccacgtcgtgacagaggctgtgaccccgttgggaatatacctcaaggcgagagtggaggctggtggcctgaaggagctggagatctcctgggggctacaccagatcgtgaaagccctcagcttcctggtcaacgactgcagcctcatccacaacaatgtctgcatggccgccgtgttcgtggaccgagctggcgagtggaagcttgggggcctggactacatgtattcggcccagggcaacggtgggggacctccccgcaaggggatccccgagcttgagcagtatgaccccccggagttggctgacagcagtggcagagtggtcagagagaagtggtcagcagacatgtggcgcttgggctgcctcatttgggaagtcttcaatgggcccctacctcgggcagcagccctacgcaaccctgggaagatccccaaaacgctggtgccccattactgtgagctggtgggagcaaaccccaaggtgcgtcccaacccagcccgcttcctgcagaactgccgggcacctggtggcttcatgagcaaccgctttgtagaaaccaacctcttcctggaggagattcagcccaaagacccacgcctgaaggagttcctgccccagcccccacccctgttcctgccacccctacaacctcaggccactgggagacgcaggaggaggacaaggacacagcagaggacagcagcactgctgacagatgggacgacgaagactggggcagcctggagcaggaggccgagtctgtgctggcccagcaggacgactggagcaccgggggccaagtgagccgtgctagtcaggtcagcaactccgaccacaaatcctccaaatccccagagtccgactggagcagctgggaagctgag

SEQ ID NO: 284992 - DNA, 2584 bp, Artificial Sequence
  derived and/or modified sequence
ctctccgccccgccccggctcgggcggccggaggacccggagctaaggcgcccgaacccgcggcggcggtggggacgatgtggttctttgcccgggacccggtccgggactttccgttcgagctcatcccggagcccccagagggcggcctgcccgggccctgggccctgcaccgcggccgcaagaaggccacaggcagccccgtgtccatcttcgtctatgatgtgaagcctggcgcggaagagcagacccaggtggccaaagctgccttcaagcgcttcaaaactctacggcaccccaacatcctggcttacatcgatggactggagacagaaaaatgcctccacgtcgtgacagaggctgtgaccccgttgggaatatacctcaaggcgagagtggaggctggtggcctgaaggagctggagatctcctgggggctacaccagatcgtgaaagccctcagcttcctggtcaacgactgcagcctcatccacaacaatgtctgcatggccgccgtgttcgtggaccgagctggcgagtggaagcttgggggcctggactacatgtattcggcccagggcaacggtgggggacctccccgcaaggggatccccgagcttgagcagtatgaccccccggagttggctgacagcagtggcagagtggtcagagagaagtggtcagcagacatgtggcgcttgggctgcctcatttgggaagtcttcaatgggcccctacctcgggcagcagccctacgcaaccctgggaagatccccaaaacgctggtgccccattactgtgagctggtgggagcaaaccccaaggtgcgtcccaacccagcccgcttcctgcagaactgccgggcacctggtggcttcatgagcaaccgctttgtagaaaccaacctcttcctggaggagattcagatcaaagagccagccgagaagcaaaaattcttccaggagctgagcaagagcctggacgcattccctgaggatttctgtcggcacaaggtgctgccccagctgctgaccgccttcgagttcggcaatgctggggccgttgtcctcacgcccctcttcaaggtgggcaagttcctgagcgctgaggagtatcagcagaagatcatccctgtggtggtcaagatgttctcatccactgaccgggccatgcgcatccgcctcctgcagcagatggagcagttcatccagtaccttgacgagccaacagtcaacacccagatcttcccccacgtcgtacatggcttcctggacaccaaccctgccatccgggagcagacggtcaagtccatgctgctcctggccccaaagctgaacgaggccaacctcaatgtggagctgatgaagcactttgcacggctacaggccaaggatgaacagggccccatccgctgcaacaccacagtctgcctgggcaaaatcggctcctacctcagtgctagcaccagacacagggtccttacctctgccttcagccgagccactagggacccgtttgcaccgtcccgggttgcgggtgtcctgggctttgctgccacccacaacctctactcaatgaacgactgtgcccagaagatcctgcctgtgctctgcggtctcactgtagatcctgagaaatccgtgcgagaccaggccttcaaggccattcggagcttcctgtccaaattggagtctgtgtcggaggacccgacccagctggaggaagtggagaaggatgtccatgcagcctccagccctggcatgggaggagccgcagctagctgggcaggctgggccgtgaccggggtctcctcactcacctccaagctgatccgttcgcacccaaccactgccccaacagaaaccaacattccccaaagacccacgcctgaaggagttcctgccccagcccccacccctgttcctgccacccctacaacctcaggccactgggagacgcaggaggaggacaaggacacagcagaggacagcagcactgctgacagatgggacgacgaagactggggcagcctggaggaggccgagtctgtgctggcccagcaggacgactggagcaccgggggccaagtgagccgtgctagtcaggtcagcaactccgaccacaaatcctccaaatccccagagtccgactggagcagctgggaagctgagggctcctgggaacagggctggcaggagccaagctcccaggagccacctcctgacggtacacggctggccagcgagtataactggggtggcccagagtccagcgacaagggcgaccccttcgctaccctgtctgcacgtcccagcacccaggacaggtcaaggctgagctggcccggaagaagcgcgaggagcggcggcgggagatggaggccaaacgcgccgagaggaaggtggccaagggccccatgaagctgggagcccggaagctggactgaaccgtggcggtggcccttcccggctgcggagagcccgccccacagatgtatttattgtacaaaccatgtgagcccggccggcccagccaggccatctcacgtgtacataatcagagccacaataaattctatttcaca

SEQ ID NO: 284993 - DNA, 1071 bp, Artificial Sequence
  derived and/or modified sequence
atgtggttcttcgccagagaccccgtgagagacttccccttcgagctgatccccgagccccccgagggcggcctgcccggcccctgggccctgcacagaggcagaaagaaggccaccggcagccccgtgagcatcttcgtgtacgacgtgaagcccggcgccgaggagcagacccaggtggccaaggccgccttcaagagattcaagaccctgagacaccccaacatcctggcctacatcgacggcctggagaccgagaagtgcctgcacgtggtgaccgaggccgtgacccccctgggcatctacctgaaggccagagtggaggccggcggcctgaaggagctggagatcagctggggcctgcaccagatcgtgaaggccctgagcttcctggtgaacgactgcagcctgatccacaacaacgtgtgcatggccgccgtgttcgtggacagagccggcgagtggaagctgggcggcctggactacatgtacagcgcccagggcaacggcggcggcccccccagaaagggcatccccgagctggagcagtacgacccccccgagctggccgacagcagcggcagagtggtgagagagaagtggagcgccgacatgtggagactgggctgcctgatctgggaggtgttcaacggccccctgcccagagccgccgccctgagaaaccccggcaagatccccaagaccctggtgccccactactgcgagctggtgggcgccaaccccaaggtgagacccaaccccgccagattcctgcagaactgcagagcccccggcggcttcatgagcaacagattcgtggagaccaacctgttcctggaggagatccagcccaaggaccccagactgaaggagttcctgccccagcccccccccctgttcctgccccccctgcagccccaggccaccggcagaagaagaagaagaaccagaacccagcagagaaccgccgccctgctgaccgacggcaccaccaagaccggcgccgcctggagcagaagacccagcctgtgctggcccagcagaaccaccggcgcccccggcgccaagtag

SEQ ID NO: 284994 - DNA, 2343 bp, Artificial Sequence
  derived and/or modified sequence
atgtggttcttcgccagagaccccgtgagagacttccccttcgagctgatccccgagccccccgagggcggcctgcccggcccctgggccctgcacagaggcagaaagaaggccaccggcagccccgtgagcatcttcgtgtacgacgtgaagcccggcgccgaggagcagacccaggtggccaaggccgccttcaagagattcaagaccctgagacaccccaacatcctggcctacatcgacggcctggagaccgagaagtgcctgcacgtggtgaccgaggccgtgacccccctgggcatctacctgaaggccagagtggaggccggcggcctgaaggagctggagatcagctggggcctgcaccagatcgtgaaggccctgagcttcctggtgaacgactgcagcctgatccacaacaacgtgtgcatggccgccgtgttcgtggacagagccggcgagtggaagctgggcggcctggactacatgtacagcgcccagggcaacggcggcggcccccccagaaagggcatccccgagctggagcagtacgacccccccgagctggccgacagcagcggcagagtggtgagagagaagtggagcgccgacatgtggagactgggctgcctgatctgggaggtgttcaacggccccctgcccagagccgccgccctgagaaaccccggcaagatccccaagaccctggtgccccactactgcgagctggtgggcgccaaccccaaggtgagacccaaccccgccagattcctgcagaactgcagagcccccggcggcttcatgagcaacagattcgtggagaccaacctgttcctggaggagatccagatcaaggagcccgccgagaagcagaagttcttccaggagctgagcaagagcctggacgccttccccgaggacttctgcagacacaaggtgctgccccagctgctgaccgccttcgagttcggcaacgccggcgccgtggtgctgacccccctgttcaaggtgggcaagttcctgagcgccgaggagtaccagcagaagatcatccccgtggtggtgaagatgttcagcagcaccgacagagccatgagaatcagactgctgcagcagatggagcagttcatccagtacctggacgagcccaccgtgaacacccagatcttcccccacgtggtgcacggcttcctggacaccaaccccgccatcagagagcagaccgtgaagagcatgctgctgctggcccccaagctgaacgaggccaacctgaacgtggagctgatgaagcacttcgccagactgcaggccaaggacgagcagggccccatcagatgcaacaccaccgtgtgcctgggcaagatcggcagctacctgagcgccagcaccagacacagagtgctgaccagcgccttcagcagagccaccagagaccccttcgcccccagcagagtggccggcgtgctgggcttcgccgccacccacaacctgtacagcatgaacgactgcgcccagaagatcctgcccgtgctgtgcggcctgaccgtggaccccgagaagagcgtgagagaccaggccttcaaggccatcagaagcttcctgagcaagctggagagcgtgagcgaggaccccacccagctggaggaggtggagaaggacgtgcacgccgccagcagccccggcatgggcggcgccgccgccagctgggccggctgggccgtgaccggcgtgagcagcctgaccagcaagctgatcagaagccaccccaccaccgcccccaccgagaccaacatcccccagagacccacccccgagggcgtgcccgcccccgcccccacccccgtgcccgccacccccaccaccagcggccactgggagacccaggaggaggacaaggacaccgccgaggacagcagcaccgccgacagatgggacgacgaggactggggcagcctggaggaggccgagagcgtgctggcccagcaggacgactggagcaccggcggccaggtgagcagagccagccaggtgagcaacagcgaccacaagagcagcaagagccccgagagcgactggagcagctgggaggccgagggcagctgggagcagggctggcaggagcccagcagccaggagcccccccccgacggcaccagactggccagcgagtacaactggggcggccccgagagcagcgacaagggcgaccccttcgccaccctgagcgccagacccagcacccaggacagaagcagactgagctggcccggcagaagcgccagaagcggcggcggcagatggagacccaacgcccccagaggcagatggcccagagccccctag

SEQ ID NO: 284995 - DNA, 1806 bp, Artificial Sequence
  derived and/or modified sequence
cggccaggtacgggccgacgggcccgcggggccggcgccgccatggcggccgtgtttgatttggatttggagacggaggaaggcagcgagggcgagggcgagccagagctcagccccgcggacgcatgtccccttgccgagttgagggcagctggcctagagcctgtgggacactatgaagaggtggagctgactgagaccagcgtgaacgttggcccagagcgcatcgggccccactgctttgagctgctgcgtgtgctgggcaaggggggctatggcaaggtgttccaggtgcgaaaggtgcaaggcaccaacttgggcaaaatatatgccatgaaagtcctaaggaaggccaaaattgtgcgcaatgccaaggacacagcacacacacgggctgagcggaacattctagagtcagtgaagcacccctttattgtggaactggcctatgccttccagactggtggcaaactctacctcatccttgagtgcctcagtgtagactgagcgtcctgagggcagtggctgggtctcttcatcctgtccccagcttcacccagcacagggccaggcaccgagtaggcgtcggtagatgtttgctgaattgaattgaatccccacggcagctctgtgaggcaggtggcgagctcttcacgcatctggagcgagagggcatcttcctggaagatacggcctgcttctacctggctgagatcacgctggccctgggccatctccactcccagggcatcatctaccgggacctcaagcccgagaacatcatgctcagcagccagggccacatcaaactgaccgactttggactctgcaaggagtctatccatgagggcgccgtcactcacaccttctgcggcaccattgagtacatggcccctgagattctggtgcgcagtggccacaaccgggctgtggactggtggagcctgggggccctgatgtacgacatgctcactggatcgccgcccttcaccgcagagaaccggaagaaaaccatggataagatcatcaggggcaagctggcactgcccccctacctcaccccagatgcccgggaccttgtcaaaaagtttctgaaacggaatcccagccagcggattgggggtggcccaggggatgctgctgatgtgcagagacatccctttttccggcacatgaattgggacgaccttctggcctggcgtgtggacccccctttcaggccctgtctgcagtcagaggaggacgtgagccagtttgatacccgcttcacacggcagacgccggtggacagtcctgatgacacagccctcagcgagagtgccaaccaggccttcctgggcttcacatacgtggcgccgtctgtcctggacagcatcaaggagggcttctccttccagcccaagctgcgctcacccaggcgcctcaacagtagcccccgggcccccgtcagccccctcaagttctccccttttgaggggtttcggcccagccccagcctgccggagcccacggagctacctctacctccactcctgccaccgccgccgccctcgaccaccgcccctctccccatccgtcccccctcagggaccaagaagtccaagaggggccgtgggcgtccagggcgctaggaagccgggtgggggtgagggtagcccttgagccctgtccctgcggctgtgagagcagcaggaccctgggccagttccagagacctgggggtgtgtctgggggtggggtgtgagtgcgtatgaaagtgtgtgtctgctggggcagctgtgcccctgaatcatgggcacggagggc

SEQ ID NO: 284996 - protein, 248 aa, Artificial Sequence
  derived and/or modified sequence
MTSQPVPNETIIVLPSNVINFSQAEKPEPTNQGQDSLKKHLHAEIKVIGTIQILCGMMVLSLGIILASASFSPNFTQVTSTLLNSAYPFIGPFFFIISGSLSIATEKRLTKLLVHSSLVGSILSALSALVGFIILSVKQATLNPASLQCELDKNNIPTRSYVSYFYHDSLYTTDCYTAKASLAGTLSLMLICTLLEFCLAVLTAVLRWKQAYSDFPGSVLFLPHSYIGNSGMSSKMTHDCGYEELLTS

SEQ ID NO: 284997 - protein, 276 aa, Artificial Sequence
  derived and/or modified sequence
MVLLKLLEVYRKGSAGTFHKSTIFGNTIMTSQPVPNETIIVLPSNVINFSQAEKPEPTNQGQDSLKKHLHAEIKVIGTIQILCGMMVLSLGIILASASFSPNFTQVTSTLLNSAYPFIGPFFFIISGSLSIATEKRLTKLLVHSSLVGSILSALSALVGFIILSVKQATLNPASLQCELDKNNIPTRSYVSYFYHDSLYTTDCYTAKASLAGTLSLMLICTLLEFCLAVLTAVLRWKQAYSDFPGSVLFLPHSYIGNSGMSSKMTHDCGYEELLTS

SEQ ID NO: 284998 - DNA, 831 bp, Artificial Sequence
  derived and/or modified sequence
atggtgctcctcaagttgctcgaggtctaccggaagggaagcgccggcacattccacaagtccactatcttcggaaatacaattatgactagccagcccgtgcccaacgaaactattatcgtactgccatccaacgttataaactttagccaagccgaaaagcctgaacccacgaaccaggggcaggacagcctgaaaaagcaccttcacgctgagatcaaggtcatcggcaccattcagattttgtgcggcatgatggtcctttcattgggtatcatcctcgcttctgcttctttcagcccgaacttcactcaggttacttccaccctgctgaattctgcgtacccctttatcggtccattcttcttcatcatatcagggtcattgtcaatcgcaaccgaaaagaggctgaccaaattgttagttcattcttcacttgtcggtagtattttatcggcactctccgcattagtgggctttatcatcttgagcgttaagcaggcgacccttaatcctgcctcgctccagtgtgagctggacaagaacaacatcccaaccaggagttacgtaagctatttctaccacgacagcctgtacaccaccgattgttataccgccaaggctagtctcgcaggaaccctgtctttgatgctcatttgtaccttgcttgaattttgtctggctgtattgactgccgttctccggtggaaacaagcatatagcgatttcccaggcagtgtgttgttcctccctcattcctacatcggtaacagcgggatgtcctctaagatgacacatgattgtggatacgaggagttactgacctcatag

SEQ ID NO: 284999 - DNA, 831 bp, Artificial Sequence
  derived and/or modified sequence
atggtgctgctgaagctgctggaggtgtacaggaagggcagcgctggcaccttccacaagagcaccatcttcggcaacaccatcatgaccagccagcctgtgcccaatgagaccatcatcgtgctgcccagcaatgtcatcaacttcagccaggccgagaagccagagcccaccaaccagggccaggacagcctgaagaagcacctgcatgctgagatcaaggtgattggcaccatccagatcctgtgtggcatgatggtgctgagcctgggcatcatcctggccagcgccagcttcagccccaacttcacccaggtgaccagcaccctgctgaacagcgcctaccccttcatcggccccttcttcttcatcatcagcggcagcctgagcatcgccacagagaagaggctgaccaagctgctggtgcacagcagcctggtgggcagcatcctgagcgccctgagcgccctggtgggcttcatcatcctgtctgtgaagcaggccaccctgaacccagccagcctgcagtgtgagctggacaagaacaacatccccaccaggagctatgtgtcctacttctaccatgacagcctgtacaccacagactgctacacagccaaggccagcctggccggcaccctgagcctgatgctgatctgcaccctgctggagttctgcctggccgtgctgacagctgtgctgcgctggaagcaggcctacagcgacttccctggctctgtgctcttcctgccccacagctacatcggcaacagcggcatgagcagcaagatgacccatgactgtggctatgaggagctgctgaccagctag

SEQ ID NO: 285000 - DNA, 1535 bp, Artificial Sequence
  derived and/or modified sequence
ttttactgaagttgctagaagtttacagaaaaggaagtgcaggaacatttcacaaatctacaatctgtgagtatcacatcctgtatagctgtaaacactggaataaggaagggctgatgactttcagaagatgaaggtaagtagaaaccgttgatgggactgagaaaccagagttaaaacctctttggagcttctgaggactcagctggaaccaacgggcacagttggcaacaccatcatgacatcacaacctgttcccaatgagaccatcatagtgctcccatcaaatgtcatcaacttctcccaagcagagaaacccgaacccaccaaccaggggcaggatagcctgaagaaacatctacacgcagaaatcaaagttattgggactatccagatcttgtgtggcatgatggtattgagcttggggatcattttggcatctgcttccttctctccaaattttacccaagtgacttctacactgttgaactctgcttacccattcataggaccctttttttttatcatctctggctctctatcaatcgccacagagaaaaggttaaccaagcttttggtgcatagcagcctggttggaagcattctgagtgctctgtctgccctggtgggtttcattatcctgtctgtcaaacaggccaccttaaatcctgcctcactgcagtgtgagttggacaaaaataatataccaacaagaagttatgtttcttacttttatcatgattcactttataccacggactgctatacagccaaagccagtctggctggaactctctctctgatgctgatttgcactctgctggaattctgcctagctgtgctcactgctgtgctgcggtggaaacaggcttactctgacttccctgggagtgtacttttcctgcctcacagttacattggtaattctggcatgtcctcaaaaatgactcatgactgtggatatgaagaactattgacttcttaagaaaaaagggagaaatattaatcagaaagttgattcttatgataatatggaaaagttaaccattatagaaaagcaaagcttgagtttcctaaatgtaagcttttaaagtaatgaacattaaaaaaaaccattatttcactgtcatttaagatatgtgttcattggggatctcttgatttgcctgacattgacttcagcaaaagcacggggctgtaaattaccatttactagattagccaaatagtctgaatttccagaaaacaaggcagaatgatcattcccagaaacatttcccagaaaatgtttcccagaaaactagacagaatgatcattcaatggatcacagtgaagcaaaggacacaactttttattgtaccccttaattgtcaacaggagttaactgatttgttgtggtgctcagacttttttatacaggtgctagtgttttatcctatgtattttaactcattagtgcataaaggcaagccccatataatgaagtctcagggtatatgaaagtagctggcttcaaaataaaatttttgagtgc

SEQ ID NO: 285001 - DNA, 1160 bp, Artificial Sequence
  derived and/or modified sequence
gtgttgtctcacataatccttaaaactcagaaatgattttaaattaaatagcacagagaggaaaactgactggagagggagcctttgcttagattagaaaactgaagcttcaagaacagacttgcctaacaacaggaaacttgtatgtctcgaagtggcaattcacacataaggctccatgactcctgaactctcacaaatattagttggctcttttcatggttttactgaagttgctagaagtttacagaaaaggaagtgcaggaacatttcacaaatctacaatctttggcaacaccatcatgacatcacaacctgttcccaatgagaccatcatagtgctcccatcaaatgtcatcaacttctcccaagcagagaaacccgaacccaccaaccaggggcaggatagcctgaagaaacatctacacgcagaaatcaaagttattgggactatccagatcttgtgtggcatgatggtattgagcttggggatcattttggcatctgcttccttctctccaaattttacccaagtgacttctacactgttgaactctgcttacccattcataggaccctttttttttatcatctctggctctctatcaatcgccacagagaaaaggttaaccaagcttttggtgcatagcagcctggttggaagcattctgagtgctctgtctgccctggtgggtttcattatcctgtctgtcaaacaggccaccttaaatcctgcctcactgcagtgtgagttggacaaaaataatataccaacaagaagttatgtttcttacttttatcatgattcactttataccacggactgctatacagccaaagccagtctggctggaactctctctctgatgctgatttgcactctgctggaattctgcctagctgtgctcactgctgtgctgcggtggaaacaggcttactctgacttccctgggagtgtacttttcctgcctcacagttacattggtaattctggcatgtcctcaaaaatgactcatgactgtggatatgaagaactattgacttcttaagaaaaaagggagaaatattaatcagaaagttgattcttatgataatatggaaaagttaaccattatagaaaagcaaagcttgagtttcctaaatgtaagcttttaaagtaa

SEQ ID NO: 285002 - DNA, 1383 bp, Artificial Sequence
  derived and/or modified sequence
attccgaagggttctgtgctaggaaccttacacgtgttgtctcacataatccttaaaactcagaaatgattttaaattaaatagcacagagaggaaaactgactggagagggagcctttgcttagattagaaaactgaagcttcaagaacagacttgcctaacaacaggaaacttgtatgtctcgaagtggcaattcacacataaggctccatgactcctgaactctcacaaatattagttggctcttttcatggttttactgaagttgctagaagtttacagaaaaggaagtgcaggaacatttcacaaatctacaatctgtgagtatcacatcctgtatagctgtaaacactggaataaggaagggctgatgactttcagaagatgaaggtaagtagaaaccgttgatgggactgagaaaccagagttaaaacctctttggagcttctgaggactcagctggaaccaacgggcacagttggcaacaccatcatgacatcacaacctgttcccaatgagaccatcatagtgctcccatcaaatgtcatcaacttctcccaagcagagaaacccgaacccaccaaccaggggcaggatagcctgaagaaacatctacacgcagaaatcaaagttattgggactatccagatcttgtgtggcatgatggtattgagcttggggatcattttggcatctgcttccttctctccaaattttacccaagtgacttctacactgttgaactctgcttacccattcataggaccctttttttttatcatctctggctctctatcaatcgccacagagaaaaggttaaccaagcttttggtgcatagcagcctggttggaagcattctgagtgctctgtctgccctggtgggtttcattatcctgtctgtcaaacaggccaccttaaatcctgcctcactgcagtgtgagttggacaaaaataatataccaacaagaagttatgtttcttacttttatcatgattcactttataccacggactgctatacagccaaagccagtctggctggaactctctctctgatgctgatttgcactctgctggaattctgcctagctgtgctcactgctgtgctgcggtggaaacaggcttactctgacttccctgggagtgtacttttcctgcctcacagttacattggtaattctggcatgtcctcaaaaatgactcatgactgtggatatgaagaactattgacttcttaagaaaaaagggagaaatattaatcagaaagttgattcttatgataatatggaaaagttaaccattatagaaaagcaaagcttgagtttcctaaatgtaagcttttaaagtaatgaacattaaaaaaaaccattatttcactgtc

SEQ ID NO: 285003 - DNA, 831 bp, Artificial Sequence
  derived and/or modified sequence
atggtgctgctgaagctgctggaggtgtaccggaagggcagcgccggcacctttcacaagtcaaccattttcggaaataccatcatgacctcacagcccgttcctaatgagaccataatcgtcttgccaagcaatgtaatcaacttctctcaggctgaaaagcctgaaccaactaatcagggtcaggacagtctgaagaaacacctccatgctgaaatcaaagtgattggcactatccagatcctctgcgggatgatggtgctcagcttaggaatcatactggcgagcgcgagcttcagccctaacttcacccaggtgacctccactcttctcaactccgcgtacccattcatcggcccatttttcttcattatctccggttccctcagcatcgctacagagaaaaggctcacaaagctgctggtgcactcttcacttgtcggatcgattttatccgccctttcagccctggtgggtttcattatcctgagtgtaaaacaggcaaccttgaacccggccagtctccagtgtgaattagacaagaataatattccaacccgttcttacgtgagctatttttaccatgacagcttgtataccacagactgctatactgcaaaagcatcactggcaggcaccctgagccttatgctcatctgcaccctcctcgaattctgcctggcagtattgaccgcagtactgagatggaagcaggcttactctgacttccccggttctgtgctgttcctaccgcattcttacatcggcaatagcgggatgagcagtaaaatgactcacgattgcggatacgaagagctcttgactagctag

SEQ ID NO: 285004 - DNA, 831 bp, Artificial Sequence
  derived and/or modified sequence
atggtgctgctgaagttgctcgaggtgtaccgaaaaggctctgccggaacatttcacaagtctaccatattcggaaacaccattatgaccagccagccagtccctaatgagactatcatcgttctcccctctaatgtgatcaatttcagtcaggcagaaaagcccgaaccaaccaaccagggacaagatagcctgaaaaaacacttacatgctgaaattaaagtcatcggcaccatacagatcctgtgcggaatgatggtcctgtctcttggcattatcttggcaagtgccagcttctcccctaacttcacgcaagtgactagcacactgttaaatagtgcttatcctttcattgggcctttctttttcattattagtggctcactcagcatcgctaccgaaaagagattgaccaagctgctagtgcactcgtcactggtggggtccattctttcagccctgtcagccctggtgggctttatcatactgtccgtgaagcaggcgaccttgaatcccgctagcctgcaatgcgagctggacaagaataacattcccactaggtcatacgtgtcttacttctatcacgatagtctctacactactgattgttacacagcaaaagcatctctagccggtacactgtcacttatgcttatttgcactctgctggagttttgcttagccgtactcactgctgtgctccgatggaaacaggcctattccgactttcctgggtcagtactgtttttgccacactcatacattggaaactctggcatgtcctccaagatgacccatgattgtggctacgaggagctgctcacgtcctag

SEQ ID NO: 285005 - DNA, 831 bp, Artificial Sequence
  derived and/or modified sequence
atggtgctgctgaagctgctggaggtgtacagaaagggcagcgccggcaccttccacaagagcaccatcttcggcaacaccatcatgaccagccagcccgtgcccaacgagaccatcatcgtgctgcccagcaacgtgatcaacttcagccaggccgagaagcccgagcccaccaaccagggccaggacagcctgaagaagcacctgcacgccgagatcaaggtgatcggcaccatccagatcctgtgcggcatgatggtgctgagcctgggcatcatcctggccagcgccagcttcagccccaacttcacccaggtgaccagcaccctgctgaacagcgcctaccccttcatcggccccttcttcttcatcatcagcggcagcctgagcatcgccaccgagaagagactgaccaagctgctggtgcacagcagcctggtgggcagcatcctgagcgccctgagcgccctggtgggcttcatcatcctgagcgtgaagcaggccaccctgaaccccgccagcctgcagtgcgagctggacaagaacaacatccccaccagaagctacgtgagctacttctaccacgacagcctgtacaccaccgactgctacaccgccaaggccagcctggccggcaccctgagcctgatgctgatctgcaccctgctggagttctgcctggccgtgctgaccgccgtgctgagatggaagcaggcctacagcgacttccccggcagcgtgctgttcctgccccacagctacatcggcaacagcggcatgagcagcaagatgacccacgactgcggctacgaggagctgctgaccagctag

SEQ ID NO: 285006 - protein, 2390 aa, Artificial Sequence
  derived and/or modified sequence
MSSTLSPTDFDSLEIQGQYSDINNRWDLPDSDWDNDSSSARLFERSRIKALADEREAVQKKTFTKWVNSHLARVTCRVGDLYSDLRDGRNLLRLLEVLSGEILPKPTKGRMRIHCLENVDKALQFLKEQKVHLENMGSHDIVDGNHRLTLGLVWTIILRFQIQDISVETEDNKEKKSAKDALLLWCQMKTAGYPNVNVHNFTTSWRDGLAFNAIVHKHRPDLLDFESLKKCNAHYNLQNAFNLAEKELGLTKLLDPEDVNVDQPDEKSIITYVATYYHYFSKMKALAVEGKRIGKVLDHAMEAERLVEKYESLASELLQWIEQTIVTLNDRQLANSLSGVQNQLQSFNSYRTVEKPPKFTEKGNLEVLLFTIQSKLRANNQKVYTPREGRLISDINKAWERLEKAEHERELALRTELIRQEKLEQLAARFDRKAAMRETWLSENQRLVSQDNFGLELAAVEAAVRKHEAIETDIVAYSGRVQAVDAVAAELAAERYHDIKRIAARQHNVARLWDFLRQMVAARRERLLLNLELQKVFQDLLYLMDWMEEMKGRLQSQDLGRHLAGVEDLLQLHELVEADIAVQAERVRAVSASALRFCNPGKEYRPCDPQLVSERVAKLEQSYEALCELAAARRARLEESRRLWRFLWEVGEAEAWVREQQHLLASADTGRDLTGALRLLNKHTALRGEMSGRLGPLKLTLEQGQQLVAEGHPGASQASARAAELQAQWERLEALAEERAQRLAQAASLYQFQADANDMEAWLVDALRLVSSPELGHDEFSTQALARQHRALEEEIRSHRPTLDALREQAAALPPTLSRTPEVQSRVPTLERHYEELQARAGERARALEAALALYTMLSEAGACGLWVEEKEQWLNGLALPERLEDLEVVQQRFETLEPEMNTLAAQITAVNDIAEQLLKANPPGKDRIVNTQEQLNHRWQQFRRLADGKKAALTSALSIQNYHLECTETQAWMREKTKVIESTQGLGNDLAGVLALQRKLAGTERDLEAIAARVGELTREANALAAGHPAQAVAINARLREVQTGWEDLRATMRRREESLGEARRLQDFLRSLDDFQAWLGRTQTAVASEEGPATLPEAEALLAQHAALRGEVERAQSEYSRLRALGEEVTRDQADPQCLFLRQRLEALGTGWEELGRMWESRQGRLAQAHGFQGFLRDARQAEGVLSSQEYVLSHTEMPGTLQAADAAIKKLEDFMSTMDANGERIHGLLEAGRQLVSEGNIHADKIREKADSIERRHKKNQDAAQQFLGRLRDNREQQHFLQDCHELKLWIDEKMLTAQDVSYDEARNLHTKWQKHQAFMAELAANKDWLDKVDKEGRELTLEKPELKALVSEKLRDLHRRWDELETTTQAKARSLFDANRAELFAQSCCALESWLESLQAQLHSDDYGKDLTSVNILLKKQQMLEWEMAVREKEVEAIQAQAKALAQEDQGAGEVERTSRAVEEKFRALCQPMRERCRRLQASREQHQFHRDVEDEILWVTERLPMASSMEHGKDLPSVQLLMKKNQTLQKEIQGHEPRIADLRERQRALGAAAAGPELAELQEMWKRLGHELELRGKRLEDALRAQQFYRDAAEAEAWMGEQELHMMGQEKAKDELSAQAEVKKHQVLEQALADYAQTIHQLAASSQDMIDHEHPESTRISIRQAQVDKLYAGLKELAGERRERLQEHLRLCQLRRELDDLEQWIQEREVVAASHELGQDYEHVTMLRDKFREFSRDTSTIGQERVDSANALANGLIAGGHAARATVAEWKDSLNEAWADLLELLDTRGQVLAAAYELQRFLHGARQALARVQHKQQQLPDGTGRDLNAAEALQRRHCAYEHDIQALSPQVQQVQDDGHRLQKAYAGDKAEEIGRHMQAVAEAWAQLQGSSAARRQLLLDTTDKFRFFKAVRELMLWMDEVNLQMDAQERPRDVSSADLVIKNQQGIKAEIEARADRFSSCIDMGKELLARSHYAAEEISEKLSQLQARRQETAEKWQEKMDWLQLVLEVLVFGRDAGMAEAWLCSQEPLVRSAELGCTVDEVESLIKRHEAFQKSAVAWEERFCALEKLTALEEREKERKRKREEEERRKQPPAPEPTASVPPGDLVGGQTASDTTWDGTQPRPPPSTQAPSVNGVCTDGEPSQPLLGQQRLEHSSFPEGPGPGSGDEANGPRGERQTRTRGPAPSAMPQSRSTESAHAATLPPRGPEPSAQEQMEGMLCRKQEMEAFGKKAANRSWQNVYCVLRRGSLGFYKDAKAASAGVPYHGEVPVSLARAQGSVAFDYRKRKHVFKLGLQDGKEYLFQAKDEAEMSSWLRVVNAAIATASSASGEPEEPVVPSTTRGMTRAMTMPPVSPVGAEGPVVLRSKDGREREREKRFSFFKKNK

SEQ ID NO: 285007 - protein, 934 aa, Artificial Sequence
  derived and/or modified sequence
MSSTLSPTDFDSLEIQGQYSDINNRWDLPDSDWDNDSSSARLFERSRIKALADEREAVQKKTFTKWVNSHLARVTCRVGDLYSDLRDGRNLLRLLEVLSGEILPKPTKGRMRIHCLENVDKALQFLKEQKVHLENMGSHDIVDGNHRLTLGLVWTIILRFQIQDISVETEDNKEKKSAKDALLLWCQMKTAGYPNVNVHNFTTSWRDGLAFNAIVHKHRPDLLDFESLKKCNAHYNLQNAFNLAEKELGLTKLLDPEDVNVDQPDEKSIITYVATYYHYFSKMKALAVEGKRIGKVLDHAMEAERLVEKYESLASELLQWIEQTIVTLNDRQLANSLSGVQNQLQSFNSYRTVEKPPKFTEKGNLEVLLFTIQSKLRANNQKVYTPREGRLISDINKAWERLEKAEHERELALRTELIRQEKLEQLAARFDRKAAMRETWLSENQRLVSQDNFGLELAAVEAAVRKHEAIETDIVAYSGRVQAVDAVAAELAAERYHDIKRIAARQHNVARLWDFLRQMVAARRERLLLNLELQKVFQDLLYLMDWMEEMKGRLQSQDLGRHLAGVEDLLQLHELVEADIAVQAERVRAVSASALRFCNPGKEYRPCDPQLVSERVAKLTALEEREKERKRKREEEERRKQPPAPEPTASVPPGDLVGGQTASDTTWDGTQPRPPPSTQAPSVNGVCTDGEPSQPLLGQQRLEHSSFPEGPGPGSGDEANGPRGERQTRTRGPAPSAMPQSRSTESAHAATLPPRGPEPSAQEQMEGMLCRKQEMEAFGKKAANRSWQNVYCVLRRGSLGFYKDAKAASAGVPYHGEVPVSLARAQGSVAFDYRKRKHVFKLGLQDGKEYLFQAKDEAEMSSWLRVVNAAIATASSASGEPEEPVVPSTTRGMTRAMTMPPVSPVGAEGPVVLRSKDGREREREKRFSFFKKNK

SEQ ID NO: 285008 - protein, 117 aa, Artificial Sequence
  derived and/or modified sequence
MSSTLSPTDFDSLEIQGQYSDINNRWDLPDSDWDNDSSSARLFERSRIKALADEREAVQKKTFTKWVNSHLARVTCRVGDLYSDLRDGRNLLRLLEVLSGEILPKPTKGRMRIHCLE

SEQ ID NO: 285009 - protein, 2365 aa, Artificial Sequence
  derived and/or modified sequence
MSSTLSPTDFDSLEIQGQYSDINNRWDLPDSDWDNDSSSARLFERSRIKALADEREAVQKKTFTKWVNSHLARVTCRVGDLYSDLRDGRNLLRLLEVLSGEILPKPTKGRMRIHCLENVDKALQFLKEQKVHLENMGSHDIVDGNHRLTLGLVWTIILRFQIQDISVETEDNKEKKSAKDALLLWCQMKTAGYPNVNVHNFTTSWRDGLAFNAIVHKHRPDLLDFESLKKCNAHYNLQNAFNLAEKELGLTKLLDPEDVNVDQPDEKSIITYVATYYHYFSKMKALAVEGKRIGKVLDHAMEAERLVEKYESLASELLQWIEQTIVTLNDRQLANSLSGVQNQLQSFNSYRTVEKPPKFTEKGNLEVLLFTIQSKLRANNQKVYTPREGRLISDINKAWERLEKAEHERELALRTELIRQEKLEQLAARFDRKAAMRETWLSENQRLVSQDNFGLELAAVEAAVRKHEAIETDIVAYSGRVQAVDAVAAELAAERYHDIKRIAARQHNVARLWDFLRQMVAARRERLLLNLELQKVFQDLLYLMDWMEEMKGRLQSQDLGRHLAGVEDLLQLHELVEADIAVQAERVRAVSASALRFCNPGKEYRPCDPQLVSERVAKLEQSYEALCELAAARRARLEESRRLWRFLWEVGEAEAWVREQQHLLASADTGRDLTGALRLLNKHTALRGEMSGRLGPLKLTLEQGQQLVAEGHPGASQASARAAELQAQWERLEALAEERAQRLAQAASLYQFQADANDMEAWLVDALRLVSSPELGHDEFSTQALARQHRALEEEIRSHRPTLDALREQAAALPPTLSRTPEVQSRVPTLERHYEELQARAGERARALEAALALYTMLSEAGACGLWVEEKEQWLNGLALPERLEDLEVVQQRFETLEPEMNTLAAQITAVNDIAEQLLKANPPGKDRIVNTQEQLNHRWQQFRRLADGKKAALTSALSIQNYHLECTETQAWMREKTKVIESTQGLGNDLAGVLALQRKLAGTERDLEAIAARVGELTREANALAAGHPAQAVAINARLREVQTGWEDLRATMRRREESLGEARRLQDFLRSLDDFQAWLGRTQTAVASEEGPATLPEAEALLAQHAALRGEVERAQSEYSRLRALGEEVTRDQADPQCLFLRQRLEALGTGWEELGRMWESRQGRLAQAHGFQGFLRDARQAEGVLSSQEYVLSHTEMPGTLQAADAAIKKLEDFMSTMDANGERIHGLLEAGRQLVSEGNIHADKIREKADSIERRHKKNQDAAQQFLGRLRDNREQQHFLQDCHELKLWIDEKMLTAQDVSYDEARNLHTKWQKHQAFMAELAANKDWLDKVDKEGRELTLEKPELKALVSEKLRDLHRRWDELETTTQAKARSLFDANRAELFAQSCCALESWLESLQAQLHSDDYGKDLTSVNILLKKQQMLEWEMAVREKEVEAIQAQAKALAQEDQGAGEVERTSRAVEEKFRALCQPMRERCRRLQASREQHQFHRDVEDEILWVTERLPMASSMEHGKDLPSVQLLMKKNQTLQKEIQGHEPRIADLRERQRALGAAAAGPELAELQEMWKRLGHELELRGKRLEDALRAQQFYRDAAEAEAWMGEQELHMMGQEKAKDELSAQAEVKKHQVLEQALADYAQTIHQLAASSQDMIDHEHPESTRISIRQAQVDKLYAGLKELAGERRERLQEHLRLCQLRRELDDLEQWIQEREVVAASHELGQDYEHVTMLRDKFREFSRDTSTIGQERVDSANALANGLIAGGHAARATVAEWKDSLNEAWADLLELLDTRGQVLAAAYELQRFLHGARQALARVQHKQQQLPDGTGRDLNAAEALQRRHCAYEHDIQALSPQVQQVQDDGHRLQKAYAGDKAEEIGRHMQAVAEAWAQLQGSSAARRQLLLDTTDKFRFFKAVRELMLWMDEVNLQMDAQERPRDVSSADLVIKNQQGIKAEIEARADRFSSCIDMGKELLARSHYAAEEISEKLSQLQARRQETAEKWQEKMDWLQLVLEVLVFGRDAGMAEAWLCSQEPLVRSAELGCTVDEVESLIKRHEAFQKSAVAWEERFCALEKLTALEEREKERKRKREEEERRKQPPAPEPTASVPPGDLVGGQTASDTTWDGTQPRPPPSTQAPSVNGVCTDGEPSQPLLGQQRLEHSSFPEGPGPGSGDEANGPRGERQTRTRGPAPSAMPQSRSTESAHAATLPPRGPEPSAQEQMEGMLCRKQEMEAFGKKAANRSWQNVYCVLRRGSLGFYKDAKAASAGVPYHGEVPVSLARAQGSVAFDYRKRKHVFKLGLQDGKEYLFQAKDEVSCPSCSSLSVPFQKLPAADSPSFPVLPLFPGLVLCGKTGCVRRPHQAALPV

SEQ ID NO: 285010 - DNA, 7173 bp, Artificial Sequence
  derived and/or modified sequence
atgagcagcaccctgagccccaccgacttcgacagcctggagatccagggccagtacagcgacatcaacaacagatgggacctgcccgacagcgactgggacaacgacagcagcagcgccagactgttcgagagaagcagaatcaaggccctggccgacgagagagaggccgtgcagaagaagaccttcaccaagtgggtgaacagccacctggccagagtgacctgcagagtgggcgacctgtacagcgacctgagagacggcagaaacctgctgagactgctggaggtgctgagcggcgagatcctgcccaagcccaccaagggcagaatgagaatccactgcctggagaacgtggacaaggccctgcagttcctgaaggagcagaaggtgcacctggagaacatgggcagccacgacatcgtggacggcaaccacagactgaccctgggcctggtgtggaccatcatcctgagattccagatccaggacatcagcgtggagaccgaggacaacaaggagaagaagagcgccaaggacgccctgctgctgtggtgccagatgaagaccgccggctaccccaacgtgaacgtgcacaacttcaccaccagctggagagacggcctggccttcaacgccatcgtgcacaagcacagacccgacctgctggacttcgagagcctgaagaagtgcaacgcccactacaacctgcagaacgccttcaacctggccgagaaggagctgggcctgaccaagctgctggaccccgaggacgtgaacgtggaccagcccgacgagaagagcatcatcacctacgtggccacctactaccactacttcagcaagatgaaggccctggccgtggagggcaagagaatcggcaaggtgctggaccacgccatggaggccgagagactggtggagaagtacgagagcctggccagcgagctgctgcagtggatcgagcagaccatcgtgaccctgaacgacagacagctggccaacagcctgagcggcgtgcagaaccagctgcagagcttcaacagctacagaaccgtggagaagccccccaagttcaccgagaagggcaacctggaggtgctgctgttcaccatccagagcaagctgagagccaacaaccagaaggtgtacacccccagagagggcagactgatcagcgacatcaacaaggcctgggagagactggagaaggccgagcacgagagagagctggccctgagaaccgagctgatcagacaggagaagctggagcagctggccgccagattcgacagaaaggccgccatgagagagacctggctgagcgagaaccagagactggtgagccaggacaacttcggcctggagctggccgccgtggaggccgccgtgagaaagcacgaggccatcgagaccgacatcgtggcctacagcggcagagtgcaggccgtggacgccgtggccgccgagctggccgccgagagataccacgacatcaagagaatcgccgccagacagcacaacgtggccagactgtgggacttcctgagacagatggtggccgccagaagagagagactgctgctgaacctggagctgcagaaggtgttccaggacctgctgtacctgatggactggatggaggagatgaagggcagactgcagagccaggacctgggcagacacctggccggcgtggaggacctgctgcagctgcacgagctggtggaggccgacatcgccgtgcaggccgagagagtgagagccgtgagcgccagcgccctgagattctgcaaccccggcaaggagtacagaccctgcgacccccagctggtgagcgagagagtggccaagctggagcagagctacgaggccctgtgcgagctggccgccgccagaagagccagactggaggagagcagaagactgtggagattcctgtgggaggtgggcgaggccgaggcctgggtgagagagcagcagcacctgctggccagcgccgacaccggcagagacctgaccggcgccctgagactgctgaacaagcacaccgccctgagaggcgagatgagcggcagactgggccccctgaagctgaccctggagcagggccagcagctggtggccgagggccaccccggcgccagccaggccagcgccagagccgccgagctgcaggcccagtgggagagactggaggccctggccgaggagagagcccagagactggcccaggccgccagcctgtaccagttccaggccgacgccaacgacatggaggcctggctggtggacgccctgagactggtgagcagccccgagctgggccacgacgagttcagcacccaggccctggccagacagcacagagccctggaggaggagatcagaagccacagacccaccctggacgccctgagagagcaggccgccgccctgccccccaccctgagcagaacccccgaggtgcagagcagagtgcccaccctggagagacactacgaggagctgcaggccagagccggcgagagagccagagccctggaggccgccctggccctgtacaccatgctgagcgaggccggcgcctgcggcctgtgggtggaggagaaggagcagtggctgaacggcctggccctgcccgagagactggaggacctggaggtggtgcagcagagattcgagaccctggagcccgagatgaacaccctggccgcccagatcaccgccgtgaacgacatcgccgagcagctgctgaaggccaacccccccggcaaggacagaatcgtgaacacccaggagcagctgaaccacagatggcagcagttcagaagactggccgacggcaagaaggccgccctgaccagcgccctgagcatccagaactaccacctggagtgcaccgagacccaggcctggatgagagagaagaccaaggtgatcgagagcacccagggcctgggcaacgacctggccggcgtgctggccctgcagagaaagctggccggcaccgagagagacctggaggccatcgccgccagagtgggcgagctgaccagagaggccaacgccctggccgccggccaccccgcccaggccgtggccatcaacgccagactgagagaggtgcagaccggctgggaggacctgagagccaccatgagaagaagagaggagagcctgggcgaggccagaagactgcaggacttcctgagaagcctggacgacttccaggcctggctgggcagaacccagaccgccgtggccagcgaggagggccccgccaccctgcccgaggccgaggccctgctggcccagcacgccgccctgagaggcgaggtggagagagcccagagcgagtacagcagactgagagccctgggcgaggaggtgaccagagaccaggccgacccccagtgcctgttcctgagacagagactggaggccctgggcaccggctgggaggagctgggcagaatgtgggagagcagacagggcagactggcccaggcccacggcttccagggcttcctgagagacgccagacaggccgagggcgtgctgagcagccaggagtacgtgctgagccacaccgagatgcccggcaccctgcaggccgccgacgccgccatcaagaagctggaggacttcatgagcaccatggacgccaacggcgagagaatccacggcctgctggaggccggcagacagctggtgagcgagggcaacatccacgccgacaagatcagagagaaggccgacagcatcgagagaagacacaagaagaaccaggacgccgcccagcagttcctgggcagactgagagacaacagagagcagcagcacttcctgcaggactgccacgagctgaagctgtggatcgacgagaagatgctgaccgcccaggacgtgagctacgacgaggccagaaacctgcacaccaagtggcagaagcaccaggccttcatggccgagctggccgccaacaaggactggctggacaaggtggacaaggagggcagagagctgaccctggagaagcccgagctgaaggccctggtgagcgagaagctgagagacctgcacagaagatgggacgagctggagaccaccacccaggccaaggccagaagcctgttcgacgccaacagagccgagctgttcgcccagagctgctgcgccctggagagctggctggagagcctgcaggcccagctgcacagcgacgactacggcaaggacctgaccagcgtgaacatcctgctgaagaagcagcagatgctggagtgggagatggccgtgagagagaaggaggtggaggccatccaggcccaggccaaggccctggcccaggaggaccagggcgccggcgaggtggagagaaccagcagagccgtggaggagaagttcagagccctgtgccagcccatgagagagagatgcagaagactgcaggccagcagagagcagcaccagttccacagagacgtggaggacgagatcctgtgggtgaccgagagactgcccatggccagcagcatggagcacggcaaggacctgcccagcgtgcagctgctgatgaagaagaaccagaccctgcagaaggagatccagggccacgagcccagaatcgccgacctgagagagagacagagagccctgggcgccgccgccgccggccccgagctggccgagctgcaggagatgtggaagagactgggccacgagctggagctgagaggcaagagactggaggacgccctgagagcccagcagttctacagagacgccgccgaggccgaggcctggatgggcgagcaggagctgcacatgatgggccaggagaaggccaaggacgagctgagcgcccaggccgaggtgaagaagcaccaggtgctggagcaggccctggccgactacgcccagaccatccaccagctggccgccagcagccaggacatgatcgaccacgagcaccccgagagcaccagaatcagcatcagacaggcccaggtggacaagctgtacgccggcctgaaggagctggccggcgagagaagagagagactgcaggagcacctgagactgtgccagctgagaagagagctggacgacctggagcagtggatccaggagagagaggtggtggccgccagccacgagctgggccaggactacgagcacgtgaccatgctgagagacaagttcagagagttcagcagagacaccagcaccatcggccaggagagagtggacagcgccaacgccctggccaacggcctgatcgccggcggccacgccgccagagccaccgtggccgagtggaaggacagcctgaacgaggcctgggccgacctgctggagctgctggacaccagaggccaggtgctggccgccgcctacgagctgcagagattcctgcacggcgccagacaggccctggccagagtgcagcacaagcagcagcagctgcccgacggcaccggcagagacctgaacgccgccgaggccctgcagagaagacactgcgcctacgagcacgacatccaggccctgagcccccaggtgcagcaggtgcaggacgacggccacagactgcagaaggcctacgccggcgacaaggccgaggagatcggcagacacatgcaggccgtggccgaggcctgggcccagctgcagggcagcagcgccgccagaagacagctgctgctggacaccaccgacaagttcagattcttcaaggccgtgagagagctgatgctgtggatggacgaggtgaacctgcagatggacgcccaggagagacccagagacgtgagcagcgccgacctggtgatcaagaaccagcagggcatcaaggccgagatcgaggccagagccgacagattcagcagctgcatcgacatgggcaaggagctgctggccagaagccactacgccgccgaggagatcagcgagaagctgagccagctgcaggccagaagacaggagaccgccgagaagtggcaggagaagatggactggctgcagctggtgctggaggtgctggtgttcggcagagacgccggcatggccgaggcctggctgtgcagccaggagcccctggtgagaagcgccgagctgggctgcaccgtggacgaggtggagagcctgatcaagagacacgaggccttccagaagagcgccgtggcctgggaggagagattctgcgccctggagaagctgaccgccctggaggagagagagaaggagagaaagagaaagagagaggaggaggagagaagaaagcagccccccgcccccgagcccaccgccagcgtgccccccggcgacctggtgggcggccagaccgccagcgacaccacctgggacggcacccagcccagacccccccccagcacccaggcccccagcgtgaacggcgtgtgcaccgacggcgagcccagccagcccctgctgggccagcagagactggagcacagcagcttccccgagggccccggccccggcagcggcgacgaggccaacggccccagaggcgagagacagaccagaaccagaggccccgcccccagcgccatgccccagagcagaagcaccgagagcgcccacgccgccaccctgccccccagaggccccgagcccagcgcccaggagcagatggagggcatgctgtgcagaaagcaggagatggaggccttcggcaagaaggccgccaacagaagctggcagaacgtgtactgcgtgctgagaagaggcagcctgggcttctacaaggacgccaaggccgccagcgccggcgtgccctaccacggcgaggtgcccgtgagcctggccagagcccagggcagcgtggccttcgactacagaaagagaaagcacgtgttcaagctgggcctgcaggacggcaaggagtacctgttccaggccaaggacgaggccgagatgagcagctggctgagagtggtgaacgccgccatcgccaccgccagcagcgccagcggcgagcccgaggagcccgtggtgcccagcaccaccagaggcatgaccagagccatgaccatgccccccgtgagccccgtgggcgccgagggccccgtggtgctgagaagcaaggacggcagagagagagagagagagaagagattcagcttcttcaagaagaacaagtag

SEQ ID NO: 285011 - DNA, 7098 bp, Artificial Sequence
  derived and/or modified sequence
atgagcagcaccctgagccccaccgacttcgacagcctggagatccagggccagtacagcgacatcaacaacagatgggacctgcccgacagcgactgggacaacgacagcagcagcgccagactgttcgagagaagcagaatcaaggccctggccgacgagagagaggccgtgcagaagaagaccttcaccaagtgggtgaacagccacctggccagagtgacctgcagagtgggcgacctgtacagcgacctgagagacggcagaaacctgctgagactgctggaggtgctgagcggcgagatcctgcccaagcccaccaagggcagaatgagaatccactgcctggagaacgtggacaaggccctgcagttcctgaaggagcagaaggtgcacctggagaacatgggcagccacgacatcgtggacggcaaccacagactgaccctgggcctggtgtggaccatcatcctgagattccagatccaggacatcagcgtggagaccgaggacaacaaggagaagaagagcgccaaggacgccctgctgctgtggtgccagatgaagaccgccggctaccccaacgtgaacgtgcacaacttcaccaccagctggagagacggcctggccttcaacgccatcgtgcacaagcacagacccgacctgctggacttcgagagcctgaagaagtgcaacgcccactacaacctgcagaacgccttcaacctggccgagaaggagctgggcctgaccaagctgctggaccccgaggacgtgaacgtggaccagcccgacgagaagagcatcatcacctacgtggccacctactaccactacttcagcaagatgaaggccctggccgtggagggcaagagaatcggcaaggtgctggaccacgccatggaggccgagagactggtggagaagtacgagagcctggccagcgagctgctgcagtggatcgagcagaccatcgtgaccctgaacgacagacagctggccaacagcctgagcggcgtgcagaaccagctgcagagcttcaacagctacagaaccgtggagaagccccccaagttcaccgagaagggcaacctggaggtgctgctgttcaccatccagagcaagctgagagccaacaaccagaaggtgtacacccccagagagggcagactgatcagcgacatcaacaaggcctgggagagactggagaaggccgagcacgagagagagctggccctgagaaccgagctgatcagacaggagaagctggagcagctggccgccagattcgacagaaaggccgccatgagagagacctggctgagcgagaaccagagactggtgagccaggacaacttcggcctggagctggccgccgtggaggccgccgtgagaaagcacgaggccatcgagaccgacatcgtggcctacagcggcagagtgcaggccgtggacgccgtggccgccgagctggccgccgagagataccacgacatcaagagaatcgccgccagacagcacaacgtggccagactgtgggacttcctgagacagatggtggccgccagaagagagagactgctgctgaacctggagctgcagaaggtgttccaggacctgctgtacctgatggactggatggaggagatgaagggcagactgcagagccaggacctgggcagacacctggccggcgtggaggacctgctgcagctgcacgagctggtggaggccgacatcgccgtgcaggccgagagagtgagagccgtgagcgccagcgccctgagattctgcaaccccggcaaggagtacagaccctgcgacccccagctggtgagcgagagagtggccaagctggagcagagctacgaggccctgtgcgagctggccgccgccagaagagccagactggaggagagcagaagactgtggagattcctgtgggaggtgggcgaggccgaggcctgggtgagagagcagcagcacctgctggccagcgccgacaccggcagagacctgaccggcgccctgagactgctgaacaagcacaccgccctgagaggcgagatgagcggcagactgggccccctgaagctgaccctggagcagggccagcagctggtggccgagggccaccccggcgccagccaggccagcgccagagccgccgagctgcaggcccagtgggagagactggaggccctggccgaggagagagcccagagactggcccaggccgccagcctgtaccagttccaggccgacgccaacgacatggaggcctggctggtggacgccctgagactggtgagcagccccgagctgggccacgacgagttcagcacccaggccctggccagacagcacagagccctggaggaggagatcagaagccacagacccaccctggacgccctgagagagcaggccgccgccctgccccccaccctgagcagaacccccgaggtgcagagcagagtgcccaccctggagagacactacgaggagctgcaggccagagccggcgagagagccagagccctggaggccgccctggccctgtacaccatgctgagcgaggccggcgcctgcggcctgtgggtggaggagaaggagcagtggctgaacggcctggccctgcccgagagactggaggacctggaggtggtgcagcagagattcgagaccctggagcccgagatgaacaccctggccgcccagatcaccgccgtgaacgacatcgccgagcagctgctgaaggccaacccccccggcaaggacagaatcgtgaacacccaggagcagctgaaccacagatggcagcagttcagaagactggccgacggcaagaaggccgccctgaccagcgccctgagcatccagaactaccacctggagtgcaccgagacccaggcctggatgagagagaagaccaaggtgatcgagagcacccagggcctgggcaacgacctggccggcgtgctggccctgcagagaaagctggccggcaccgagagagacctggaggccatcgccgccagagtgggcgagctgaccagagaggccaacgccctggccgccggccaccccgcccaggccgtggccatcaacgccagactgagagaggtgcagaccggctgggaggacctgagagccaccatgagaagaagagaggagagcctgggcgaggccagaagactgcaggacttcctgagaagcctggacgacttccaggcctggctgggcagaacccagaccgccgtggccagcgaggagggccccgccaccctgcccgaggccgaggccctgctggcccagcacgccgccctgagaggcgaggtggagagagcccagagcgagtacagcagactgagagccctgggcgaggaggtgaccagagaccaggccgacccccagtgcctgttcctgagacagagactggaggccctgggcaccggctgggaggagctgggcagaatgtgggagagcagacagggcagactggcccaggcccacggcttccagggcttcctgagagacgccagacaggccgagggcgtgctgagcagccaggagtacgtgctgagccacaccgagatgcccggcaccctgcaggccgccgacgccgccatcaagaagctggaggacttcatgagcaccatggacgccaacggcgagagaatccacggcctgctggaggccggcagacagctggtgagcgagggcaacatccacgccgacaagatcagagagaaggccgacagcatcgagagaagacacaagaagaaccaggacgccgcccagcagttcctgggcagactgagagacaacagagagcagcagcacttcctgcaggactgccacgagctgaagctgtggatcgacgagaagatgctgaccgcccaggacgtgagctacgacgaggccagaaacctgcacaccaagtggcagaagcaccaggccttcatggccgagctggccgccaacaaggactggctggacaaggtggacaaggagggcagagagctgaccctggagaagcccgagctgaaggccctggtgagcgagaagctgagagacctgcacagaagatgggacgagctggagaccaccacccaggccaaggccagaagcctgttcgacgccaacagagccgagctgttcgcccagagctgctgcgccctggagagctggctggagagcctgcaggcccagctgcacagcgacgactacggcaaggacctgaccagcgtgaacatcctgctgaagaagcagcagatgctggagtgggagatggccgtgagagagaaggaggtggaggccatccaggcccaggccaaggccctggcccaggaggaccagggcgccggcgaggtggagagaaccagcagagccgtggaggagaagttcagagccctgtgccagcccatgagagagagatgcagaagactgcaggccagcagagagcagcaccagttccacagagacgtggaggacgagatcctgtgggtgaccgagagactgcccatggccagcagcatggagcacggcaaggacctgcccagcgtgcagctgctgatgaagaagaaccagaccctgcagaaggagatccagggccacgagcccagaatcgccgacctgagagagagacagagagccctgggcgccgccgccgccggccccgagctggccgagctgcaggagatgtggaagagactgggccacgagctggagctgagaggcaagagactggaggacgccctgagagcccagcagttctacagagacgccgccgaggccgaggcctggatgggcgagcaggagctgcacatgatgggccaggagaaggccaaggacgagctgagcgcccaggccgaggtgaagaagcaccaggtgctggagcaggccctggccgactacgcccagaccatccaccagctggccgccagcagccaggacatgatcgaccacgagcaccccgagagcaccagaatcagcatcagacaggcccaggtggacaagctgtacgccggcctgaaggagctggccggcgagagaagagagagactgcaggagcacctgagactgtgccagctgagaagagagctggacgacctggagcagtggatccaggagagagaggtggtggccgccagccacgagctgggccaggactacgagcacgtgaccatgctgagagacaagttcagagagttcagcagagacaccagcaccatcggccaggagagagtggacagcgccaacgccctggccaacggcctgatcgccggcggccacgccgccagagccaccgtggccgagtggaaggacagcctgaacgaggcctgggccgacctgctggagctgctggacaccagaggccaggtgctggccgccgcctacgagctgcagagattcctgcacggcgccagacaggccctggccagagtgcagcacaagcagcagcagctgcccgacggcaccggcagagacctgaacgccgccgaggccctgcagagaagacactgcgcctacgagcacgacatccaggccctgagcccccaggtgcagcaggtgcaggacgacggccacagactgcagaaggcctacgccggcgacaaggccgaggagatcggcagacacatgcaggccgtggccgaggcctgggcccagctgcagggcagcagcgccgccagaagacagctgctgctggacaccaccgacaagttcagattcttcaaggccgtgagagagctgatgctgtggatggacgaggtgaacctgcagatggacgcccaggagagacccagagacgtgagcagcgccgacctggtgatcaagaaccagcagggcatcaaggccgagatcgaggccagagccgacagattcagcagctgcatcgacatgggcaaggagctgctggccagaagccactacgccgccgaggagatcagcgagaagctgagccagctgcaggccagaagacaggagaccgccgagaagtggcaggagaagatggactggctgcagctggtgctggaggtgctggtgttcggcagagacgccggcatggccgaggcctggctgtgcagccaggagcccctggtgagaagcgccgagctgggctgcaccgtggacgaggtggagagcctgatcaagagacacgaggccttccagaagagcgccgtggcctgggaggagagattctgcgccctggagaagctgaccgccctggaggagagagagaaggagagaaagagaaagagagaggaggaggagagaagaaagcagccccccgcccccgagcccaccgccagcgtgccccccggcgacctggtgggcggccagaccgccagcgacaccacctgggacggcacccagcccagacccccccccagcacccaggcccccagcgtgaacggcgtgtgcaccgacggcgagcccagccagcccctgctgggccagcagagactggagcacagcagcttccccgagggccccggccccggcagcggcgacgaggccaacggccccagaggcgagagacagaccagaaccagaggccccgcccccagcgccatgccccagagcagaagcaccgagagcgcccacgccgccaccctgccccccagaggccccgagcccagcgcccaggagcagatggagggcatgctgtgcagaaagcaggagatggaggccttcggcaagaaggccgccaacagaagctggcagaacgtgtactgcgtgctgagaagaggcagcctgggcttctacaaggacgccaaggccgccagcgccggcgtgccctaccacggcgaggtgcccgtgagcctggccagagcccagggcagcgtggccttcgactacagaaagagaaagcacgtgttcaagctgggcctgcaggacggcaaggagtacctgttccaggccaaggacgaggtgagctgccccagctgcagcagcctgagcgtgcccttccagaagctgcccgccgccgacagccccagcttccccgtgctgcccctgttccccggcctggtgctgtgcggcaagaccggctgcgtgagaagaccccaccaggccgccctgcccgtgtag

SEQ ID NO: 285012 - DNA, 7173 bp, Artificial Sequence
  derived and/or modified sequence
atgtcgagcacacttagtccaaccgatttcgatagcctcgagattcaggggcagtactctgacatcaacaacaggtgggacttgcccgactccgactgggacaacgattctagcagcgcacggttattcgagaggtctcgaataaaggcactcgccgatgagcgtgaagccgtccagaaaaagactttcacaaagtgggtgaactctcaccttgctcgcgtcacttgtcgagtgggtgacctatattccgatctaagggacggaagaaacctgctgaggctcctcgaggtgctatctggcgaaatcctcccgaaacctacaaagggccgcatgaggatacactgtctcgagaatgtggataaagccctgcagttcctgaaagaacagaaggtccatctcgaaaacatgggttcgcatgatatagtggacggaaaccacaggctgactctgggcctagtgtggacaattatcctgcgcttccagatccaagatatatctgttgagaccgaggataacaaggagaagaaaagcgctaaggacgccctattactgtggtgccagatgaaaaccgctggttatccaaatgtcaatgtgcacaacttcaccacctcatggcgggatgggctcgctttcaatgcgatcgtgcacaaacacagaccggacctgctcgacttcgaaagcctgaaaaagtgcaatgctcattataacttgcaaaatgctttcaacctggctgaaaaggagctgggcttgacaaagctcctggaccccgaagatgtgaatgtagaccaacccgacgaaaagtcaataatcacttacgtggctacatactatcattactttagcaagatgaaagcattggctgtggaagggaaacggataggcaaggtgttggatcacgctatggaagccgagcggttagtggagaagtacgaatcccttgcgagcgaattgctccagtggattgagcagaccatcgtcacactcaatgacagacaactggctaacagcctctcgggagtacagaaccaactccagagtttcaacagctatcgtacggtggagaaaccaccaaaattcacagagaagggcaatctggaggtcttgctgttcaccatacaaagcaaactgagagccaataaccagaaagtctacacccctcgcgaggggcggctcatctcagatatcaacaaggcttgggagagactggaaaaagcagaacatgagcgtgagctggctcttcggaccgaactgatccggcaggagaagttggaacagctagcagcccgcttcgataggaaagcggccatgagagaaacttggttgtctgaaaatcagagactcgtaagccaagacaactttggtttagaactggcagcggtcgaggccgccgtgcggaagcacgaagccatcgaaacagatatagtggcctatagtggcagagtgcaagcagtggatgcagtagcagcggaactggcagctgagcgttatcatgatatcaagaggatagcggcccgacagcataacgtcgctcgcctctgggactttctccgtcagatggtcgcagcccgcagagagaggctgctgctcaatctcgaactgcagaaggtgtttcaagacctgctttatttaatggattggatggaggaaatgaaggggaggctgcagtctcaggacctcggacgccatctcgccggagtagaggacttgctccagcttcacgaattagttgaagccgatattgctgtgcaggccgaacgtgttagggctgtctcagcctctgccctgagattttgcaaccctggcaaagaatacagaccctgcgacccccagctggtgtccgagagagtagcaaaactggagcagagttacgaagcactgtgtgaattggctgcagcccggagagccagactggaggaatcacgtcgtctgtggaggtttttatgggaggtcggtgaggccgaggcatgggtaagagagcagcaacacctactcgcgagcgccgatactggcagggatctgacgggcgctctgcgcctgctgaacaagcacacagccttgaggggggaaatgtctggacgccttggcccattgaaactgaccctggagcagggccagcaattagtggccgaaggtcacccgggagcatcacaggccagcgcccgggccgcagaactgcaagcccagtgggagagacttgaggccctcgccgaggagcgagctcagcgcctagctcaggccgcaagcctgtaccagttccaagccgacgcaaacgatatggaggcctggctggttgacgctctccggcttgtcagctctcctgagcttggtcacgatgaattctccacccaagccttagcgcgccagcaccgtgctctggaagaagagatacgcagccataggcctacactggatgcccttagagaacaggccgccgcattgcccccaacactgtctcggactcctgaggttcagagccgggtgcctacgctggaaaggcattacgaggaattgcaagcaagggccggtgaacgcgcccgggctctcgaagcagctctggctctgtatacaatgttaagtgaagcaggagcatgtggactgtgggtggaggaaaaggagcagtggctgaatggactggctctcccagaacgcttagaggacctggaggtggttcagcagcgctttgaaacactggagcctgagatgaacactctggctgctcaaatcacagctgttaatgacatcgctgagcagctgttgaaggcaaatccccctgggaaggacagaatcgtgaatacacaggagcaactcaaccacaggtggcagcagtttcgacgcttagccgatggcaaaaaggcagcgttgacctctgccctgtctatccagaactaccatcttgagtgcaccgagactcaggcttggatgcgtgagaagacgaaagtaattgaaagcactcaagggctgggaaatgatttggccggagttttagccctgcaaagaaaactggcgggaaccgagagggatcttgaggcaattgcagctagggtgggagagttaacgcgagaagctaacgccctggccgccggtcatccggcccaagctgtcgcgattaacgcccgtcttcgggaggttcagacaggctgggaagacctgagagctactatgaggaggcgggaagagtcgctcggtgaggccaggaggttgcaggacttcttgcggagccttgatgatttccaagcatggttggggaggacgcaaacggcggtggccagcgaggagggccccgcgaccctgcccgaagccgaagctctgctggcccaacatgccgctttgcgtggcgaagtcgagcgcgcccagtccgaatattctagattgcgcgccttgggtgaggaggtgactcgcgaccaggccgacccccagtgcctgtttcttcgccagcggctggaggctctggggacagggtgggaagagctcgggagaatgtgggaaagccgtcagggacgcttagcccaggcacatggctttcaggggtttcttcgagacgcaagacaagctgagggcgtcctgtcctctcaggagtacgtgctttcccacacggaaatgcccggcacgctccaggccgccgatgctgccatcaagaaactggaagacttcatgagcaccatggacgctaatggcgagagaatccatggccttcttgaggctggtagacaactggtttccgagggcaacatccacgctgacaagattcgcgagaaggctgacagtatagaacggcgtcacaagaaaaaccaggatgccgcacagcagtttctggggaggctccgggacaatagggagcagcagcactttctccaggactgccacgagcttaaactgtggattgacgagaagatgttaaccgcccaggatgtgtcttatgatgaagccaggaacctgcataccaaatggcaaaaacaccaagcctttatggccgagctggccgcaaacaaagattggctggacaaggttgataaggagggcagggaactgacacttgagaagcctgaactcaaagctctggtgagtgagaagttacgggacctccaccgcaggtgggatgagctcgagacgacaacccaagctaaggcaagatcacttttcgatgccaaccgcgcagagctgttcgcgcagagttgctgcgccctggaatcatggctggagagccttcaggcgcagttgcactctgatgactatggcaaggacctcacgtccgtgaacattctcctcaagaaacaacagatgttggaatgggagatggcggtgagagaaaaggaggttgaggccatccaagcgcaggcaaaagccctggcccaggaggaccagggtgccggtgaagtggaacgtactagcagggccgttgaagaaaaatttcgagcactctgtcagcctatgcgggagcgttgcaggcgattgcaggcttcccgcgagcaacaccaatttcatcgagacgttgaagacgagattctatgggtgactgagcgcctgcccatggcaagttctatggaacacggcaaggacctgcctagcgtgcagctccttatgaagaaaaatcagaccctgcaaaaggaaattcagggacacgagccaaggattgccgaccttcgagagaggcagcgggcgctaggcgcagcggccgccggccccgagttagccgagttgcaggaaatgtggaagcgcctcgggcacgaactcgaactgcggggcaaacggctggaagacgctctgagggcccagcaattctatcgcgatgccgctgaagctgaagcttggatgggggaacaggaactccatatgatgggtcaggaaaaggccaaagatgagctttccgctcaggccgaagtgaaaaagcatcaagtgcttgaacaggctctcgccgattacgcgcaaacgattcaccagctggctgcttcgtcacaagacatgatcgaccatgagcacccagaatcaacccggatctctataaggcaggcccaagtggacaagctgtatgcaggcctcaaggagttggccggggaacgcagagaaagactccaagagcatctcaggctgtgtcagcttagaagggaattagacgatcttgagcaatggattcaggaacgagaagtcgtcgctgcatcgcacgagttgggacaggactatgagcacgttacgatgctgcgcgacaagttcagagaattcagcagagacactagcacaatcgggcaggagagagtcgattctgccaacgctctggcgaatgggctgattgcaggtggccacgccgcacgggctacagtggctgagtggaaggactccctgaacgaggcatgggctgacctgttagaactcctggatactagaggacaggtactcgctgcagcatatgagctccagagattcttgcatggtgctcggcaggctctcgctcgcgtccagcacaagcagcagcagctgcccgacggcactgggcgcgatttgaatgcagcagaagcactgcagaggaggcactgcgcatacgagcatgacatccaggcgctctcaccgcaagtacagcaggtgcaggatgacggacaccggctccaaaaggcttacgcaggagacaaggccgaggagatcgggaggcatatgcaggctgttgctgaagcttgggcacagctgcagggcagttccgcagctaggagacaacttctcctggacaccacggacaaatttcgtttttttaaagctgtcagggagctgatgttgtggatggatgaggtgaatcttcagatggacgcccaggagcgacccagggatgtgtcttcagccgacctggtaataaaaaaccagcagggaataaaggccgaaatcgaggcgcgggctgacagattttccagctgtattgatatgggaaaagagctgctggcgcgttcccattatgctgctgaagagatcagcgaaaagctctcacagttgcaggcaagaagacaggagactgccgaaaaatggcaggagaaaatggactggttacagctggtccttgaagtacttgtattcggccgcgatgcagggatggccgaggcatggctgtgcagccaggagcccctggtgaggagcgccgagcttgggtgtaccgttgatgaagttgagagtctgatcaaaagacatgaagcttttcaaaaaagcgcggtcgcatgggaggagcgcttctgcgccctcgagaaattgaccgctcttgaggagagggagaaagaacgcaagagaaaaagggaagaggaagagaggcggaagcagccccccgctcccgagcccacggcaagcgttcccccgggcgatctggtgggcggccagactgctagtgacactacttgggacggcacacagccccgcccccctcccagtactcaggcgccatccgtgaacggtgtgtgtaccgacggtgaaccgtcccaaccactgttggggcagcaacgcctggaacacagcagtttccctgaagggccaggccccggcagtggagatgaagctaacgggcctaggggcgagagacaaacccggaccaggggtccagctccttccgcaatgccacaatccaggtcaactgaatctgctcacgcagcaaccttaccccctcgtggccctgagccctcagcacaggaacagatggaaggaatgttgtgcaggaagcaggagatggaagctttcggtaagaaagcagctaacaggagctggcagaatgtgtactgtgtgctccgaaggggatccctaggcttttataaagacgctaaggccgctagcgccggtgtgccctatcatggtgaggtgcccgtctcgcttgccagggcgcagggtagcgtggcgtttgattaccggaaacgcaagcacgtatttaagcttggactacaagacggaaaagaatatctgttccaggcaaaagacgaggctgagatgagtagctggctgagagtggtgaatgccgcgattgcaactgctagcagcgccagtggggaacccgaggagcccgtagtgcccagcaccacacgtggcatgaccagggcaatgacaatgccccctgtgagcccggttggtgctgaagggcccgtggttctgcgcagtaaggatgggagagaacgtgagcgggagaagagattcagcttctttaaaaagaataagtag

SEQ ID NO: 285013 - DNA, 7098 bp, Artificial Sequence
  derived and/or modified sequence
atgagtagtaccctaagccccacagacttcgactcgctcgagattcaaggccagtacagcgatatcaacaatcgttgggaccttcctgactccgattgggataacgacagttcctccgctcgcctgtttgagcgctcccggatcaaagccctggccgatgagagagaggccgtccagaaaaaaacgttcacgaagtgggtgaactcacatctagctcgagtaacatgtcgcgtgggagacctgtactccgatttgcgagacggtaggaatctgctccgcctgttggaggtcctctctggggagatccttcctaaaccgacaaagggacgaatgcgaattcactgccttgagaacgtcgacaaggctctgcagttcctgaaggaacagaaagtccatctggaaaacatgggaagccacgatatcgtggatggcaatcaccggctaacattggggttggtgtggacaatcatccttagatttcagatccaagatattagcgttgagaccgaagataacaaagaaaagaagagcgctaaggatgccctgctgctatggtgtcagatgaagacagctgggtatcccaatgttaatgttcataatttcactacttcttggcgcgatggcctggccttcaatgcaattgtccacaagcaccgccctgatctcctggactttgagtccctcaagaaatgtaatgctcattataatctgcagaacgcatttaacctggccgagaaggagttgggactcacgaagctgctcgacccagaggatgtgaatgtcgaccagccagatgaaaagtcaatcattacctatgtggctacctactatcactacttcagtaagatgaaggctttagccgtcgaaggaaagaggatcggcaaggtactggaccacgcaatggaagctgagagactggtggaaaagtacgaatccttagcatccgagttgttacagtggattgaacaaaccattgtgacactgaatgataggcagctggccaattctctttccggcgtgcagaaccagttgcagagcttcaatagctatcgcactgtcgagaaacctccgaaattcacagaaaagggaaatctagaggtccttctcttcacgatccagtcaaaacttagagccaataaccaaaaggtatatacccctagagagggcagacttatttccgacatcaacaaagcttgggagcgcctggagaaggccgagcatgaaagagaactcgcccttaggacagaattgatccgtcaggaaaagctggagcagctagcagcgagatttgaccgtaaggccgctatgagggagacttggttgtctgaaaatcagcggctggtttctcaggataatttcgggttggaattggccgccgtcgaggctgccgttaggaagcatgaggcgattgaaaccgatattgtggcctatagcggaagggtgcaggctgtcgatgcagtggcagccgaactggctgccgagcgctatcatgatatcaagcgcatcgccgcccggcagcataatgtcgcccggctgtgggacttccttaggcagatggtcgctgccagaagagaaaggctgctgttgaatctggagctccagaaagtattccaggatctactgtaccttatggattggatggaggaaatgaaggggagattacagtcccaggatctcggtcggcacctggcaggggtggaagatctgctgcagctgcatgagctcgtcgaggctgatattgcggttcaggcagaacgagtccgggccgtgtccgcttctgcactgagattctgtaatccaggaaaggagtatcgaccttgcgacccccagctcgtgtcagagagagtggctaagctagagcaaagctacgaggccctttgcgagctggcagccgctcgcagggcccgcctcgaagagtctcgccgactgtggagattcctctgggaggtcggggaggcggaagcttgggtgagggaacagcagcatcttctggcttctgccgacactggtcgcgatttaactggcgccttacgactcctgaacaaacacactgccctgagaggcgagatgtccgggagattgggccccctcaagctaaccctggaacagggacagcagctggttgctgagggacatcctggggcctctcaggcttccgctagagccgctgagctccaggcacagtgggaaagactggaggccctagcagaggaacgagcccagagactggcacaggctgcttcactgtatcagtttcaagcagacgctaatgatatggaggcttggctggtagacgcactgcgcctggtgtccagcccggaactggggcacgatgagttcagcacccaggctttggcgagacagcacagagccctagaagaagagataagaagtcatcgacccacccttgacgcgcttagagaacaggcagccgccctaccacccacacttagccggacccccgaggttcagtcccgtgttcccacattggaaagacattacgaggagctgcaggctcgagcgggcgagagggctagagcactggaagcggctctcgcgctgtacacaatgttatctgaagcaggagcttgtgggctgtgggtcgaggagaaggaacaatggctgaatggcttggcccttccggaacgcctggaggacctggaagtagtccagcagcgttttgaaaccctcgagcccgagatgaataccctcgccgctcagatcacagctgtgaacgatatcgctgaacaactgcttaaggcaaacccccccggtaaagacaggatagtaaacactcaggagcagttgaatcacagatggcagcaattccgtaggctcgccgacggaaagaaagcggcactgacgagcgccctgtcgattcagaattaccatttagaatgtactgaaactcaggcctggatgagagagaaaactaaggtaatagaaagcacacaagggcttgggaatgatctggcgggggtattagcgctgcagagaaaactcgccgggactgagcgcgacctcgaggcaatcgctgcgcgtgtaggcgaactgactcgggaggcaaatgctctggccgctggacaccctgcacaggctgtcgctataaacgctcgtcttcgggaggtgcagactggatgggaagatctgcgcgccactatgaggagacgggaggagtcactgggggaggcccggcggctccaagactttctgagatcgctagacgacttccaggcctggcttggcagaacacaaacagctgttgcgtcagaagagggtccagccactctgccggaggctgaggctctactcgcccaacacgctgccttaagaggtgaggtggagagagctcagtccgagtattctaggctgcgcgccttaggcgaagaagtgacccgggaccaagctgatccccagtgtctgtttctgaggcagaggcttgaggcactaggtacgggctgggaagaactgggtcgtatgtgggagtccaggcaaggccgtcttgctcaggcgcatgggtttcagggctttttgagggatgctaggcaggcggaaggtgttctgagcagtcaggaatacgtgctgagccacacagagatgccgggtaccctgcaagctgctgacgcggcgatcaagaaactggaggatttcatgtcaacgatggatgcgaacggcgagcgaatccacggattattggaagccggtcgacagctggtcagcgagggcaacattcacgcagataaaataagagaaaaagcggattctattgaacgccgccataaaaagaatcaggatgcagcccagcagttcctcgggcgacttagggacaaccgagaacagcagcactttctgcaagactgtcacgaactaaagctgtggattgacgaaaagatgcttactgcccaagatgtgagttatgacgaagcaagaaatcttcatactaagtggcagaaacatcaggcgttcatggcggagctggctgcgaacaaggattggctggataaggtcgataaagaggggagggagttgaccctggagaagcccgagttaaaggctctggtctctgagaagctgcgcgatttgcatcggcgctgggatgagcttgagaccactacccaggctaaggctaggtctctgtttgacgctaaccgggccgagctgttcgcccagagctgttgtgcgctagagagctggctcgaaagcttacaggcgcagctgcactctgatgactatggcaaggacctgactagtgtgaacattctgctaaagaaacagcaaatgctggagtgggagatggctgtaagagaaaaggaggtggaggcaatccaggcacaggcaaaggcgttagcccaggaagaccagggcgccggcgaggtggagaggacgtctagagctgtggaagaaaagtttagagcattatgtcagcctatgagggaacgctgtagacggttgcaagctagcagagagcagcatcagtttcatcgcgacgttgaggacgaaatcctgtgggtgaccgaaagactccctatggctagctcgatggaacacggtaaagatcttccctcggtccagctcttaatgaaaaaaaaccaaaccttacaaaaagagatccaagggcacgaacctagaattgccgacctcagggagcgccagcgagctcttggcgctgccgccgccggcccggagctggcagagcttcaggaaatgtggaagcgtctggggcacgagctcgaactgcgagggaaacggttagaagacgccctgcgggctcaacaattctatcgggatgccgctgaggccgaagcatggatgggagagcaagaactgcatatgatggggcaggagaaagcaaaggatgaacttagtgcacaggccgaggtgaagaaacatcaagtgcttgaacaggcccttgccgactatgctcagaccatacaccagctcgcagcaagctcacaggacatgatagaccacgaacacccagaatccactcggatctccatcagacaagctcaggttgacaagttatatgcaggtctcaaggaattggcgggcgagaggcgcgaacgcctgcaggaacatcttcgcctgtgccagctcaggcgcgaactcgatgatttggaacagtggattcaggagcgtgaggtcgtggctgcctcccatgagctcgggcaagactacgagcacgtgacaatgttgagggacaagttccgagagtttagcagggatacatctactataggacaagaacgggtggattctgctaatgccttggctaacgggctgattgccggtgggcatgccgcaagagcaactgtggctgagtggaaagattctctcaatgaggcctgggcagacctgctcgagcttctggacacacgtgggcaagtgctggctgcagcttacgaactacagaggtttctacatggagcaaggcaagctttagccagggtgcagcacaagcagcaacagctgcctgacggaaccgggagagacttgaacgccgcagaagctttacagcggcgccattgtgcctatgaacacgacatacaagccctgtcgccccaagttcaacaggttcaggatgacgggcaccgcttgcagaaggcctatgctggcgacaaagccgaagagattggccggcatatgcaggctgtggccgaggcctgggcccaactccagggctcaagcgcggctcgtagacaactgctgctcgatacaaccgacaaattccgatttttcaaagcagtacgcgagctcatgctctggatggacgaagtgaacctgcaaatggacgcgcaagagagaccccgcgatgtctcctcagctgatctggtcattaaaaatcagcaaggcattaaggccgaaatcgaagctcgcgctgatagattcagcagctgtattgacatgggcaaggagctcctggctcggtcccattatgccgccgaggagatttctgagaagctgtctcagctgcaggcacgccggcaggaaaccgcagagaagtggcaggagaagatggattggctgcagttagtgttggaagtgctagtgttcggccgcgatgctggaatggccgaggcttggctttgttcgcaagagcctctggttaggagtgctgaactagggtgtaccgtggacgaggtcgagtccctcatcaaacgtcacgaagcttttcagaaatcggctgtggcttgggaagagaggttctgcgctttagagaagctcacagccctcgaggaaagggaaaaagaacgtaagcgcaagcgggaagaggaagaacggcggaagcagccacctgcccctgagcctaccgcctccgtacccccaggagaccttgtgggcggtcaaactgcgtccgatacaacttgggacggcacccagccccggcccccacccagcacgcaggcgccttctgtgaacggtgtatgcacggatggggaaccgtcccagccattgctggggcaacagcggctggagcatagctcatttccagagggccccggacctgggtcaggcgatgaagctaatggcccgcgaggggagaggcagactcggacccgtggaccagctccatccgctatgcctcagtcaagatccacagaatcggcccatgccgcgactttacctcctcgtggcccagagccaagtgcgcaggagcagatggagggcatgctctgccgaaaacaggagatggaggccttcgggaagaaagccgccaacagatcttggcagaacgtgtactgcgtactcagacgcggctcactggggttttataaagacgcaaaagcagcatcagctggcgtgccataccatggtgaagtgccagtttccctcgctagagctcagggatctgtggcctttgattaccgtaagcgcaaacacgtattcaaactgggcttacaggacggcaaagagtacctttttcaggccaaagatgaggtctcctgcccttcctgttcgagcctaagtgttcccttccagaagctgcccgctgcggattcgccctcatttccggtgctcccactgtttccaggcctcgtcctatgcggcaagaccggatgcgtgaggaggccacatcaggccgccctgcccgtctag

SEQ ID NO: 285014 - DNA, 7173 bp, Artificial Sequence
  derived and/or modified sequence
atgagctcgacgctaagtcctaccgacttcgactcattggagattcagggccagtactcagacatcaacaaccgctgggacctgcccgactctgactgggataacgatagcagttccgcaaggctgtttgagcgaagtagaatcaaagctctcgctgacgagagagaggctgtgcagaaaaaaaccttcacaaaatgggtcaactcccacttagccagggtcacatgcagggtcggggacttatacagcgacctgagggacggccgcaaccttctgcgcctcttagaagtgctgagcggcgagattctccccaagcctactaaaggacgtatgagaatccactgcttagagaatgtagacaaggctctgcaatttctcaaggagcagaaagtgcacctcgagaacatgggctctcatgatattgtagacggaaatcataggctcaccttgggacttgtgtggaccatcatcctgcggttccagatacaggatatatctgttgaaacagaagacaacaaggaaaaaaagagtgcgaaggacgcgctgctgttgtggtgccagatgaaaaccgcaggctatcctaacgtgaatgttcataatttcaccacgagttggagggacggtttagcctttaacgctatagtccataagcatcggccggatctactggactttgaatctttgaagaagtgtaacgcccattataacctgcaaaacgcctttaacctggccgagaaggagttgggcctgactaaactcttagacccagaagacgttaacgtagaccaacctgatgaaaagtccatcataacctacgtcgccacatactatcactacttttcgaaaatgaaagccttggcagtagaagggaaacggattggaaaagtcttagaccacgccatggaggccgagcgcctggttgagaagtacgagagcctagcttctgaattgcttcagtggatcgaacagactattgtaacactgaatgatcggcaactagccaattccttgtcgggagtgcagaaccagttgcagtcttttaactcttaccgaacggtggagaagccccctaagttcacggagaagggtaaccttgaggtattgctgttcaccatccagtcaaaactgagagccaataatcagaaggtctataccccgcgcgagggccgactgatctcagacataaacaaggcctgggagcgcctggagaaagcagagcatgagcgtgagctcgccctgcgaaccgagctcattcgacaggagaagctggaacaactggctgcacggtttgaccggaaagcagctatgcgggaaacctggttgtcggagaatcagaggcttgtatctcaggacaattttggactcgaactcgcagccgttgaagcggccgtgcgtaaacacgaggcaatagaaactgatatcgttgcctacagtggccgcgtacaggctgtcgacgccgtggcagcagagctggctgcagagaggtaccacgacatcaagagaattgctgcaagacagcacaacgtcgctcgcctgtgggactttttaaggcaaatggtagcggctcgccgcgagagactcctgctgaacctcgagctgcagaaagtattccaggatctgctgtatctaatggattggatggaagagatgaagggaaggctgcagtctcaggatctgggccggcaccttgcaggcgtggaggatctcctgcaactgcacgagctagtggaggctgacattgccgtgcaagcggagcgggtacgcgccgtgtcagcttcagcgttgcggttctgcaaccctgggaaggagtatcggccttgcgaccctcagttggtcagtgaacgcgttgcaaaactcgaacaatcttatgaggccttgtgtgagctggcagcagcgcggcgggcccgactggaggaatcacgacggctctggcgctttctgtgggaagtgggagaggctgaggcctgggttagagaacagcagcatctcctggctagcgccgacaccgggcgcgaccttaccggcgcactccggttgcttaataagcatacagccctgaggggtgaaatgagcggacggctgggaccactaaaattgacactagagcagggccaacagctcgtggctgaagggcaccctggagcatctcaagccagtgcacgcgccgcagaattgcaggcacagtgggaaagactcgaagccctcgctgaggaaagagctcagcgtctggctcaggctgctagcctgtatcagtttcaagctgatgccaatgatatggaagcctggctcgtggatgctctgcgcctagtgagttcccctgagctagggcacgacgagttctccacccaagcgctggctagacaacacagagctttggaagaagaaattcgcagtcataggcccacgctggatgccctcagggaacaggcagcagccttacctcccacactgtctcgtacccccgaggtgcagtcaagggtgccaaccctcgaaaggcattacgaagagctgcaggccagggcaggcgaacgcgctagagctttagaggcagccctggcactatacactatgctcagtgaggctggcgcctgtggactctgggttgaggagaaggagcagtggctcaacggtctggccctaccagagcgactggaggacctcgaggtcgttcagcagcgattcgagacactggagcctgagatgaacacactggcagcacaaataaccgccgtgaatgatatagctgagcagcttctcaaagccaatcctccagggaaagacaggattgtaaacactcaggaacagctgaatcatagatggcagcagttccgtcgtctggctgacgggaaaaaggccgctctgactagcgctttgagcattcaaaactaccacctcgagtgcacggaaacacaggcctggatgcgtgaaaagaccaaagtcatcgagagcacgcagggcctgggcaacgacctggctggcgtgctcgccctgcagagaaagctcgccggcaccgagcgggacctggaagccatcgccgccagagtgggagagctgacacgagaggcaaatgcactggcggccggccatcccgcccaggccgtggctattaatgcgcgcctgcgagaagtccagaccggctgggaagacctgcgagccaccatgcgtagacgcgaagagagcctaggcgaggctagacggctacaggattttcttaggagtctggatgatttccaagcatggcttggccggacacagactgcggttgcatcagaggaagggcccgcaacgctgcccgaggcagaggcccttctggctcagcatgcggcgttaagaggagaggtggagagggctcaaagcgaatactcaagactccgcgccctaggagaggaggtcacgcgggatcaggccgatcctcagtgtctgttccttaggcaacgattggaggcgctgggaaccgggtgggaagaactggggcgaatgtgggagtcacggcagggacgcctggcgcaggcccatggattccaagggtttctgcgtgatgcccggcaagcagagggcgttctgagctcccaagagtatgtgctctctcacacggagatgccaggcacactacaggcagcggatgctgccatcaaaaagctggaggactttatgagcactatggacgctaatggcgagcgcattcacggcttgcttgaggccggtcgtcagctcgtgtcagagggaaacattcatgcggataaaatcagggaaaaggcagactcaatcgagaggaggcataaaaagaatcaagacgccgctcagcagtttctaggccgtctgagggacaaccgcgagcagcagcacttcctgcaggattgtcatgagctgaagctctggatagatgaaaaaatgctcacagcgcaagatgtgtcctatgatgaggcccgcaacctccacaccaagtggcagaaacatcaggcttttatggctgaactcgcagccaataaggactggctggacaaagtggacaaggaaggccgtgaactaaccttagaaaagcccgagctaaaagccttagtcagtgagaagctgcgggacctgcacagaagatgggatgaactggagaccacgactcaagccaaggcgcgttctctcttcgacgctaacagagctgagctgtttgcccagtcctgctgtgcattggaatcgtggctcgaaagcttacaggcccagcttcatagtgatgattacggcaaggatctgacctctgtgaacattcttcttaagaaacagcagatgcttgaatgggagatggcagtccgcgagaaggaggtggaggccattcaggcacaggcaaaggcactggcccaggaagatcagggtgcaggggaggttgagcgaacctcacgggctgttgaggagaagtttcgagctttgtgtcaacctatgagggagaggtgtagaagactgcaggcctcacgggaacagcatcaattccaccgggatgttgaagatgaaatactgtgggtcactgaaaggttgccaatggcatcctccatggagcatggcaaagatttgcctagcgtccaacttctgatgaagaaaaaccagaccttacagaaggaaatccagggccacgaacctaggatcgccgatcttcgtgaacgccaaagagccctgggtgccgccgccgccggtccagaattggccgaactgcaggagatgtggaagagactgggacacgaattggagctgcgtgggaagaggttagaggacgccctgcgtgctcagcagttttaccgagacgccgcggaggcagaggcctggatgggggaacaggagttgcacatgatggggcaggaaaaggcaaaagatgagctgagtgcacaggcagaagtgaaaaagcaccaagtgctcgagcaggcccttgccgactacgctcagaccattcaccaactggctgcctcatctcaagatatgattgaccacgagcacccggagtcaacccgaatatcaatcaggcaggcccaggtcgacaaactgtacgcaggacttaaagagctggccggggaaaggcgagaacgtttgcaggaacacctccgtctctgtcaactcagaagagaactcgacgatctcgaacagtggatccaggagagagaagtggtcgccgccagtcacgagctcgggcaagattacgagcacgttacaatgttgcgggataagttcagggagtttagtagagacacttctacgattggtcaagagagggtggatagtgccaacgcgctcgcgaacggtctgattgcgggaggccacgccgcgagggcaacagtggccgagtggaaggattcactgaatgaagcatgggctgacctgctggaactcttggacacccggggccaggttctggccgccgcctacgaactccagcggttcttgcatggagcacgacaggccctggcccgcgtccaacataaacagcagcagttacccgacggtacaggccgggatctgaatgctgctgaggccttgcaacggcgacactgcgcttatgaacatgatatccaagccctgagcccacaagtccagcaagtgcaagacgacggccatcggctgcagaaagcctacgctggcgacaaagccgaagaaattggaaggcatatgcaggccgtggcagaagcctgggcccagcttcaggggtcttcagcggcacgccggcagctgctcctagatactacagataagtttcgcttcttcaaagccgttcgcgaactcatgctgtggatggacgaggtcaatcttcagatggacgcccaggaaagacctcgtgacgtgtcatcagcagatctcgtcatcaagaatcaacaaggtattaaagctgagattgaagcacgtgctgaccgtttttcgtcctgcattgacatgggcaaagaattactggctcggagccattacgctgcagaagaaatctccgagaaattaagccagttgcaggctcgccgccaggagactgccgagaagtggcaggaaaaaatggattggctgcagctcgtcctcgaggtactggtatttggacgtgacgccggaatggccgaggcttggctctgcagccaagagcctctcgtgcgttcagctgaattgggctgcactgtcgacgaagtggaatcactgatcaagcgacatgaggctttccagaaatctgccgtggcctgggaagaacggttctgcgcattagagaagcttaccgccctcgaagagagagaaaaggagaggaaacggaagagagaggaggaagaacggaggaaacagccaccggccccagaacccaccgcaagcgtgccccccggtgacctggtggggggacagactgcctcagataccacatgggacggcacccagcctcgtccaccacctagcacccaggcccccagtgtcaacggagtctgcactgacggagaacccagccaacccttgctgggccagcagcggctggagcactcatcctttcctgagggaccaggcccaggatccggggacgaggccaacgggccgaggggtgagcggcagactcgcacccgtggtcctgccccctctgccatgcctcagtctcggagtaccgagtctgcccatgccgccactctgcccccgagaggccctgagccttcggcccaggagcagatggagggcatgttatgtcgtaagcaagagatggaagcctttgggaaaaaggccgctaacagatcttggcaaaacgtctattgcgtccttaggagggggtcattagggttctataaggatgcaaaggcagcttcagctggggttccctaccacggggaggtgcccgtcagcctcgcccgagctcagggctctgtggccttcgactacagaaaaagaaagcacgtttttaagctggggctgcaggacggaaaggagtacttgtttcaagcaaaagacgaggctgagatgagctcatggcttagagtggtgaacgcagcaattgcaacagcatcttcggcctcaggtgagcccgaggaaccggtcgtgccaagcacaacaaggggtatgactcgagcgatgaccatgccacctgttagtccagtgggagccgaagggcccgtggttctgcggtccaaggacgggcgggagagggagcgagagaagaggtttagcttcttcaaaaaaaataagtag

SEQ ID NO: 285015 - DNA, 7173 bp, Artificial Sequence
  derived and/or modified sequence
atgagcagcaccctgagccccacagactttgacagcctggagatccagggccagtacagcgacatcaacaaccgctgggacctgcctgacagcgactgggacaatgacagcagcagcgcccggctgtttgagaggagccgcatcaaggccctggctgatgagcgggaggccgtgcagaagaagaccttcaccaagtgggtgaacagccacctggcccgggtgacctgccgggtgggggacctgtacagcgacctgagagatggaagaaacctgctgcggctgctggaggtgctgtctggagagatcctgcccaagcccaccaagggccgcatgaggatccactgcctggagaatgtggacaaggccctgcagttcctgaaggagcagaaggtgcacctggagaacatgggcagccatgacatcgtggatggcaaccaccggctgaccctgggcctggtgtggaccatcatcctgcgcttccagatccaggacatctctgtggagacagaggacaacaaggagaagaagagcgccaaggatgccctgctgctgtggtgccagatgaagacagctggctacccaaatgtgaatgtgcacaacttcaccacctcctggagagatggcctggccttcaatgccatcgtgcacaagcacaggccagacctgctggactttgagagcctgaagaagtgcaatgcccactacaacctgcagaatgccttcaacctggccgagaaggagctgggcctgaccaagctgctggaccctgaagatgtgaatgtggaccagccagatgagaagagcatcatcacctacgtggccacctactaccactacttcagcaagatgaaggccctggccgtggagggcaagagaattggcaaggtgctggaccacgccatggaggccgagcggctggtggagaagtatgagagcctggccagcgagctgctgcagtggattgagcagaccatcgtgaccctgaatgaccggcagctggccaacagcctgagcggcgtgcagaaccagctgcagagcttcaacagctacagaacagtggagaagccacccaagttcacagagaagggcaacctggaggtgctgctcttcaccatccagagcaagctgcgggccaacaaccagaaggtgtacaccccccgggagggccgcctcatcagtgacatcaacaaggcctgggagcggctggagaaggccgagcacgagcgggagctggccctgaggacagagctgatccggcaggagaagctggagcagctggccgccaggtttgacaggaaggccgccatgagggagacctggctgtctgagaaccagaggctggtgtcccaggacaactttggcctggagctggccgctgtggaggccgctgtgaggaagcatgaggccatcgagacagacatcgtggcctacagcggccgggtgcaggccgtggatgctgtggccgctgagctggccgctgagcgctaccatgacatcaagagaattgctgcccggcagcacaacgtggcccggctgtgggacttcctgcggcagatggtggccgcccggcgggagcggctgctgctgaacctggagctgcagaaggtgttccaggacctgctgtacctgatggactggatggaggagatgaagggccgcctgcagagccaggacctgggccgccacctggccggcgtggaggacctgctgcagctgcacgagctggtggaggccgacattgctgtgcaggccgagcgggtgcgggctgtgtctgccagcgccctgcgcttctgcaaccctgggaaggagtaccggccctgtgacccccagctggtgtctgagcgggtggccaagctggagcagagctatgaggccctgtgtgagctggccgccgcccggcgggcccggctggaggagagccggcggctgtggaggttcctgtgggaggtgggggaggccgaggcctgggtgcgggagcagcagcacctgctggccagcgctgacaccggccgggacctgaccggggccctgcggctgctgaacaagcacacagccctgcggggggagatgagcggccgcctgggccccctgaagctgaccctggagcagggccagcagctggtggccgagggccaccctggggccagccaggccagcgcccgggctgctgagctgcaggcccagtgggagcggctggaggccctggccgaggagcgggcccagaggctggcccaggccgccagcctgtaccagttccaggctgatgccaatgacatggaggcctggctggtggatgccctgcggctggtgagcagccctgagctgggccatgatgagttcagcacccaggccctggcccggcagcaccgggccctggaggaggagatccgcagccaccggcccaccctggatgccctgcgggagcaggccgccgccctgccccccaccctgagcaggaccccagaggtgcagagccgggtgcccaccctggagcggcactatgaggagctgcaggcccgggccggggagcgggcccgggccctggaggccgccctggccctgtacaccatgctgtctgaggccggggcctgtggcctgtgggtggaggagaaggagcagtggctgaatggcctggccctgcctgagcggctggaggacctggaggtggtgcagcagagatttgagaccctggagcctgagatgaacaccctggccgcccagatcacagctgtgaatgacattgctgagcagctgctgaaggccaaccccccaggcaaggacagaattgtgaacacccaggagcagctgaaccaccgctggcagcagttccggcggctggctgatggcaagaaggccgccctgaccagcgccctgagcatccagaactaccacctggagtgcacagagacccaggcctggatgagggagaagaccaaggtgattgagagcacccagggcctgggcaatgacctggccggcgtgctggccctgcagaggaagctggccggcacagagcgggacctggaggccatcgccgcccgggtgggggagctgacccgggaggccaatgccctggccgccggccacccagcccaggccgtggccatcaatgcccggctgcgggaggtgcagacaggctgggaggacctgcgggccaccatgagaagaagagaggagagcctgggggaggcccggcggctgcaggacttcctgcggagcctggatgacttccaggcctggctgggccgcacccagacagctgtggccagcgaggagggccctgccaccctgcctgaggccgaggccctgctggcccagcacgccgccctgcggggggaggtggagcgggcccagagcgagtacagccggctgcgggccctgggggaggaggtgacccgggaccaggccgacccccagtgcctcttcctgcggcagaggctggaggccctgggcaccggctgggaggagctgggccgcatgtgggagagccggcagggccgcctggcccaggcccacggcttccagggcttcctgagagatgcccggcaggccgagggcgtgctgagcagccaggagtatgtgctgagccacacagagatgcctggcaccctgcaggccgcagatgctgccatcaagaagctggaggacttcatgagcaccatggatgccaacggggagcgcatccacggcctgctggaggccggccggcagctggtgtctgagggcaacatccacgccgacaagatccgggagaaggctgacagcattgaaagaagacacaagaagaaccaggatgctgcccagcagttcctgggccgcctgcgggacaaccgggagcagcagcacttcctgcaggactgccacgagctgaagctgtggattgatgagaagatgctgacagcccaggatgtgtcctatgatgaggccaggaacctgcacaccaagtggcagaagcaccaggccttcatggccgagctggccgccaacaaggactggctggacaaggtggacaaggagggccgggagctgaccctggagaagccagagctgaaggccctggtgtctgagaagctgcgggacctgcaccggcgctgggatgagctggagaccaccacccaggccaaggcccggagcctgtttgatgccaacagagctgagctgtttgcccagagctgctgtgccctggagagctggctggagagcctgcaggcccagctgcacagtgatgattatggcaaggacctgacctctgtgaacatcctgctgaagaagcagcagatgctggagtgggagatggctgtgcgggagaaggaggtggaggccatccaggcccaggccaaggccctggcccaggaggaccagggcgctggggaggtggagaggaccagcagagctgtggaggagaagttccgggccctgtgccagcccatgagggagcgctgccggcggctgcaggccagccgggagcagcaccagttccacagagatgtggaggatgagatcctgtgggtgacagagcggctgcccatggccagctccatggagcacggcaaggacctgcccagcgtgcagctgctgatgaagaagaaccagaccctgcagaaggagatccagggccacgagcccagaattgctgacctgcgggagcggcagagggccctgggcgctgctgctgctggccctgagctggccgagctgcaggagatgtggaagaggctgggccacgagctggagctgcggggcaagaggctggaggatgccctgcgggcccagcagttctacagagatgctgctgaggccgaggcctggatgggagagcaggagctgcacatgatgggccaggagaaggccaaggatgagctgagcgcccaggccgaggtgaagaagcaccaggtgctggagcaggccctggccgactatgcccagaccatccaccagctggccgccagcagccaggacatgattgaccacgagcaccctgagagcacccgcatcagcatccggcaggcccaggtggacaagctgtatgccggcctgaaggagctggccggggagcggcgggagcggctgcaggagcacctgcggctgtgccagctgcggcgggagctggatgacctggagcagtggatccaggagcgggaggtggtggccgccagccatgagctgggccaggactatgagcacgtgaccatgctgcgggacaagttccgggagttcagccgggacaccagcaccatcggccaggagcgggtggacagcgccaatgccctggccaacggcctgattgctgggggccatgctgcccgggccaccgtggccgagtggaaggacagcctgaatgaggcctgggccgacctgctggagctgctggacacccggggccaggtgctggccgccgcctatgagctgcagcgcttcctgcacggggcccggcaggccctggcccgggtgcagcacaagcagcagcagctgcctgatggcaccggccgggacctgaatgctgctgaggccctgcagaggaggcactgtgcctatgaacatgacatccaggccctgagcccccaggtgcagcaggtgcaggatgatggccaccggctgcagaaggcctatgctggggacaaggccgaggagatcggccgccacatgcaggccgtggccgaggcctgggcccagctgcagggcagcagcgctgcccggcggcagctgctgctggacaccacagacaagttccgcttcttcaaggctgtgcgggagctgatgctgtggatggatgaggtgaacctgcagatggatgcccaggagcggcccagagatgtgtcctctgctgacctggtgatcaagaaccagcagggcatcaaggccgagattgaggcccgggctgaccgcttcagcagctgcatcgacatgggcaaggagctgctggcccggagccactacgccgctgaggagatcagcgagaagctgagccagctgcaggcccggcggcaggagacagctgagaagtggcaggagaagatggactggctgcagctggtgctggaggtgctggtgtttggaagagatgctggcatggccgaggcctggctgtgcagccaggagcccctggtgcgctctgctgagctgggctgcaccgtggatgaggtggagagcctcatcaagagacatgaggccttccagaagtctgctgtggcctgggaggagcgcttctgtgccctggagaagctgacagccctggaggagcgggagaaggagaggaagaggaagcgggaggaggaggagaggaggaagcagcccccagcccctgagcccacagcctctgtgcccccaggggacctggtgggcggccagacagccagtgacaccacctgggatggcacccagccccggcccccacccagcacccaggcccccagcgtgaatggagtgtgcacagatggagagcccagccagcccctgctgggccagcagaggctggagcacagcagcttccctgagggccctggccctggcagcggagatgaggccaacggccccagaggagagcggcagaccaggacccggggccctgcccccagcgccatgccccagagccgcagcacagagagcgcccatgctgccaccctgcccccccggggccctgagcccagcgcccaggagcagatggagggcatgctgtgcaggaagcaggagatggaggccttcggcaagaaggccgccaacagatcctggcagaatgtgtactgtgtgctgcggcggggcagcctgggcttctacaaggatgccaaggccgccagcgctggggtgccctaccatggagaggtgcctgtgtccctggcccgggcccagggctctgtggcctttgactacaggaagaggaagcacgtgttcaagctgggcctgcaggacggcaaggagtacctgttccaggccaaggatgaggccgagatgagctcctggctgcgggtggtgaatgctgccatcgccacagccagcagcgccagcggggagcctgaggagcctgtggtgcccagcaccacccggggcatgacccgggccatgaccatgcctcctgtgtcccctgtgggcgctgagggccctgtggtgctgcggagcaaggatggccgggagcgggagcgggagaagcgcttctccttcttcaagaagaacaagtag

SEQ ID NO: 285016 - DNA, 7098 bp, Artificial Sequence
  derived and/or modified sequence
atgagcagcaccctgagccccacagactttgacagcctggagatccagggccagtacagcgacatcaacaaccgctgggacctgcctgacagcgactgggacaatgacagcagcagcgcccggctgtttgagaggagccgcatcaaggccctggctgatgagcgggaggccgtgcagaagaagaccttcaccaagtgggtgaacagccacctggcccgggtgacctgccgggtgggggacctgtacagcgacctgagagatggaagaaacctgctgcggctgctggaggtgctgtctggagagatcctgcccaagcccaccaagggccgcatgaggatccactgcctggagaatgtggacaaggccctgcagttcctgaaggagcagaaggtgcacctggagaacatgggcagccatgacatcgtggatggcaaccaccggctgaccctgggcctggtgtggaccatcatcctgcgcttccagatccaggacatctctgtggagacagaggacaacaaggagaagaagagcgccaaggatgccctgctgctgtggtgccagatgaagacagctggctacccaaatgtgaatgtgcacaacttcaccacctcctggagagatggcctggccttcaatgccatcgtgcacaagcacaggccagacctgctggactttgagagcctgaagaagtgcaatgcccactacaacctgcagaatgccttcaacctggccgagaaggagctgggcctgaccaagctgctggaccctgaagatgtgaatgtggaccagccagatgagaagagcatcatcacctacgtggccacctactaccactacttcagcaagatgaaggccctggccgtggagggcaagagaattggcaaggtgctggaccacgccatggaggccgagcggctggtggagaagtatgagagcctggccagcgagctgctgcagtggattgagcagaccatcgtgaccctgaatgaccggcagctggccaacagcctgagcggcgtgcagaaccagctgcagagcttcaacagctacagaacagtggagaagccacccaagttcacagagaagggcaacctggaggtgctgctcttcaccatccagagcaagctgcgggccaacaaccagaaggtgtacaccccccgggagggccgcctcatcagtgacatcaacaaggcctgggagcggctggagaaggccgagcacgagcgggagctggccctgaggacagagctgatccggcaggagaagctggagcagctggccgccaggtttgacaggaaggccgccatgagggagacctggctgtctgagaaccagaggctggtgtcccaggacaactttggcctggagctggccgctgtggaggccgctgtgaggaagcatgaggccatcgagacagacatcgtggcctacagcggccgggtgcaggccgtggatgctgtggccgctgagctggccgctgagcgctaccatgacatcaagagaattgctgcccggcagcacaacgtggcccggctgtgggacttcctgcggcagatggtggccgcccggcgggagcggctgctgctgaacctggagctgcagaaggtgttccaggacctgctgtacctgatggactggatggaggagatgaagggccgcctgcagagccaggacctgggccgccacctggccggcgtggaggacctgctgcagctgcacgagctggtggaggccgacattgctgtgcaggccgagcgggtgcgggctgtgtctgccagcgccctgcgcttctgcaaccctgggaaggagtaccggccctgtgacccccagctggtgtctgagcgggtggccaagctggagcagagctatgaggccctgtgtgagctggccgccgcccggcgggcccggctggaggagagccggcggctgtggaggttcctgtgggaggtgggggaggccgaggcctgggtgcgggagcagcagcacctgctggccagcgctgacaccggccgggacctgaccggggccctgcggctgctgaacaagcacacagccctgcggggggagatgagcggccgcctgggccccctgaagctgaccctggagcagggccagcagctggtggccgagggccaccctggggccagccaggccagcgcccgggctgctgagctgcaggcccagtgggagcggctggaggccctggccgaggagcgggcccagaggctggcccaggccgccagcctgtaccagttccaggctgatgccaatgacatggaggcctggctggtggatgccctgcggctggtgagcagccctgagctgggccatgatgagttcagcacccaggccctggcccggcagcaccgggccctggaggaggagatccgcagccaccggcccaccctggatgccctgcgggagcaggccgccgccctgccccccaccctgagcaggaccccagaggtgcagagccgggtgcccaccctggagcggcactatgaggagctgcaggcccgggccggggagcgggcccgggccctggaggccgccctggccctgtacaccatgctgtctgaggccggggcctgtggcctgtgggtggaggagaaggagcagtggctgaatggcctggccctgcctgagcggctggaggacctggaggtggtgcagcagagatttgagaccctggagcctgagatgaacaccctggccgcccagatcacagctgtgaatgacattgctgagcagctgctgaaggccaaccccccaggcaaggacagaattgtgaacacccaggagcagctgaaccaccgctggcagcagttccggcggctggctgatggcaagaaggccgccctgaccagcgccctgagcatccagaactaccacctggagtgcacagagacccaggcctggatgagggagaagaccaaggtgattgagagcacccagggcctgggcaatgacctggccggcgtgctggccctgcagaggaagctggccggcacagagcgggacctggaggccatcgccgcccgggtgggggagctgacccgggaggccaatgccctggccgccggccacccagcccaggccgtggccatcaatgcccggctgcgggaggtgcagacaggctgggaggacctgcgggccaccatgagaagaagagaggagagcctgggggaggcccggcggctgcaggacttcctgcggagcctggatgacttccaggcctggctgggccgcacccagacagctgtggccagcgaggagggccctgccaccctgcctgaggccgaggccctgctggcccagcacgccgccctgcggggggaggtggagcgggcccagagcgagtacagccggctgcgggccctgggggaggaggtgacccgggaccaggccgacccccagtgcctcttcctgcggcagaggctggaggccctgggcaccggctgggaggagctgggccgcatgtgggagagccggcagggccgcctggcccaggcccacggcttccagggcttcctgagagatgcccggcaggccgagggcgtgctgagcagccaggagtatgtgctgagccacacagagatgcctggcaccctgcaggccgcagatgctgccatcaagaagctggaggacttcatgagcaccatggatgccaacggggagcgcatccacggcctgctggaggccggccggcagctggtgtctgagggcaacatccacgccgacaagatccgggagaaggctgacagcattgaaagaagacacaagaagaaccaggatgctgcccagcagttcctgggccgcctgcgggacaaccgggagcagcagcacttcctgcaggactgccacgagctgaagctgtggattgatgagaagatgctgacagcccaggatgtgtcctatgatgaggccaggaacctgcacaccaagtggcagaagcaccaggccttcatggccgagctggccgccaacaaggactggctggacaaggtggacaaggagggccgggagctgaccctggagaagccagagctgaaggccctggtgtctgagaagctgcgggacctgcaccggcgctgggatgagctggagaccaccacccaggccaaggcccggagcctgtttgatgccaacagagctgagctgtttgcccagagctgctgtgccctggagagctggctggagagcctgcaggcccagctgcacagtgatgattatggcaaggacctgacctctgtgaacatcctgctgaagaagcagcagatgctggagtgggagatggctgtgcgggagaaggaggtggaggccatccaggcccaggccaaggccctggcccaggaggaccagggcgctggggaggtggagaggaccagcagagctgtggaggagaagttccgggccctgtgccagcccatgagggagcgctgccggcggctgcaggccagccgggagcagcaccagttccacagagatgtggaggatgagatcctgtgggtgacagagcggctgcccatggccagctccatggagcacggcaaggacctgcccagcgtgcagctgctgatgaagaagaaccagaccctgcagaaggagatccagggccacgagcccagaattgctgacctgcgggagcggcagagggccctgggcgctgctgctgctggccctgagctggccgagctgcaggagatgtggaagaggctgggccacgagctggagctgcggggcaagaggctggaggatgccctgcgggcccagcagttctacagagatgctgctgaggccgaggcctggatgggagagcaggagctgcacatgatgggccaggagaaggccaaggatgagctgagcgcccaggccgaggtgaagaagcaccaggtgctggagcaggccctggccgactatgcccagaccatccaccagctggccgccagcagccaggacatgattgaccacgagcaccctgagagcacccgcatcagcatccggcaggcccaggtggacaagctgtatgccggcctgaaggagctggccggggagcggcgggagcggctgcaggagcacctgcggctgtgccagctgcggcgggagctggatgacctggagcagtggatccaggagcgggaggtggtggccgccagccatgagctgggccaggactatgagcacgtgaccatgctgcgggacaagttccgggagttcagccgggacaccagcaccatcggccaggagcgggtggacagcgccaatgccctggccaacggcctgattgctgggggccatgctgcccgggccaccgtggccgagtggaaggacagcctgaatgaggcctgggccgacctgctggagctgctggacacccggggccaggtgctggccgccgcctatgagctgcagcgcttcctgcacggggcccggcaggccctggcccgggtgcagcacaagcagcagcagctgcctgatggcaccggccgggacctgaatgctgctgaggccctgcagaggaggcactgtgcctatgaacatgacatccaggccctgagcccccaggtgcagcaggtgcaggatgatggccaccggctgcagaaggcctatgctggggacaaggccgaggagatcggccgccacatgcaggccgtggccgaggcctgggcccagctgcagggcagcagcgctgcccggcggcagctgctgctggacaccacagacaagttccgcttcttcaaggctgtgcgggagctgatgctgtggatggatgaggtgaacctgcagatggatgcccaggagcggcccagagatgtgtcctctgctgacctggtgatcaagaaccagcagggcatcaaggccgagattgaggcccgggctgaccgcttcagcagctgcatcgacatgggcaaggagctgctggcccggagccactacgccgctgaggagatcagcgagaagctgagccagctgcaggcccggcggcaggagacagctgagaagtggcaggagaagatggactggctgcagctggtgctggaggtgctggtgtttggaagagatgctggcatggccgaggcctggctgtgcagccaggagcccctggtgcgctctgctgagctgggctgcaccgtggatgaggtggagagcctcatcaagagacatgaggccttccagaagtctgctgtggcctgggaggagcgcttctgtgccctggagaagctgacagccctggaggagcgggagaaggagaggaagaggaagcgggaggaggaggagaggaggaagcagcccccagcccctgagcccacagcctctgtgcccccaggggacctggtgggcggccagacagccagtgacaccacctgggatggcacccagccccggcccccacccagcacccaggcccccagcgtgaatggagtgtgcacagatggagagcccagccagcccctgctgggccagcagaggctggagcacagcagcttccctgagggccctggccctggcagcggagatgaggccaacggccccagaggagagcggcagaccaggacccggggccctgcccccagcgccatgccccagagccgcagcacagagagcgcccatgctgccaccctgcccccccggggccctgagcccagcgcccaggagcagatggagggcatgctgtgcaggaagcaggagatggaggccttcggcaagaaggccgccaacagatcctggcagaatgtgtactgtgtgctgcggcggggcagcctgggcttctacaaggatgccaaggccgccagcgctggggtgccctaccatggagaggtgcctgtgtccctggcccgggcccagggctctgtggcctttgactacaggaagaggaagcacgtgttcaagctgggcctgcaggacggcaaggagtacctgttccaggccaaggatgaggtgtcctgccccagctgcagcagcctgtctgtgcccttccagaagctgcctgctgctgacagccccagcttccctgtgctgcccctcttccctggcctggtgctgtgtgggaagacaggctgtgtgcggcggccccaccaggccgccctgcctgtgtag

SEQ ID NO: 285017 - DNA, 7173 bp, Artificial Sequence
  derived and/or modified sequence
atgagcagcaccctgagccccaccgacttcgacagcctggagatccagggccagtactccgatataaacaataggtgggatcttcctgacagcgactgggataatgattcctcatcggcccgactttttgaaaggtcaagaataaaggctctcgccgacgagcgcgaggccgtacagaaaaaaacgttcaccaagtgggttaacagccatcttgccagagttacctgcagggtgggcgatctgtattccgacttgcgggacggcagaaacctgctcaggctgctggaagtcctgagcggggagattctgcctaaacccacgaaagggcggatgagaattcactgtctggagaacgttgacaaggccctgcagtttttgaaagagcagaaggtccacttggaaaacatgggaagccacgacatcgtggacggcaatcaccgccttaccctcggtctggtgtggactattatcctgcggttccagatccaagacatatctgtcgagaccgaggacaataaggagaaaaagtccgccaaagacgctctactgttatggtgccagatgaagacagcaggctacccaaacgttaatgttcacaatttcactacctcgtggcgcgacgggttggcattcaacgctatcgtccacaaacatcgccctgatctccttgatttcgagagcttgaagaaatgtaatgcccattacaatcttcagaatgcctttaatttggccgaaaaggaactgggcctcaccaagctgctcgatcccgaagacgtcaatgtggatcagcccgacgagaaatctatcattacatatgtcgccacatattaccactacttttccaagatgaaggctttggcagtagagggcaaacggattggtaaagtccttgaccacgccatggaagcagagagacttgtagagaagtatgaatcactagcctccgaacttctgcagtggatagaacagaccatagtcaccttgaatgatcgccagctggctaacagtctgtctggtgtgcagaatcagttgcagtctttcaacagttatcgcaccgtggagaaaccccctaagttcacagaaaaaggaaatctggaagtcctgctatttaccattcagagtaaattgagggccaataatcagaaggtctataccccacgagaggggcggctgatatccgatattaataaggcgtgggagagactggaaaaggcggagcacgagagagaactcgccctacgaaccgaactgattcgacaagagaaactggagcagctggctgcccggttcgatcgaaaggctgctatgcgcgagacgtggctgtccgaaaatcagagactcgtctcacaggataattttggtctggagctggctgctgtggaagccgccgtcagaaaacacgaggctatcgagacagatatcgtagcctactctggccgcgtgcaggctgttgatgctgtcgctgctgaactcgcggctgaacgctatcatgatataaagcgtatcgccgccagacaacacaacgtcgctagactgtgggatttcctccgccagatggttgcagcacgcagagaacgcctcctacttaacttggagctgcagaaagtgttccaggacctgctgtacctcatggattggatggaggagatgaagggtcgccttcaatcccaggacctggggcgccacttagctggcgtggaggacctcttgcaactccacgaactggtcgaagccgacattgcagtccaggccgagagagtaagggccgtgtcagcatcagccttaaggttctgtaacccaggcaaagaatatcgaccatgtgatccgcaattagtctcagaaagggtggctaaactggagcagtcttatgaagcgctgtgcgaactcgccgctgcccggagagctcgcctggaagagtctagaagattgtggagattcctctgggaggtgggggaagccgaagcatgggtgcgggagcagcagcacctcttggcatccgccgacacgggccgcgacctgactggcgccctgagactgctgaacaagcatacggcactgcgcggagaaatgtcaggaaggctcggaccgctcaagttaaccctcgagcaaggacagcaactggttgctgagggccaccccggggcgtcccaggcaagtgccagagccgctgagttgcaggcgcagtgggagcggctggaagccttagcagaggaacgggcccagagattggcccaagccgccagcctgtaccagttccaggccgacgcaaatgacatggaagcttggctggtggacgctctgcgtctggtttccagccccgagctgggtcacgatgaattcagtactcaggcgctggctcggcagcacagagccctcgaggaagaaatcaggagccatcgcccaactctcgatgccctgcgtgagcaggcagccgctctgccccctactctgtcgcgtacaccagaagtccaatctcgggttcccactctggagcggcactacgaggagcttcaggcaagagctggcgagagagctagagctctggaggctgcccttgctctctacacgatgttgtccgaggctggagcctgtggcctttgggtcgaggaaaaggagcagtggttgaacgggttagctttgcccgagcggctagaggatctagaagtggtgcaacagcgcttcgagactttagagcctgagatgaacacgctcgccgcgcagataaccgccgtgaatgatattgccgaacagctcttgaaggccaatcctccaggaaaggatcggatagtaaatactcaagaacagcttaatcataggtggcagcaattcaggaggctggctgatggcaaaaaagctgccttgactagcgcactgtcaatacagaactaccatctggagtgtactgaaactcaggcctggatgcgcgagaaaaccaaagtgattgagtccactcagggcttaggcaacgacctggcaggtgtactggccctgcaacggaaactagccggcaccgagagagacctggaggccatcgccgccagagttggagagttaactagagaagccaacgctttggcagctgggcacccagctcaggccgtcgccataaacgctaggttgcgggaggtccagacaggctgggaagatcttcgagctaccatgaggcgtcgtgaggagagcttgggtgaggcacgaaggctccaggactttcttcggtccctggacgacttccaggcctggctcggacgtacacagactgctgtcgcatctgaggagggtcccgcgacattgcccgaggccgaagccctgctggcccagcacgctgcgctccgcggcgaagtggaacgcgcccagtctgagtatagtagactcagggctctgggagaggaagttacccgggatcaagccgaccctcagtgcctgtttctgaggcaacggttggaggcacttggcacaggctgggaagaattgggtagaatgtgggagtcgaggcagggcagactggcgcaggctcacggcttccagggtttcttacgtgacgcaagacaagccgagggcgttctctcaagccaagagtacgtgctgtcacacactgagatgccaggcactttgcaggcagccgacgcggcaatcaagaagttggaagacttcatgtcgacaatggacgccaacggggagaggatccatggtctgctggaggcagggagacaacttgtgagcgagggcaatatacacgccgacaaaattcgagagaaagccgacagtatcgagaggagacataaaaagaaccaggacgctgcccaacagtttctgggaaggcttcgcgataatcgcgaacaacagcacttcttacaggactgtcatgaactaaagttatggattgatgaaaagatgcttacagcgcaggatgtatcgtacgacgaagcccggaatctgcataccaagtggcagaagcaccaggctttcatggcggaacttgccgctaacaaagattggctggataaggtcgataaagaaggacgtgagctcaccctggagaagccggaattaaaagcactggtgagtgagaagctccgtgacctgcaccgccggtgggacgaactcgaaaccactacacaggctaaagcgcggagcctgttcgatgctaacagagctgaactttttgcccagagttgttgcgcgctggaatcttggctagaatctttacaggcccagctgcattccgatgattacgggaaggatttaacctccgttaatatcctactcaaaaaacagcagatgctggagtgggagatggccgtcagagagaaagaagtggaggcaatacaggcccaggcaaaggctttagcccaggaagatcaaggtgctggcgaagtggagcgcacctctcgcgcagtcgaggagaagtttagagctttgtgccagcctatgcgggagcgatgccggaggttgcaggcctccagagaacagcaccagttccaccgggatgttgaagacgaaatcttgtgggtgactgagaggctcccaatggcgtccagtatggaacatggtaaggatttaccaagcgtacagctacttatgaaaaagaatcagaccctacagaaggagatccagggccatgagccccgaatcgccgacctaagggagcgacagcgggccctgggtgcagccgctgccggaccagagcttgctgagttgcaggagatgtggaaacgacttggacacgaattagagttgcgggggaagaggctggaagatgcacttagagcccagcaattctatagagacgctgcagaagctgaggcctggatgggggagcaggagctccatatgatggggcaggaaaaggcaaaggatgaactgagcgctcaagcagaggtcaagaaacaccaggtgctcgaacaggcacttgccgattacgcacaaaccatccatcagctggcggcctcttctcaggacatgattgatcatgagcacccggagtcaaccaggatcagcatcaggcaggctcaggtggataaattgtacgccggccttaaagagctcgccggagaaaggagagagagactacaggagcacctcaggctctgccaattgcgccgcgagttagatgacttggaacagtggatccaggagagggaagttgtggccgctagccacgagcttggccaggattacgaacacgttactatgcttagggacaagtttcgggaattctcaagggacacaagcaccattggccaggagcgtgtggatagcgccaacgctttagctaacgggctaatcgcaggggggcacgctgcccgggccactgttgcagaatggaaagactccctcaatgaggcctgggccgatctgttagagttgcttgatacccgcggacaggtgcttgcagctgcttacgagctacaaaggtttcttcacggggccagacaagccctggccagggtgcagcataagcagcagcagttacctgatggaaccgggagagacctgaatgctgcggaggctctccagagacgacattgcgcgtatgaacacgacatccaggccctcagcccgcaggtgcaacaggtacaggatgacggtcacaggcttcagaaggcttacgcaggggacaaggcagaggagatcggacgtcatatgcaggcagttgccgaggcttgggctcagctgcagggtagctctgccgcacgacgtcaactcttgctggataccacagacaagtttaggtttttcaaggccgtgagggaactaatgctgtggatggatgaggttaatctccaaatggacgcccaggagcgcccacgggacgtgtcatccgccgatctcgtgatcaaaaatcagcaaggcatcaaagccgagatcgaggcccgcgccgatcgcttcagcagctgtatagatatgggcaaggagctactggctcgctcgcattatgccgcggaggaaattagcgagaaactttcacagctgcaagctcggagacaggaaaccgccgagaaatggcaggaaaaaatggattggctccaacttgtgctggaggttctggtctttggcagagatgccggcatggcagaagcgtggctctgcagccaggaacccctcgtcagaagtgcagagctggggtgtacagtggatgaggttgagagtttgattaaacggcatgaggcattccagaaaagcgcagtggcatgggaagaaaggttctgtgccctagaaaagctgaccgcactggaagagcgggaaaaggaaaggaagcggaaacgggaggaggaggagagacgtaaacagcctcctgctcccgagccaacagccagcgtgccgcctggcgacctggtgggcggccaaacagccagcgacacaacctgggacggcacccaaccaagacccccaccctctacgcaggcacccagcgtcaacggtgtatgtaccgatggcgaacccagtcagccactcttgggccagcagaggctggagcacagcagcttccccgagggtcccggaccaggatcaggagacgaggcaaacgggccaaggggagaacgccagactcggactagagggcctgcaccttcagccatgccacagagcagatctaccgaatcagcccatgcggcgactctgccgccacgggggcccgaaccaagcgcccaggagcagatggaagggatgttatgcaggaagcaggagatggaggcgttcgggaagaaggccgccaatagatcctggcagaacgtgtactgcgttctcaggaggggctctctaggcttttacaaagatgcgaaggccgccagcgccggggtcccctaccacggcgaagttccggtcagcctggcccgggcccagggctctgttgctttcgactatcgcaagaggaaacatgtattcaagttgggacttcaggatggcaaggagtatctgttccaggcaaaggacgaggcagagatgtcctcctggctgcgcgtcgtgaacgccgccatcgcgacagccagtagtgcttccggcgagccagaggagcccgtggtaccctccaccacccgcgggatgacaagggccatgaccatgccccccgtgtctcccgtgggagccgaagggccggtggtactgcgctcaaaggacggacgagaaagagagagagaaaagcggtttagtttttttaagaagaataagtag

SEQ ID NO: 285018 - DNA, 7098 bp, Artificial Sequence
  derived and/or modified sequence
atgagcagcaccctgagccccaccgacttcgacagcctggagatccaaggtcagtatagcgacatcaataacaggtgggatctgcccgacagcgattgggataatgatagctcttctgcacgcctgttcgagcgcagtcgcatcaaggccttagctgatgagcgcgaagccgtgcagaaaaaaacgtttacaaaatgggtgaattctcatctggctcgggtgacctgccgggtaggtgatctgtattccgatctgcgggatggcaggaaccttctgaggctgctggaggtcctgtcaggcgaaatcctgccgaagcctacaaaaggtagaatgcgaatacattgcttggagaatgtggacaaggccctgcaattcctgaaagaacagaaggtccacttggagaatatgggaagccacgacatcgtagatggaaaccacaggctcacgctcggtctggtgtggacgattatcctccgttttcaaatccaggatatttctgtcgaaactgaagacaataaggaaaaaaagtcagcaaaggacgcgctcctcctgtggtgtcaaatgaagactgcaggctacccgaatgtcaacgttcacaatttcacaacatcatggagagatggtctcgccttcaacgcaatcgtacataaacaccggcctgacctcttggatttcgagagcctgaagaagtgcaatgcccactacaatctgcagaacgcatttaatcttgcggaaaaagagctggggcttactaagctgctagatccggaagatgttaatgtggatcagcccgacgagaagtccattatcacctacgtcgccacctactaccattacttctcgaagatgaaagccttggcggtggaggggaagcgtatcggtaaagtacttgatcatgcaatggaagccgaacgactcgttgagaagtatgaatctctggcaagcgagttgctgcaatggatcgaacagacgatagtcaccctcaacgaccggcagttggctaacagcctttccggcgtgcagaaccagctgcagtcatttaacagctacagaaccgtcgagaagccacctaaattcacagagaagggcaatctggaagtcttgctttttacaatccagagtaaactcagagctaacaaccagaaagtctataccccccgggaaggtagactaatctcggatatcaataaagcctgggaacgtcttgagaaagcagagcatgagagagagttggcgctgcgcacagaactaatccgccaagagaaactggaacagttggcagccagattcgatcgaaaagcagctatgcgcgagacctggttaagcgagaatcagcgtttggtctcccaggacaactttggcctggagctggccgcagtggaggcagcagttagaaagcacgaggccatagagaccgacatagtagcctattccggtcgggtccaagcagtagatgccgtggctgcagaactggctgcagaaaggtaccacgacattaagaggatagctgcgcgacagcacaacgtggctcgactgtgggacttcttaaggcagatggtggccgctagacgtgaaaggcttctcctgaacctcgagctgcaaaaggtgtttcaggacctcctgtatctgatggactggatggaggagatgaaaggcaggcttcagagtcaggatttaggccgacacttggctggcgtagaagacttactccagcttcatgagctggtggaggcagatattgcagtgcaggccgaacgggtcagagcggtctccgcgagcgcactccgattttgcaaccccggtaaggagtatcggccctgtgacccgcaattggtgtctgaaagagtggcaaagttagagcagtcatacgaagccctctgtgagctggccgctgcccggcgagctaggctcgaggaaagccggagactgtggcggttcctctgggaagtgggtgaggctgaggcttgggtcagagagcagcaacaccttctcgccagcgctgacaccgggagggacctcaccggcgctctgcggctattgaataagcacacggccctccggggcgagatgagcgggaggcttgggcccttgaagctcacactagagcaaggacagcagctggtcgccgaaggacaccctggcgcctcccaggctagcgcgcgggccgccgagcttcaggcccagtgggaaaggctcgaggcactggcggaggagcgggcccagagactcgcccaagcagcatcactttaccagtttcaggccgatgcaaatgatatggaggcttggctagtagacgccctacgcctggtcagcagccctgaattaggtcacgacgaattttctacacaagcgctcgcaagacagcaccgcgctctggaggaggagatccggtcccatcggcccacactcgacgccctaagagaacaggctgccgctctccccccaacattgtcccggacccctgaagtgcagagccgcgtacctacactggagaggcattacgaggaattacaagcgagagcgggcgagagagctagggcgcttgaggccgcccttgccctgtacacaatgctgtccgaggcaggtgcatgtggcctgtgggttgaggaaaaggagcagtggctgaacggcctggctctcccagagaggctagaagatttagaagtggtgcagcagcggtttgagaccctcgagcccgagatgaataccctggccgcccagatcacagctgtcaacgatattgctgagcaattactgaaagctaacccgccaggaaaggaccggattgtgaacacccaggaacagcttaaccatagatggcaacaattccgaaggttagctgatggtaagaaagcggccctgaccagtgcactttctatacagaactaccacctcgagtgtaccgagactcaggcttggatgagagagaagactaaagtgatagagtcaacacagggtcttgggaacgacttggctggggtcctcgctctccagcgaaagctcgctggtactgagcgcgatctggaagccattgccgcacgagtcggtgagctgaccagggaagctaatgctctggccgcaggacaccctgctcaagcagttgccattaacgccaggctgcgggaggttcaaactggctgggaggacctgcgagccacaatgcgacgacgggaagaaagtctcggagaagctagacgcctccaggatttccttagatcactggacgacttccaagcttggctaggaagaacccagaccgccgtggcaagtgaggaagggccggcaacgttaccggaagccgaggccttactagcccaacacgccgccctcagaggcgaagtggagcgagcgcagagcgaatactcccggctgagggcactgggtgaagaagtcaccagggaccaggctgaccctcagtgcctcttcctccggcaaagattggaggccctcggtacgggctgggaggagctgggaagaatgtgggaatcacggcagggacggctggcccaagcccatggctttcaggggtttctacgggacgcaagacaagcagaaggggtgctctcttcccaggagtatgtgctgagtcatacagagatgcccggaacgctccaggccgccgatgccgctataaaaaaactggaagatttcatgtctacaatggacgctaacggcgagagaattcatggcctgttggaagctggcaggcagctcgtgtcagaggggaacatacacgctgataaaattcgggagaaggctgacagtatcgaaagaagacacaaaaagaatcaggacgcagcccaacagtttctcggcaggctgagagacaaccgtgagcagcagcacttccttcaggattgccacgaactgaagctttggatcgatgagaagatgctaacggcgcaggacgtgtcgtacgacgaagcacgcaacctccataccaagtggcagaagcaccaggccttcatggctgagctagctgcgaacaaggattggctcgataaggtagataaagaaggccgcgaacttacgctggaaaagcctgagctgaaagccctggtctctgagaaactcagggatctccaccgcaggtgggatgaactcgagaccaccacacaagccaaggctagatcattgttcgacgctaacagggccgaactattcgcccagtcctgctgtgcactggaatcttggttggaaagcctccaggctcaactccactcagacgattacggtaaggatcttacttccgtcaatatattactgaaaaagcaacagatgcttgagtgggaaatggctgtaagagagaaagaagtggaggccatccaggctcaagctaaggcactggcacaggaggaccaaggagccggagaggttgaacggacaagtcgagccgtcgaagaaaaattccgagcactctgtcaaccaatgcgagaaaggtgcaggcggttgcaggcatcccgcgagcaacatcaattccaccgggacgtggaggacgaaatcctctgggttactgagagactgcctatggcttcctcgatggaacatgggaaagacctcccgagcgttcagctactgatgaagaaaaaccaaacgctgcagaaggagattcagggccacgagccaaggatcgcagatctgagagaaaggcaacgcgccctcggcgcagctgctgcaggccctgagctagctgaactgcaggagatgtggaagaggctgggccacgagctggagctgaggggtaagcgcctcgaagatgcgctaagggcgcagcagttctacagggatgctgccgaggccgaagcctggatgggcgagcaggagctacatatgatgggccaagaaaaggctaaggatgagctgtcagcccaggccgaagttaagaagcaccaggttttggaacaggccttggctgactacgcccagacaatacaccaactcgcggctagctcacaagatatgatagatcacgagcatccagagtccacaaggatatcgattcggcaggctcaagtggataaactgtacgccggactgaaagaactggccggcgaacgaagggaaagactccaggaacacttacgtctgtgtcaactacggcgcgaacttgacgatttggagcaatggatccaggagcgggaggtcgttgcggccagccacgagttgggccaagactatgaacacgtgacaatgctgcgcgacaagttccgagagttttcccgggacacttcgactattggacaggagcgggtagacagcgctaacgcgttggctaatgggttgatagctggcggtcatgctgcccgggccactgtcgcagagtggaaggactctctgaatgaagcatgggcggatctgctggaattactggacacacgcggacaggtccttgcagcagcctacgaactgcagcgctttctacatggcgctcggcaagcgttggcaagggtgcagcacaagcagcagcaactccctgatgggaccggtcgggacctgaacgccgctgaggcgctgcagcgaagacattgcgcttacgagcatgatatccaagccttatcaccacaggtgcaacaggtccaagacgacggacatcggctccagaaggcctacgccggcgataaagccgaggagattggccgccatatgcaggccgttgctgaagcttgggcccagctgcagggttctagtgccgcgcgccgacagcttttgcttgatacaacagataaattccgcttctttaaagccgttagagaactgatgctgtggatggatgaggtcaacctccaaatggatgcccaggaacgacctcgcgacgtctcctccgccgatttggtgatcaagaaccagcaggggatcaaagccgagatcgaggcccgagccgataggttctcttcttgtatagatatgggcaaggaactcctggctaggtcccactacgccgcagaagaaatcagcgagaaattgtcccagctgcaggcgaggagacaggaaacggctgaaaagtggcaggagaagatggattggctgcagctcgttctcgaggtcctggtcttcgggagggacgctggaatggcagaggcctggctgtgcagccaggaacccctcgtgcgctctgccgagctgggctgcacggttgatgaggtcgagtccttgatcaagcggcacgaggcctttcagaaatcagcggtggcctgggaagaaaggttctgtgcacttgagaagcttacagccctggaagaacgagagaaggaacgaaagagaaagcgcgaggaggaggagcgccggaagcagcctccagcccctgagcccaccgcatcggttccccctggtgatcttgtgggagggcagactgccagcgacacgacttgggacggcacccagccaaggccacctccctccacccaagcaccttccgttaacggtgtgtgcactgatggcgagcctagtcagccattgcttggacaacaaaggcttgagcacagcagtttcccagaagggcccggaccgggaagtggcgacgaggccaacggccctaggggagagaggcagaccagaacgcgtgggcccgccccttccgctatgccgcaatctcggtcaacagagagtgcccatgccgctaccttgccacctagaggccccgaaccctccgcccaggaacaaatggaaggcatgctgtgtaggaaacaggagatggaggccttcggcaaaaaggccgctaataggagttggcagaatgtttattgtgtcctgcgccggggatcacttgggttctataaggatgcaaaggctgcttctgctggcgtcccgtatcatggcgaagtgcccgtttccctggccagggcccagggctcagtcgcgtttgactaccggaagaggaagcatgttttcaagctcggcctgcaagatggaaaagaatacttgtttcaggcaaaggacgaggtgagttgccctagttgcagttccctctcagtgccctttcaaaaactaccggcagctgacagccccagttttccggtgctgcctttgtttccaggcctcgttctgtgtggaaaaaccggatgcgtccgaaggccgcaccaagctgcacttcctgtttag

SEQ ID NO: 285019 - DNA, 7173 bp, Artificial Sequence
  derived and/or modified sequence
atgagcagcaccctgagccccaccgacttcgacagcctggagatccagggacagtatagtgatatcaataaccgatgggacctgcccgattctgattgggataacgactcaagttcggcccgactgtttgagcggagtcgcattaaagctttggcagatgaacgggaggctgttcagaagaagacattcaccaaatgggttaattctcatctggctagagtaacatgccgcgtgggggatctatatagcgacctgagggacggcagaaatctactgagactgctggaggtgctgagtggggagatcctgccgaaaccaaccaagggccgcatgcgcatccattgccttgagaatgtagataaagcgctgcagttcttgaaggaacagaaagtccacctcgagaatatgggcagccacgatattgtagatggaaatcaccgcctgaccctggggctcgtgtggaccataattctccgattccagatacaggacatttccgttgaaaccgaagataacaaggagaagaaatccgctaaggacgccctgctgttgtggtgccaaatgaaaacagccggatatccgaacgttaatgttcataattttacgaccagttggagagacggcctggcgttcaatgccatcgtgcacaaacacagacctgacctcctggattttgagagcctgaagaagtgcaacgcgcactataacttgcagaatgctttcaatttggcggagaaggaacttggcctgaccaagttgctcgaccctgaggatgtgaatgtcgaccagcctgacgagaagtcgataatcacttacgtggccacttactaccactatttttccaagatgaaggcccttgccgtagagggcaagcgcatcggtaaagtgctagaccacgctatggaggccgagaggctcgtggaaaagtatgagtctttagccagcgagctcctgcagtggatcgaacaaaccatcgtcacactgaatgatcggcagctagccaactctctgtcaggcgtccagaaccagctgcaaagtttcaattcctacaggacggtggaaaagccccctaagttcacagagaaagggaacttagaggtcctgctgtttacaatccagagtaagctaagagccaacaatcagaaggtgtacactcctcgagaagggaggctgatcagtgatatcaataaggcatgggagcgcttagaaaaggccgagcacgagagagaactcgcactgcgaaccgagttgatcaggcaggagaagctcgagcagctggctgctcgcttcgatcgcaaggctgcgatgcgcgaaacttggctgtctgaaaaccagaggctggtctctcaagataacttcggtttggagctggccgcagtggaagctgcagttcggaagcacgaagctatcgaaaccgacatcgtggcctatagcggcagggtgcaggccgtcgatgccgtggccgcagaactggcagcagagaggtatcacgacattaagcgtatcgccgcgcgacagcacaacgttgcgaggctgtgggactttcttagacaaatggttgccgctaggagggagcggttactgcttaacctcgaactgcagaaagtgttccaggatctattgtaccttatggattggatggaggaaatgaaggggcggcttcagagtcaggatttaggcagacatctggctggcgttgaggaccttttgcagctgcacgagctcgtcgaggccgatatcgcagttcaggcagagagggtacgggcagtgtccgccagcgctctccggttctgcaatccaggcaaagagtaccgcccctgtgacccacaacttgtgagcgagcgcgtggcaaagctggagcagtcatatgaagctctttgcgagcttgcagcagccaggagagccagactggaagagtctcggcgactgtggaggtttctgtgggaagttggtgaagccgaggcctgggtcagagagcaacagcatttactcgcctcagccgacactggtcgggatctcaccggcgcactcagattgctaaataagcacaccgctctgcggggagagatgagcgggagactcgggcccctgaagctgactctcgaacaaggtcagcagttggtcgctgaaggtcacccaggtgcgtcacaggcttctgctagggccgccgaactgcaggcacagtgggagcgccttgaagccctcgctgaggagcgcgctcagaggctcgcacaggccgcctccttgtaccaattccaggcggacgctaacgatatggaggcctggctggtggacgctcttcgactggtctcctcccctgagctgggccacgacgaattctcgacacaggcccttgctaggcagcatagagccctcgaagaagagatccgcagccatagacctacactcgatgccctccgggaacaagcagctgcattgccccctacactttcgaggactcctgaggtacagtccagagtgcccacgcttgagcgacactatgaggagctacaggcacgcgctggagaaagagccagagcattagaagcggccctggcgctttataccatgctgagtgaggccggggcttgtggtctgtgggtggaggaaaaagaacaatggttgaatggcctggcactgccagaacggctggaagacctggaggtggttcagcaacggttcgaaacacttgaaccagagatgaacaccctggctgcccagattaccgccgtaaacgacatcgcagagcaactgctgaaggccaaccctcccggtaaagatcggatcgtcaatacacaggaacaactgaaccacaggtggcagcaattcaggcgactggccgacggaaaaaaggccgctctcacatccgccttgtctattcaaaactatcatctcgagtgcaccgagacccaggcctggatgagagagaaaactaaggtgatcgagagcacccagggactgggtaacgacctcgccggcgtgcttgcgctacagaggaagctggccgggactgagcgggatctggaagcgatcgctgcgcgagtgggagagctcacaagagaggcaaatgctctggcagccggtcaccctgcccaagctgttgccatcaatgcacgcttacgggaagtgcagactggctgggaagatctgcgagcaacaatgcggcgtcgggaggagtccctcggggaggccaggcgattgcaggatttcttacgctctctggacgattttcaggcctggctgggaagaactcagacagcagtcgcatcagaagaaggaccagctactttgcctgaggccgaagccctgctcgcgcaacatgcagctttaagaggagaggtggaacgtgcacagagcgaatatagcagactgcgggctcttggcgaggaagtaactcgagatcaagccgatccacagtgtctttttctgaggcagcggctagaggccctcggcaccggctgggaagagttaggccggatgtgggagtccaggcaaggacgccttgctcaagcccacggcttccaggggtttcttcgcgatgctcggcaggctgaaggcgtgcttagcagccaggaatatgtactgtcccatacagagatgcccggaactctccaagctgccgacgccgccattaaaaagttagaagatttcatgagcaccatggatgccaatggcgaacgtatccacggtctgctggaggctggccgccagctggtgtctgaggggaacatccacgctgacaagataagggaaaaagctgactctatcgagcgccggcataagaaaaaccaggacgccgcccagcagtttttggggcggctgcgggacaatagagaacaacagcattttctccaggactgtcacgaactgaaactgtggatcgacgagaagatgcttactgcccaggacgtgtcatatgatgaagcgagaaacctacatacaaagtggcagaaacaccaggcttttatggccgagctggccgccaataaggactggctggataaagtggacaaggaggggcgggagttgacattggagaaacccgagctcaaggcccttgtttccgaaaagctccgcgatttacacagacgttgggatgagctggaaacaaccacgcaagccaaagcccggagtctgttcgacgccaaccgagctgaattgtttgcacagtcttgttgtgcattggagagttggttagagagccttcaggcccagcttcactctgatgattatggcaaagatctgactagcgtgaacattttgctgaagaaacagcagatgcttgagtgggagatggcagtcagagagaaggaagtggaagcgattcaggctcaggccaaggctctggcccaagaggatcagggtgctggcgaagtcgaacggacatcccgtgcggttgaagagaaatttagagccctgtgtcaacccatgagggagcgctgtcgccggctgcaagcctccagagagcaacatcagttccaccgggatgtggaagacgaaattttgtgggtgactgaaagactgcccatggcctctagtatggaacatggcaaggatctgccgtctgtacagctgctgatgaagaagaaccagactctgcaaaaggaaatacagggccacgaaccccgcatcgctgatctgcgagaacgccagcgagccctgggggccgctgccgctgggcctgagctggcagagttgcaggaaatgtggaagaggttaggccatgaactcgaactacgcggcaagcgcctcgaagacgccctgcgggctcagcagttttatcgagacgctgcggaagccgaagcatggatgggggaacaagagctgcacatgatgggccaggaaaaggccaaagacgaactgtctgcgcaggccgaagttaagaagcatcaggtgctggagcaagcacttgctgattatgcgcagactatccaccaactagcggccagttcacaggatatgatcgaccacgagcatcccgagagtacccgcatcagtattcggcaagctcaggttgacaagctgtatgccggcttaaaggaattagctggggaacggcgtgaacggctgcaagaacatcttcgactttgtcaattaagacgggagctcgacgatctggagcaatggattcaggagagggaagttgtagctgccagtcacgagctgggccaggattacgagcacgtgacaatgctgagggacaagttccgggaattttctagagatacgagcacaatcggccaggagagggtcgatagcgcaaacgctttggcaaacgggctgattgctggcggacacgccgctagggccacggtcgcagagtggaaagacagcctgaacgaggcctgggcagatctcctcgagttgctggatacccggggccaggtactggccgccgcatacgagctccaaaggttcctgcatggggcgagacaggccctagcacgtgttcagcataaacagcagcagctcccggacggaacaggccgggacctgaacgccgccgaggccctgcagaggcggcactgtgcatatgagcatgatattcaggccctgagcccacaggttcagcaagtacaggatgatggccatcggttacagaaagcgtacgcgggagataaagccgaggagatcggaaggcatatgcaggcggtggccgaagcctgggcccagctgcagggtagtagcgctgccagaagacagctgctattggacactaccgataagtttcgattctttaaggctgttcgcgagcttatgctttggatggatgaagtgaatctccagatggacgctcaggagcggcctcgcgacgtgtcatctgccgatttagtgataaagaatcagcaggggataaaagcggaaattgaggcccgggcggataggtttagctcctgtatcgacatgggcaaggaactgctcgccagatcacactacgctgcagaggaaatttctgaaaagctctcccagttgcaggccagaagacaggagacggctgaaaagtggcaggaaaagatggactggcttcaactggtgctcgaggtgctcgttttcgggcgcgacgccggcatggccgaggcttggctgtgcagccaggagccattggtacggagcgccgagcttgggtgcactgtcgacgaagtggagtccctgattaagcggcatgaggcctttcaaaagagcgccgtggcctgggaggagagattttgcgccctggagaaactgaccgccttggaggaaagggagaaggaaagaaaacgcaaacgagaagaagaggagagaaggaaacaaccacccgcacccgaacccaccgccagtgtgccccccggggacctcgtcggagggcagactgcctctgataccacctgggacggaacgcagccacggccgcctccctccacacaggccccgagtgtaaacggagtatgcactgatggtgagccttcacaaccgttactggggcaacagcgattggagcatagctcctttcccgagggcccgggacctggtagtggggacgaagccaacggaccacgcggggaaagacaaactcgcactcgcggcccagctccctcagcaatgcctcagagccgttccacagaaagcgcccacgccgctactctcccaccccgcggacccgagccctccgcccaggagcagatggaagggatgctctgtaggaaacaggaaatggaggctttcggtaaaaaagcagcaaataggagttggcagaacgtgtattgtgtgctgcggcggggttcactcggattctacaaggacgccaaggcggcttctgcaggggtgccataccacggcgaagtgcctgtgagtttggctagggcacaaggtagtgttgcgttcgattacaggaagagaaaacatgtattcaagcttggcctgcaggatgggaaggaataccttttccaagccaaggacgaggccgagatgagcagttggcttagagtggttaatgccgctatagcaaccgcatcttctgcctcaggtgagcctgaggagccagtcgtacctagtaccaccagaggaatgacacgggccatgacgatgcctccggtgtcccctgtaggagccgagggtccggttgttctgcgttctaaggacggccgcgaacgcgaaagagaaaaacggttttcctttttcaaaaagaataaatag

SEQ ID NO: 285020 - DNA, 7172 bp, Artificial Sequence
  derived and/or modified sequence
atgtcttccacactgagcccgaccgatttcgactctctggagatccaagggcagtattcagacatcaataataggtgggatttgcctgacagcgattgggacaacgactcttcaagcgccagactttttgagcgcagccgcattaaagcccttgccgatgagagagaagccgttcagaagaaaactttcactaagtgggttaattctcatttggcccgtgttacatgtagagtcggcgatctttattccgacctgcgtgacggtcgaaaccttctcaggcttctggaagttctcagcggcgagatcctgcctaagcctactaaaggcagaatgaggatccattgtctcgagaatgtggataaggctctgcaatttctcaaagaacagaaggtgcatttagaaaatatgggatctcacgatatcgttgacggaaatcaccggctgaccctggggctagtctggaccattatactcagattccagattcaggatatttctgtggaaacggaggacaacaaggaaaaaaaatccgcaaaggacgccttactgctatggtgtcagatgaagactgctggatatcctaacgtgaacgtacacaacttcacaacttcatggcgagacggtctggcgtttaatgccatagtacacaaacaccgcccagatctgctggactttgagtctctcaaaaagtgtaatgcccattataacttacaaaacgcctttaatcttgcagaaaaggagctgggcctaactaagctgttggaccccgaagacgttaacgtcgaccaacccgatgagaagagcataatcacctatgtggctacttattaccactacttcagtaaaatgaaggctcttgctgtcgaagggaaaagaattggaaaagtgctggatcacgccatggaagctgaacgcctggtagagaagtacgagagcctggctagcgaacttttgcaatggattgaacagacgatcgtgactttgaatgaccggcagttggctaacagcctttctggcgtacaaaatcagctccagtctttcaatagctaccgcacagtggagaagcccccaaagttcactgaaaagggaaaccttgaagtgcttctcttcacaatccagagcaaattacgggcaaacaaccaaaaagtgtatactccacgcgaagggagattgatctctgacattaacaaagcttgggagaggttagagaaggctgagcatgaaagagaactggccttgcggacggaactcattaggcaggagaaactggaacagttggcggctagatttgaccgaaaagcagcaatgcgcgagacctggctgtcagagaatcagaggctggtcagccaagacaacttcggtttggagttggcagccgttgaagccgctgtccggaaacacgaggccattgagaccgacatcgtggcttactctggacgggttcaggcagttgatgctgtggcagccgagcttgccgctgaacgataccatgacattaagcgaatcgctgcccgtcagcacaatgtagctagattgtgggattttctgcgccagatggtggcggcacggcgagagcgactgctgttaaatctcgaactccagaaggtgttccaggatttgctgtacctcatggactggatggaggaaatgaagggtcgcctgcagtcacaggatctgggccgacatttggctggcgtagaggacctcctgcagttgcacgagttggtcgaggctgatatagcagtccaagccgagagggtgagggccgtgtccgcctctgctctccgcttctgcaaccccggaaaggagtacagaccctgcgacccccaattggtgtcggaacgggtggccaagcttgagcagtcctatgaggctctgtgcgagctggcggctgcccgaagagcgagactggaggagagtagacgactgtggcgctttctgtgggaagtcggggaagccgaggcatgggttcgcgagcagcagcacttgctggctagtgccgacactgggagagacctcacaggagcactgcgcctgttgaacaagcacaccgcactgcgtggcgaaatgagcgggcgactgggcccactgaagctcaccttggagcaaggacagcagctcgtggcagaggggcatcctggggcatcacaagcctctgctagggctgccgaactgcaggcccaatgggaaaggcttgaagccttagccgaagagcgcgctcagcgccttgcacaagccgcttcactgtaccagttccaggctgacgccaacgacatggaggcctggctggtagatgctttgcggctggtttcctcaccagagctgggacacgatgagttctcgacacaagctcttgccagacaacatagggctcttgaagaagagattcgatctcaccggccaacactggacgccctgagagaacaggcagcagctctgccgcctaccttgtcgcggacaccagaggtgcagagcagagttcctactctagagcgccactacgaggaactgcaggccagagccggtgaacgcgcacgtgccttggaagcagcactggcattatacacgatgcttagcgaagccggtgcatgtggactgtgggtggaagagaaagagcagtggctaaacggcttggctcttcctgagaggctggaagatttggaggtggtgcagcagagattcgagacccttgaacctgaaatgaatactttagcagcccagataacagcagttaacgacatcgcggaacagctcctgaaggccaacccaccaggcaaggataggatcgtaaacacccaggagcaactgaaccataggtggcagcagttcagaagactcgcagacggaaagaaggccgcactgacaagcgcccttagcatccagaactatcacctggagtgcacagagactcaggcttggatgagagagaagacaaaagttatagagtcaacacagggcctcggcaatgacttggccggagtgctggctctccagaggaaactggcgggtactgagcgcgacctcgaggcgatagcagccagagtgggcgagttgacccgagaagctaacgcattagccgcagggcatccagcacaggctgttgccattaatgcacgacttcgggaggttcagaccgggtgggaagatctcagagcaacaatgaggcgcagagaggagtccctgggagaggctaggcggcttcaggactttctgcggagccttgatgactttcaggcatggctggggaggacccagactgccgtggctagcgaggagggccctgcgacactgcccgaggctgaagcgttacttgcccaacacgcggcactgcgtggcgaggtcgaacgagcccagtccgagtacagccgactgcgggctctcggagaggaggttaccagggaccaagctgacccccagtgcctgttcctgcggcagcgtcttgaggccttagggactggctgggaagaattagggcgaatgtgggagtccaggcagggacgccttgcccaagctcacggattccagggattccttcgagatgctcgccaggcggaaggagtgttgtcatcacaggagtacgtgctatctcacaccgaaatgccgggaactttacaagccgctgatgcagccatcaagaagctggaagacttcatgtccacaatggacgcaaacggggaacgaatccatggcctgctggaagccggacgtcaactggtgagcgaaggcaatatacacgctgacaaaatccgcgagaaagcagactcaatcgagcgtcgccataaaaagaaccaggatgccgcacagcagttcctgggacgcttaagggacaatcgtgagcagcaacacttcctgcaggattgtcacgagctgaagctctggattgacgagaaaatgctgacggcccaagatgtttcatacgatgaagcccgaaatttgcacactaagtggcagaagcaccaggctttcatggcagaacttgctgctaacaaagactggcttgataaggtggataaagaagggagagagttaacgctggagaaacccgagctaaaggctttggtgtccgagaagttgagagatctccatcgacggtgggacgagctggagaccactactcaggctaaagcccgttcgttgtttgacgcaaaccgtgccgagctcttcgcccagagttgctgtgctctcgaatcctggttagagtcattgcaggcgcagctgcattctgacgactacggcaaggacctaacctccgttaatattctgctgaagaagcagcaaatgctcgaatgggaaatggcggtcagggaaaaggaggtggaggctattcaagcccaggcgaaggctctcgctcaggaagaccagggggctggcgaagtcgaaagaacttcgcgcgctgtagaggagaagtttagagctctctgtcagcctatgcgagagcgctgccggaggttacaagcgtctagggagcagcatcaatttcaccgagacgtagaggacgagattctttgggtgacagaacggctcccaatggcctcatccatggagcatggcaaagatctcccaagcgtgcaactgttaatgaagaagaatcagacactgcagaaggagatacagggtcatgaacctcgcatcgcggacttaagagagcgtcagagagctctgggagccgctgcagccggtcctgagctagccgagctgcaagagatgtggaaacgactggggcacgagctagaactgcgaggcaagcgtttggaggatgctttgcgggctcagcagttttatcgtgatgctgctgaagccgaagcttggatgggagagcaggagctccacatgatgggtcaggagaaagctaaagacgagctctcggcacaggccgaagtgaaaaagcatcaggtcctggagcaggctctggctgattatgcacagactattcaccaactggcagctagcagccaagacatgattgatcacgagcaccctgaaagcacccgcatcagtattaggcaggcccaggttgacaagctgtatgctgggctgaaggaactcgcaggcgaaagaagagagcgtctgcaagaacaccttcgtctgtgtcaattgagaagagaactcgatgatttggaacagtggatccaggaacgcgaagtggtcgccgcatcccacgagctcggacaggactacgagcacgttacgatgctaagagataaatttagagagttcagtcgcgacacgagcacaataggacaggagagggtggactcagccaatgcactggcaaacggtcttattgcaggcggacacgcagccagagccacagtggccgagtggaaggacagcctcaacgaagcctgggccgaccttctggaacttcttgacactcgcggtcaggtcctcgcagctgcctatgaactgcagcgcttccttcacggcgcacgccaggctctcgccagggttcaacacaaacagcaacagcttcccgatgggacaggacgggatctcaacgccgctgaggccctacaaaggcgacattgcgcctatgagcacgacattcaggcactgagcccacaagttcagcaggtccaagacgacggccaccgtctgcagaaagcctatgccggagacaaagctgaggagattggacggcatatgcaggctgtagcggaggcctgggcccagctgcagggcagctctgcggcaaggcggcagttactgctggataccacagataagtttcgtttcttcaaagctgtcagagagctgatgctgtggatggatgaagtcaatctccaaatggacgctcaggaaagacctcgcgatgtgagctctgccgatttagtcatcaaaaatcagcagggcatcaaggcagagatcgaggccagggccgacagattttcatcttgtattgatatggggaaagagcttctcgccaggtcccattacgccgcagaggagatctctgaaaaactgtcacaattgcaggccaggcgccaggagaccgccgagaaatggcaagaaaagatggattggctgcagttggtgctggaggtcctggtgttcggaagggatgctggaatggctgaggcctggctgtgttcacaagaacctctggtgcggagcgcagagctggggtgcacagtagacgaagtggaatctctgattaagcggcatgaggcctttcaaaaatccgccgtggcctgggaggagcgattctgtgctctcgaaaaactcacggctctggaggaaagagagaaggaaaggaagcgcaaacgcgaggaagaagagcgccgaaaacagccaccagcacctgaaccgaccgccagtgtccccccaggggacttagtcggcggtcagacagctagtgatactacctgggacggtacccagcccaggccacccccaagcacccaagcgcctagcgtgaatggggtctgtacagacggggagcctagccaacctctcttgggccaacaacgcctggaacatagcagcttcccagaaggcccaggacccggaagtggtgacgaggccaatggtcccagaggggaacggcagaccagaacccggggaccagcaccatccgctatgccacagagccggtcaaccgaatctgcacacgctgcaacgctgcctcctcggggtccagagccaagcgctcaagagcagatggaggggatgctgtgccggaaacaggaaatggaggccttcgggaagaaagccgctaacagaagttggcagaacgtctattgcgtactgagacgcggtagtctggggttctataaagacgctaaggccgcatccgccggagtgccctatcatggggaggtgcctgtgagtttagcccgagcccagggcagcgtagcattcgactataggaaacgcaaacatgtgttcaaattgggccttcaagacggcaaggagtacctgttccaagcaaaggacgaggccgaaatgtccagttggctaagggtggtcaatgccgctatcgcaacagctagttcagcttcaggtgaacctgaagaacccgtcgtgcccagcaccaccaggggaatgactcgggctatgacgatgcccccagtgtcccccgtgggagcggaaggccctgtggtcctgcggagcaaggacgggcgagagcgcgagagggaaaaaagattcagctttttcaagaagaacaaata

SEQ ID NO: 285021 - DNA, 7097 bp, Artificial Sequence
  derived and/or modified sequence
atgtcttcaaccctgtcacccacagactttgacagtctcgagatacagggtcagtattctgacatcaataatcgttgggacttgcccgactcagattgggacaacgacagcagctccgctaggctgtttgagcgctctaggataaaagcactcgccgacgaacgagaagctgtccagaagaaaacatttaccaaatgggtgaactcccatctggccagggtgacatgccgggtgggagatttgtatagcgaccttcgagatggtagaaacctgctgcggttactcgaagtgctctccggagagattcttccgaagcctacaaaggggagaatgcgaatacattgtctggaaaacgttgataaggctctgcaattcctcaaagagcagaaagtccacttggaaaatatgggcagccatgatatcgtcgatggtaaccatcggttaaccctcggactggtgtggactatcatcctaaggtttcagatccaagatatcagtgtcgaaaccgaagacaataaggagaagaagtccgctaaagatgcactgttgctgtggtgccaaatgaagactgcgggataccctaatgtcaacgtccacaactttaccacaagttggagggacggattggcttttaacgccatcgtgcataagcaccgaccagacctgcttgatttcgagtctttgaaaaaatgcaacgctcattataacctccagaatgctttcaatctggcggaaaaggagctgggcctgacaaagctcctggacccggaagatgtaaatgttgatcagccagacgaaaagtccatcataacctacgtcgctacttattatcattatttttccaaaatgaaggctctcgctgtcgagggcaagcggattggtaaggttctggaccacgccatggaggctgaacgcctcgtggagaaatacgagagcctggcttccgagttgctacagtggattgagcagacaatagttacgctaaacgaccgccagctggccaatagtctgagcggagtacagaaccagttacagagcttcaattcttaccgcaccgtcgaaaagccccctaaatttacggagaagggcaatttagaggtgctgctcttcacaatccagtcgaagctgcgggcaaataatcagaaagtttatactccgagagagggcagattgatcagcgatataaacaaggcctgggagcgccttgagaaagcggagcacgaaagagagctggctctgcggacagaattaatacgacaggagaaacttgaacaacttgccgctcggtttgaccgaaaggccgctatgcgcgaaacctggctgtcagagaaccagaggttggtctctcaggataacttcgggctcgaactcgcagccgtggaagccgcagtgcgaaagcatgaagcaattgagaccgacatagtggcatactctggtcgcgtgcaggcagtggacgccgttgccgctgaacttgctgctgagaggtatcacgatataaagcggattgcagcacgccaacacaatgtggctagactgtgggactttttaaggcaaatggtcgctgccaggcgagaacgactactgctgaacctggagctgcagaaagtctttcaggatctgctgtacctcatggattggatggaagaaatgaagggtagacttcaaagtcaggatctggggagacacctggccggagttgaggacttgttacagctgcacgagctggtggaggcagacatcgccgttcaagctgagcgcgtgcgtgccgtgtccgcctcagctctgcgtttttgcaaccccggaaaggaatacagaccttgcgaccctcagcttgtatcagagcgagtggctaagctggagcagtcatacgaagccttgtgcgagctcgccgcagcacgcagagccagattggaggagagccggaggctgtggaggttcctgtgggaagtgggtgaggcagaagcctgggtccgtgagcaacagcacttgcttgcctctgccgacaccggccgtgatctcacaggggcattacgcctactgaataagcacacagctttaaggggtgaaatgtccgggcgtctgggaccactgaagctgactctggagcagggccagcagctagttgcggaaggacacccgggagcctcccaggctagcgcgagagccgctgaactgcaggctcagtgggaacgcttggaagctttggcggaggagagagctcagcgcttggcccaggccgcttctttgtaccagtttcaggcagatgcaaacgacatggaggcctggcttgtggacgcactacgcctagtttcgagtcctgagttgggccacgacgaattctctacccaagctttagctaggcagcacagggccctggaggaggaaatccgttcacacagacccacgttggacgccctgagggaacaggcagctgctttgcctcctacactcagtcgaactcccgaggtacagtcacgggtcccgacactggaacgccattacgaggaacttcaagcacgagcgggagaacgagcaagagccctggaggccgcactggccctgtacacaatgctgtccgaggcaggcgcatgcggcctctgggtcgaggaaaaggagcagtggctgaacggactggccctacccgaacggctagaagatcttgaggttgtccagcaaagattcgagactctagagcctgaaatgaataccctcgccgctcagatcacggcagtgaacgatatcgccgagcaactgctcaaggccaatcccccagggaaggatagaattgtgaacacacaagagcagttaaaccataggtggcagcaattccggaggctagcggatgggaagaaggccgctttgacatctgctctctccattcagaattatcaccttgaatgcacggagacccaggcttggatgcgggaaaagaccaaagtgatagagtccactcagggtctgggcaacgacttagcaggagtattagccctacagcgtaaactcgccggaaccgagagggaccttgaagctattgccgcaagggtgggagaactcaccagggaagcgaacgctctcgcagccggtcaccctgcgcaggccgtggccataaacgcacgactgcgggaagtacaaacaggatgggaagacctgcgagccacgatgcggcgtcgcgaggagagcctgggagaggctaggcgcctccaagacttcttgagatcccttgacgattttcaggcgtggctgggaagaactcagacggcagttgcgtcggaggaaggcccagccactctccccgaagctgaggccttattggcccaacacgctgctctaagaggggaggtcgagcgggctcagtctgaatattctagacttagggccctgggtgaggaagttacacgcgaccaagcggacccccagtgcttgttcctgaggcagcgattagaggccctgggcaccgggtgggaggagcttggaagaatgtgggagagcagacaaggcagattggcacaggcccacgggtttcagggattcctcagagatgcccgtcaggctgaaggcgttctgtcctcacaggagtacgtgctctctcatacagaaatgccgggaacgctacaggccgcagacgcagccattaaaaagctggaggactttatgagtaccatggatgccaacggcgagaggatccacggccttctagaggctgggaggcagctagtgtctgaaggaaacatccacgctgataaaatccgggaaaaagctgactccatagagcggaggcacaaaaaaaatcaggacgccgctcaacagtttctgggaaggctgcgcgacaatcgcgagcagcagcatttcttacaggactgccatgagctcaaactgtggatcgacgagaaaatgctgacagcacaagatgtctcctacgacgaggcacgcaatctgcacactaagtggcagaaacatcaagccttcatggctgagttagctgcaaacaaggactggctagataaggtagataaggaaggccgagagttaaccctcgagaaaccagagttgaaagcccttgtctcagagaagctgcgagacctccataggagatgggacgagctggaaaccaccacccaggctaaggcacgctctctatttgatgccaacagagccgagttgttcgcgcaatcttgttgcgcactggagtcttggttagagagcttacaggcgcagctccactcagacgactacggtaaagacctgacctccgttaacatcctcttgaagaagcagcagatgctcgagtgggaaatggccgtgcgggagaaagaggtggaggccattcaggcgcaagcaaaggcgctggctcaggaagatcagggagccggtgaagtagagcgaacatcacgagctgtggaggagaaatttcgggctctgtgtcagccaatgcgcgaaaggtgccgcaggctgcaagcttcccgtgagcagcatcagtttcaccgggacgtggaagatgagatactgtgggtgacagagcggttaccgatggcgtcatcaatggagcatggaaaagatttgcccagcgtgcagctgttgatgaaaaagaaccagactctgcaaaaagaaatccaaggccacgaaccacgcatcgccgaccttagggaaaggcagcgagcactcggagccgctgcggcaggcccagagttggctgagctgcaggagatgtggaagcgtctgggccacgagttagaactcagagggaaaaggctcgaggatgcccttcgggcacagcaattttatcgggacgcagcggaggccgaagcatggatgggggagcaggaactgcatatgatgggccaagagaaggcaaaagacgagttgtctgcccaggcagaagtgaagaagcatcaggtgttagagcaagccctggctgattacgcccagacaattcatcagctggcggctagtagccaggatatgatcgatcacgagcatcctgaatctacccgcattagcattcggcaggcgcaggtcgataaactgtatgcaggtttgaaagaactggcaggcgagcgtagggaacggctgcaagagcatctgagattatgccagttgcggagagagttagatgacctcgaacagtggatccaggagagggaggtagtcgccgcaagccatgagttggggcaggactacgaacacgttacgatgttgagagataagttcagggaattctcacgggacacctcaactattggacaggagagagtggatagtgcgaacgcccttgcaaatggcttgatagccggtggccacgctgccagagccactgtggctgaatggaaggacagcctcaatgaggcttgggccgacttgttggagctgctcgacactagaggccaagtgcttgccgctgcttatgagctgcaacgcttcctgcatggggctaggcaggcactagccagagtgcaacacaagcagcagcaactgcccgacggtaccgggagggatctaaatgctgcggaggccttgcagcggcgtcactgcgcttatgaacacgatatccaagcactgagtccacaggtgcagcaggtgcaggatgacgggcaccgcctccagaaggcgtacgccggtgataaggcagaggaaatcggtcgtcatatgcaggcggtcgccgaggcttgggcacagctgcagggctcatcagcagccagaaggcagctactgctggacaccactgacaaatttcggttcttcaaagcagtgcgcgaactcatgctgtggatggacgaagttaatctgcagatggatgcgcaggagcgacctagagacgtttcgtcagcagacctggttatcaagaaccagcaggggatcaaagcagagatcgaggccagagcagatcgtttctcctcctgcatcgacatgggtaaagaactgttagcgcgttctcactacgcggctgaagagatctcagaaaagctgtctcagctccaggcaaggcggcaagagacagctgagaagtggcaggaaaaaatggactggcttcagctcgtgctggaagttctagtgtttggcagggacgctggaatggctgaggcttggctctgcagccaagagcccctagttcgctcggcggaactcggatgcaccgtagacgaggtagaaagcctgattaaaaggcatgaggccttccagaaaagtgctgtcgcatgggaggaacggttttgtgccctggagaaactgacagccctagaggagcgcgagaaggagcgcaaacggaagcgtgaggaagaggagagaagaaaacaaccccctgcccctgagccgactgcgagcgtcccaccaggcgacctggtagggggacagacagcctccgacaccacctgggatggtacacagccccgaccccctccatctacccaggctccctccgtaaacggcgtgtgtacagacggggagccgtcccagccattgctggggcagcagcgtttggaacatagctctttcccagagggtcctggccctggctcaggtgacgaggcaaacggcccacgcggagagcgacaaacccggacacggggacctgccccatccgccatgcctcagagtaggagcacagaatccgcccacgctgcaaccctgccaccacgagggccagaaccttcagcccaggaacagatggaggggatgttatgtcggaaacaggaaatggaagcgtttggaaagaaagccgctaaccgttcatggcagaacgtatattgtgtcctgagacgcggttctcttggattttataaggatgccaaggccgcttctgccggagtcccgtaccacggcgaggttccggtgtctctggccagggcccagggatctgttgcctttgactacagaaaaagaaagcatgtttttaagctgggcctgcaggatgggaaagaatacctgtttcaggcgaaagatgaggtctcttgcccttcgtgctcttctctctccgtgcccttccagaaattacccgcagcggacagtcctagctttcccgtgctgcctctattcccgggactcgtcttgtgtggtaaaaccggatgtgttcggaggccacatcaggcagcactgcctgtgta

SEQ ID NO: 285022 - DNA, 7172 bp, Artificial Sequence
  derived and/or modified sequence
atgtccagtacactaagccctaccgacttcgatagcctggagatccagggacagtactctgacatcaataatcggtgggatttaccagatagcgactgggataacgattcgtcaagcgctaggctgttcgagagatcccgcatcaaggccttggccgatgaaagggaggcagtgcaaaagaagaccttcaccaaatgggtgaattcgcatctggctcgggtcacttgtcgcgtaggggatctgtattccgacctgcgtgatgggcgaaatctgctgaggctgctggaagtcttatccggggagatcctacctaaacctaccaaggggaggatgcgaattcactgtcttgaaaacgtggacaaggcattgcagttcctcaaggaacaaaaagtgcacctagaaaacatggggtcacatgacattgtggacggcaatcataggctgactctgggccttgtgtggactatcatcctccgcttccagattcaggacatttccgtcgaaactgaggataataaggagaagaagtccgctaaggacgccctactcctatggtgtcagatgaaaaccgctggttacccaaatgtgaatgtgcataacttcaccacgagctggagagacggactcgcgtttaatgccatcgtacacaagcatagacccgacctgctggattttgagtcactgaagaagtgtaacgctcattacaatctgcagaacgccttcaacctggcggaaaaagaactgggcctgacgaagctgctggaccccgaagacgttaacgtcgatcagcccgatgagaagagtattatcacatacgtggccacttactatcactattttagcaagatgaaggcattggctgtggagggtaaacgaatcggaaaagtcctcgaccacgcaatggaggcagaaagactcgtggaaaagtatgagtcactggcctctgaacttcttcaatggatcgaacagacaattgtgactctgaatgatcggcagctcgctaactcactgtcgggcgtgcagaatcaacttcagtccttcaactcatacaggacggtggagaagcccccaaaatttactgaaaaggggaacctggaagtcctgctgttcacaatccagtccaaactgcgggcaaacaaccagaaagtctatactccaagggaaggaagactaatctctgatattaacaaggcctgggagaggctcgagaaggctgagcacgagcgtgagctagctctgagaacggaactgatccgccaggagaaactcgaacagctggctgctcgtttcgaccggaaggcagccatgcgcgagacttggctttctgagaaccagcggttggtatcccaggacaacttcgggcttgaactcgcggctgtggaagcagctgttcgcaaacatgaagccatcgaaacagatatagtcgcgtattcagggagggtgcaagccgtggatgcggttgccgcagaactcgcggctgaaaggtatcacgatattaaacgaattgccgcacggcagcacaacgtggctaggctctgggattttctgcgacaaatggttgctgccaggcgcgagcggctcctgctgaacctcgagctccagaaagtcttccaggacctgctttatttgatggactggatggaggaaatgaagggaagattgcagagccaggacctgggtcgacatctcgctggggttgaggacctgctgcagctgcatgagctggtcgaggctgatatcgccgtgcaggcggagcgcgtgcgggctgtgagcgcctcagccctcagattctgtaaccccggtaaggaatacagaccctgtgacccccagctagtgtccgagagagtcgccaaactcgagcagagctacgaggctctatgcgagcttgctgccgctcgcagggcgagactcgaggagtcgaggcggctttggcgcttcctgtgggaggtcggggaggccgaagcctgggttagagagcagcagcaccttctggcgagcgccgacacaggcagagacctgacaggcgctctacgactgctgaataaacacactgccctgcggggagaaatgagcggccgactggggcctctgaagctgacactcgagcaagggcagcagttggtagcagagggtcatccaggcgctagtcaagcctcagcccgagctgcagaactgcaggcccagtgggagcgtcttgaggctctagccgaggagcgggcacaaagattggctcaggcggcttccctgtatcagttccaggccgatgccaacgatatggaggcttggctggtcgacgcccttcgcctagtctcaagtcccgagcttggtcatgatgaattttcaacgcaggctttagcaagacagcaccgtgcactggaggaggaaatacggagccatagacccacacttgatgccctaagggagcaggccgctgccttacccccaactttatctagaactcctgaagtgcagtccagagttccgacccttgagagacactatgaggagctgcaagcgagagccggagagcgagctagagctctggaagcggcactagccctctatactatgcttagtgaggccggagcatgtggtctctgggtggaggaaaaagagcagtggctcaatggcctggccttgcctgaacgtttagaggacctcgaagtcgtgcagcagcggttcgaaacactggagcctgaaatgaatactctggcagctcagattactgcggtgaatgacatagccgagcagctgctgaaggccaatcctcctggcaaggaccgcattgttaatacccaggaacagctgaaccaccggtggcaacagttccggcgtctcgccgatgggaagaaggctgccctgaccagcgctctcagcattcagaactatcacctagagtgtactgagacacaggcctggatgagagagaaaaccaaggttattgagagcacccagggcctgggcaacgatttagccggagtgctggccttgcaacgtaagctcgcaggtacagagagggatcttgaagcgattgccgctcgcgtaggcgaattgactcgcgaggctaacgccctggcagctgggcacccagcccaggcagttgctatcaatgccagactcagagaagtgcagacggggtgggaagacctcagggccacaatgcgaagacgggaggagagtctcggcgaggctcggagattgcaagactttttacggtcactagacgacttccaggcatggcttggcagaacccagaccgcagtcgcttccgaagaggggcctgccacactccctgaggcggaggctttgctcgcccagcatgcagccctgcgcggtgaggtcgaaagggctcagtcggaatacagccgactcagagcgctaggcgaggaagtgactcgagaccaggccgatccacaatgtctcttcctgcgccagcggctggaggccctcggaacagggtgggaggagttaggcaggatgtgggaatctcgccaggggagacttgcccaggcccatggctttcaaggattcctcagggacgccagacaggcagaaggcgtgctgtcatctcaagagtacgtgctgtcacacaccgagatgccaggcaccctacaagccgctgatgctgctattaaaaagctggaagactttatgagtacaatggacgctaatggcgagcgaatccacggactgctggaagccggaagacaacttgtgtccgagggaaatatccacgctgacaaaattcgggagaaggctgattctatagagcgacgacataagaagaaccaggatgctgctcagcagttcctaggtagactcagggataatagggagcagcagcactttctccaggactgtcacgagttaaagctgtggatagacgagaagatgctgaccgcccaagacgtcagctacgacgaagccagaaatctccatacaaagtggcagaagcatcaagcttttatggccgaactagcagcgaacaaggattggctggacaaggtagataaagaaggtagagaacttacactggaaaagcctgagcttaaggctttggtgtccgagaaactgcgagatctgcacagaagatgggatgaacttgaaaccaccacccaagccaaggcgagatcactcttcgacgctaatagggcagaactgttcgcgcagagttgctgcgccttagagtcttggctcgagtcactacaagcccaactccattcagacgattatggcaaggatctcacatcggtgaatatcctgctcaaaaaacagcagatgctagaatgggagatggccgttcgtgaaaaggaagtagaggcaatccaggcacaggccaaggccctggcccaagaggatcaaggtgcaggggaggtggaacggacttcaagggccgttgaggaaaaattccgtgccctgtgccagcctatgcgcgaacgctgcagacggctgcaggcttcaagagaacagcatcaatttcatagagatgtggaagacgaaattctttgggttacagaacgactgcccatggcatcaagcatggaacatggaaaggatctaccctccgtgcagctcctgatgaagaagaaccaaaccctccagaaagagatccagggccacgagcctaggatcgccgacctccgggagcggcagagggcactgggggcagccgctgcagggccagagctcgctgagcttcaggagatgtggaaacgcctgggtcacgagcttgagctccgtgggaaaagacttgaggacgctctaagggcgcagcagttctaccgggatgcagcagaagcagaagcttggatgggcgagcaagaactgcatatgatgggtcaggagaaggcgaaagacgagttgagtgcccaagccgaagtgaagaaacaccaggtcctcgagcaagccctggcggattacgcccagacaatccatcaactggctgcctcttcgcaggatatgattgatcacgagcatccagagagtactcgcattagtattcgccaggcacaggtcgacaaactgtacgcaggcctcaaggagctggctggagagcgccgagagaggctgcaggaacacctaagactgtgtcaactgagacgcgagctcgacgacctggagcaatggattcaagaacgcgaggtggtcgccgcatcccacgaactgggacaggactatgaacacgtgacaatgctcagagataaattcagagagttttccagggatacttcaaccatcggccaagaaagagtggactctgccaatgctctcgccaatggattgattgccggtggtcatgctgctcgggctactgtggcagagtggaaggatagcttgaatgaggcctgggccgacctgctagaactcctggacacacggggtcaggtgctcgctgcagcctatgaactgcagcgtttcctccacggcgctagacaagcacttgcaagggtccaacacaagcagcagcaactccctgacggtaccggccgtgatttgaatgccgcagaggcgctgcagagaaggcattgcgcatatgagcatgacattcaggccctctctcctcaagtgcagcaagttcaggacgacggtcacagattgcagaaagcttacgcgggagacaaagctgaggagatcggaaggcacatgcaggccgtggcagaggcttgggcacagttacagggatcttctgctgcaagaagacaacttcttctcgataccaccgataagttccgattctttaaggctgttcgtgagctgatgctttggatggacgaggtgaatctgcagatggacgcccaagagaggccgagggatgtgtctagtgccgacctggtgattaagaaccagcagggtataaaagctgagattgaagccagagcagaccgcttttctagctgcattgacatggggaaagaactgctggcccgatcccactacgcagcggaggagatctccgagaagttgtctcaactccaggccaggcggcaggagaccgcagaaaagtggcaagagaaaatggactggctgcagctggtcctggaggttcttgttttcggacgggacgctggcatggcggaggcttggctatgctctcaggaaccattagtgaggtcagccgaactcggttgcaccgtggatgaagtggagagccttataaaacgccatgaagcttttcagaaaagcgcggttgcatgggaggagcgattttgcgccctggagaagctgaccgctctggaagagcgggaaaaggagcgaaagcgcaaaagagaagaagaagaaaggcgcaagcagcccccagcaccggagcctaccgcaagcgtgccgccaggggatcttgttggcggacagacggcgtcggacacaacatgggacggtacccagcccaggccccctccctctacccaggcgccttctgtcaatggggtgtgcaccgacggtgagccttcgcagccactgctggggcaacagcgtctggagcactctagtttccctgagggccctggccctggctctggcgatgaagccaatggtccacggggagaacggcagacgagaactaggggccctgccccttctgccatgccccagagtcggagtacagagagcgcccatgccgcaaccctccctcctagaggaccagagccatccgctcaagagcaaatggagggcatgctatgccggaagcaggagatggaagcttttggcaagaaggctgccaatcggagctggcagaatgtgtactgcgtcctcaggaggggttccctggggttctacaaggacgctaaggcggctagtgccggagtcccatatcatggggaggtgcctgtttctctggcgcgagcccagggcagcgtcgcttttgattatcgtaaaaggaagcatgttttcaaactaggcctccaggatggcaaagagtacctgtttcaagccaaggacgaggccgagatgagttcctggctgcgcgtagtgaatgcagctatcgccactgccagcagcgcgagcggcgagcctgaggagccagtggtgcccagcactactcggggtatgacccgggctatgacaatgcctcccgtctcccccgtgggcgctgagggcccagtggtgctccggtccaaagacgggcgagaacgggagagggagaagagattctcctttttcaagaagaacaagta

SEQ ID NO: 285023 - DNA, 7866 bp, Artificial Sequence
  derived and/or modified sequence
ccactgagcagccaaccgcagcctctggccacaaggagagcggagcacaggagcaggaagccgcctaccaccatgagcagcacgctgtcacccacagactttgacagcttggaaatccagggccagtacagtgacatcaacaaccgctgggaccttcctgactcggactgggacaatgacagcagctcggcccgcctctttgagaggtctcgcattaaggctctggcagatgaacgagaagctgtgcagaagaaaaccttcaccaagtgggtaaactcgcacctggcccgggtcacgtgccgggtgggggacctgtacagcgacctccgggacggacgcaacctgctgaggctcctcgaggtgctctcgggagagatactgccaaagcctacaaagggccgcatgcggatccactgcctggagaacgtggacaaggcactgcagttcctcaaggagcagaaagtgcacttggaaaacatgggctcccatgacattgtggacggaaaccaccgactgacccttgggctggtctggaccatcatccttcgattccagatccaagacatcagtgtggagacagaagacaacaaggagaagaagtcagccaaggatgccctgcttctgtggtgccagatgaagactgcaggttatcccaacgtcaatgtacacaacttcaccaccagctggagagatggactagctttcaacgccatcgtgcataaacaccggccagacctgctggattttgagtctctgaagaagtgtaatgcacactataatctgcagaatgcattcaatctggctgaaaaggaactgggacttaccaagctgctggatcccgaagacgtgaatgtggaccagccagatgagaagtcaatcattacctatgtggctacttactaccattacttctccaagatgaaggccctggccgtggaaggcaagagaattggcaaggtgctggaccatgccatggaggcagagcgcctggtggagaaatacgagtccctggcctcggagctgctgcagtggatcgagcaaacgatcgtgaccctcaatgaccggcagttggccaactcccttagcggggtccagaaccagctgcagtccttcaactcctaccgcaccgtggagaagccgcccaagtttaccgagaaagggaacttggaagtgctgctcttcaccatccagagcaagcttcgggccaacaaccagaaggtctacacgccccgcgagggccggctcatctcggacatcaacaaggcttgggagcggctggagaaggcggagcacgagcgtgagctggccctgcgcaccgagctcatccgccaggagaagctggagcagctggccgcccgcttcgaccgcaaggctgccatgcgggagacctggctcagcgagaaccagcgcctcgtgtcccaggacaactttgggctggagctggcagctgtcgaggcagcagtacggaagcacgaagccattgagacggacatcgtggcctacagcggccgggtgcaggcagtggacgccgtggctgcagagctggccgccgagcgctaccacgacatcaagcgcatcgccgctcggcagcacaacgtggcacggctctgggacttcttgcggcagatggtggccgcccggcgggagcggctcctcctcaacctggagctgcagaaggtgttccaggacctgctctacctcatggactggatggaagagatgaagggccggctgcagtctcaggacctgggcaggcacctagcaggagtggaggacctgctgcagctgcacgagctggtggaggcagacatcgccgtgcaggccgagagggtgcgggccgtcagcgcctctgccctgcgcttctgcaacccagggaaagagtatagaccttgcgacccgcagctggtgtcggagcgggtggccaagctagagcagagctatgaggcactgtgcgagttggcagcggcgcggcgggcccggctggaggaatcacggcggctctggcgtttcctctgggaggtgggtgaagctgaggcctgggtgcgggagcagcagcacctcctggcctcagccgacacgggccgagacctgaccggtgccctccgcctgctcaacaagcacacagccctgcggggcgagatgagcggccggctggggcccctgaagctcaccctggagcagggccagcagttggtggccgagggtcaccctggggcaagccaggcctctgcccgtgcagctgaactccaagcccagtgggagcggctagaggccctggccgaggagcgtgcccagcggctggcccaagccgccagcctctaccagttccaggccgatgcaaacgacatggaggcctggttggttgacgcactgcgcctggtgtccagccccgagctggggcacgacgagttctccacgcaggctctagccaggcagcatcgggccctggaggaggagattcgaagccaccggccaaccctggacgccttgagggaacaggcagcagccctgccccccacactgagccgcacgcccgaggtgcagagccgggtgcccaccctggagcggcactacgaggagctgcaggcccgggcaggcgagcgagcgcgggccttggaggcagccctggcgctctacaccatgctcagcgaggccggggcctgtggactctgggtggaggagaaggagcagtggctcaacgggctggccctgcctgaacgcctggaggacctggaggtcgtgcagcagaggttcgagaccctggagcctgaaatgaacacccttgcagcacaaatcaccgcggtgaatgacattgccgagcagttactgaaggccaaccccccaggcaaagaccgcattgtcaacacccaggagcagctcaaccacaggtggcagcagtttcggcgtctggcagacggcaagaaggcagctctcacctcagccctgagcatccagaactaccacttagagtgcacggagacccaggcctggatgagagagaagaccaaagtcatcgagtccacccagggcctaggcaacgatctggctggggtgctggccctgcagcgcaagctggccggcacggagcgggacctggaggccatcgccgcccgggtgggcgaactgactcgagaggcaaatgccctggctgccggccatcccgctcaggcagtggccatcaacgcccggctgagagaggtgcagaccggctgggaggacctcagggccaccatgcggcgtcgagaagagtcgctgggggaggcgcggcggctgcaggacttcttgcgcagcttggatgacttccaggcctggctaggccgcactcagactgctgtggcctctgaagaagggccggccaccctgcctgaggcagaggccctcctggcccaacatgcagccctgcggggagaggtggagcgggcccagagcgagtatagccggctgcgagccctgggcgaggaggtgacccgggaccaggctgacccccagtgcctcttcctacgacagcgactggaggccctgggaactggctgggaggagctgggccgaatgtgggagagccggcaaggtcgcctggcccaggcccacggcttccagggattcctgcgggatgctcgtcaggctgagggcgtgctcagcagccaggaatatgttctgtctcacacggagatgccagggacactccaggctgctgatgctgccattaaaaaactggaggacttcatgagcaccatggacgccaatggggaacggatccacgggctcctggaggctggccgccagctggtatctgaaggcaacatccacgccgacaagattcgggaaaaggcagactccattgagaggaggcacaagaagaatcaagacgcagcgcagcaatttctgggccgtcttcgggacaaccgggagcagcagcatttcctgcaagattgtcacgagctgaagctctggatcgacgagaagatgctgacagcccaggacgtgtcctatgacgaggcccgcaacctgcatactaagtggcagaagcaccaggcattcatggccgagctggctgccaacaaagactggctggacaaggtggacaaggaagggcgagagctcacccttgagaagccagagctgaaagccctggtgtcggagaagctgagagacctgcacaggcgctgggacgagctggagaccaccacccaagccaaggcccgcagcctctttgatgccaaccgagctgagctgtttgcccagagctgctgtgccctggagagctggctggagagcctgcaggcccagctgcactcggatgactacggcaaggacctcaccagcgtcaacatcctgctcaagaagcagcagatgctggaatgggagatggctgtgagagagaaggaggtggaggcaatccaggcccaggccaaagcactggcccaggaggaccagggtgcaggggaggtggagagaacctcgagggccgtggaggagaagttcagggccttgtgccagcccatgcgggaacgctgccggcgcctgcaggcttctcgcgagcagcaccagttccaccgcgatgtggaagatgagattttgtgggtgacagagcggctgcccatggccagctccatggagcatggcaaggacctgcccagcgtccagcttctcatgaagaaaaaccagaccctgcagaaagagattcagggccatgagccccggatcgcggacctgagggagcggcagcgtgctctaggtgcagcagcagcaggtccagagctggctgagctgcaggaaatgtggaaacgcctgggccacgagctggaacttcgagggaagcgactggaggatgccctgcgagcccagcagttctaccgcgatgccgccgaggcggaggcctggatgggcgagcaggaattacacatgatgggccaggagaaggccaaggatgagctgagtgcccaggcagaggtgaagaagcaccaggtgctggagcaagccctggccgactacgcgcagaccatccaccagctggcggccagcagccaggacatgattgaccacgagcacccagagagcactcggatatccatccgccaagcccaggtggacaagctgtatgccggcctgaaggagctggctggagagcggcgggagcgcctgcaggagcacctccggctgtgccagctccgccgcgagctggatgacctggaacagtggatccaggagcgcgaggtggtggcggcctcccacgagctgggccaggactacgagcatgtgactatgctccgagacaaattccgagagttctcccgggacacaagcaccatcggtcaggagcgcgtagatagcgccaatgcgctggccaatgggctcattgctgggggccatgctgcacgggccaccgtggccgagtggaaggacagtctcaacgaggcctgggctgacctgcttgagctgctggacacacggggtcaggtgctggccgcggcgtacgagctgcagcgcttcctgcacggggcacgccaagccctggcgcgggtgcagcacaagcagcagcagcttccggacgggactggccgcgacctcaacgctgccgaggccctgcagcgccgacactgtgcctacgagcatgacattcaggccctcagcccccaggtccagcaggtgcaggacgacggccaccggctccagaaggcctacgctggagacaaggctgaggagatcggccgccacatgcaggccgtggccgaggcctgggcccagcttcagggaagctctgccgcccgccggcagctgctgctggacaccacagacaagttccgcttcttcaaggctgtccgggaactgatgctctggatggatgaggtcaacctgcagatggatgcccaggagcgtccccgggatgtgtcctccgcggatctagtcatcaagaaccagcaaggcatcaaggcagagatagaggcccgggcagaccgcttctcctcctgcatcgacatggggaaggagctgctggccaggagccactatgcggccgaggagatctcagagaagctgtctcagctgcaggcacggcgccaggagacagctgagaagtggcaggagaagatggactggcttcagctggttttggaggtgcttgtgtttggaagagatgcagggatggcagaggcctggctctgcagccaggagccactggtgcgcagcgctgagctgggttgcacggtcgacgaagttgagagcctcatcaagcggcacgaggccttccagaagtcagcagtggcctgggaggagcgattctgtgcgctggagaagcttactgcgctagaggagcgggagaaggagcgaaagagaaagagggaggaggaggagcggcggaaacagccgcctgctcccgaacccacagccagtgtgcctccaggggacctggtgggcggccagacagcttctgacaccacctgggacggaacccagccacggccaccaccatccacacaagcacccagtgttaatggagtctgcacagatggagagccctcacagcccctgctgggacaacagagacttgagcacagcagcttccccgaagggccgggacctggctcaggggacgaagccaatgggccccggggagagaggcagacccggactcggggcccggccccatctgcaatgccccagagcaggtctaccgagtcagcccatgctgccaccctgccgcctcgaggcccagagccatctgcccaggagcagatggaggggatgctgtgccgcaagcaggagatggaggccttcgggaagaaggctgccaacaggtcctggcagaacgtgtactgtgtcctgcggcgtgggagcctcggcttttacaaggatgccaaggcagccagcgcgggagtgccataccacggagaagtgcctgtcagcctggccagggcccagggcagcgtcgcctttgattaccgaaagcgcaaacatgtcttcaagctgggcttacaggatggaaaagaatatttattccaggccaaggatgaggcagagatgagctcgtggctacgggtggtgaatgcagccattgccacagcgtcttctgcctctggagagcctgaagagccggtggtgcccagcaccacccggggcatgacccgggccatgaccatgcccccagtgtcacccgtcggggctgaggggcctgttgtgctccgcagcaaagacggcagagaacgagagcgagaaaaacgcttcagcttctttaagaagaacaagtagttgggggcaaggtcccaggccaactccctccctccgttcaggaaactgccagggacagtcgacagggaccgccctcttgtcaggacaactgcctgctgctagggtctgttgccaaggtcaacccatcaccaggaactgtcactggggacgagtccatgttcccaagggcagcccttctcttctgctgtttaattccagactggtggtgggacccaggtaaccccctctcccacccccgccgacttctcccctttccccagcctcgtgcctctgtccctcaccacggtgtggacagtgccgcaccctcaacataggccatgtggggagtggctgcccctgcctcagggtcattctcctgccatgcgagggcactcgccttctgccttctggttcctcacccctcagaccagccaggaacctctcagagctgaagcaggccctgggggcagaagtgccagatgacagtcagaggcgcaggagccctccctccccacccccaccctgtaactccagctgccactccatctccagctgctctcaatggcttccaggtgtgttgttcggggacagccaccgccttgagtctggccaaggaggtgattaaacagctcagcttctctc

SEQ ID NO: 285024 - DNA, 8085 bp, Artificial Sequence
  derived and/or modified sequence
atgagcagcacgctgtcacccacagactttgacagcttggaaatccagggccagtacagtgacatcaacaaccgctgggaccttcctgactcggactgggacaatgacagcagctcggcccgcctctttgagaggtctcgcattaaggctctggcagatgaacgagaagctgtgcagaagaaaaccttcaccaagtgggtaaactcgcacctggcccgggtcacgtgccgggtgggggacctgtacagcgacctccgggacggacgcaacctgctgaggctcctcgaggtgctctcgggagagatactgccaaagcctacaaagggccgcatgcggatccactgcctggagaacgtggacaaggcactgcagttcctcaaggagcagaaagtgcacttggaaaacatgggctcccatgacattgtggacggaaaccaccgactgacccttgggctggtctggaccatcatccttcgattccagatccaagacatcagtgtggagacagaagacaacaaggagaagaagtcagccaaggatgccctgcttctgtggtgccagatgaagactgcaggttatcccaacgtcaatgtacacaacttcaccaccagctggagagatggactagctttcaacgccatcgtgcataaacaccggccagacctgctggattttgagtctctgaagaagtgtaatgcacactataatctgcagaatgcattcaatctggctgaaaaggaactgggacttaccaagctgctggatcccgaagacgtgaatgtggaccagccagatgagaagtcaatcattacctatgtggctacttactaccattacttctccaagatgaaggccctggccgtggaaggcaagagaattggcaaggtgctggaccatgccatggaggcagagcgcctggtggagaaatacgagtccctggcctcggagctgctgcagtggatcgagcaaacgatcgtgaccctcaatgaccggcagttggccaactcccttagcggggtccagaaccagctgcagtccttcaactcctaccgcaccgtggagaagccgcccaagtttaccgagaaagggaacttggaagtgctgctcttcaccatccagagcaagcttcgggccaacaaccagaaggtctacacgccccgcgagggccggctcatctcggacatcaacaaggcttgggagcggctggagaaggcggagcacgagcgtgagctggccctgcgcaccgagctcatccgccaggagaagctggagcagctggccgcccgcttcgaccgcaaggctgccatgcgggagacctggctcagcgagaaccagcgcctcgtgtcccaggacaactttgggctggagctggcagctgtcgaggcagcagtacggaagcacgaagccattgagacggacatcgtggcctacagcggccgggtgcaggcagtggacgccgtggctgcagagctggccgccgagcgctaccacgacatcaagcgcatcgccgctcggcagcacaacgtggcacggctctgggacttcttgcggcagatggtggccgcccggcgggagcggctcctcctcaacctggagctgcagaaggtgttccaggacctgctctacctcatggactggatggaagagatgaagggccggctgcagtctcaggacctgggcaggcacctagcaggagtggaggacctgctgcagctgcacgagctggtggaggcagacatcgccgtgcaggccgagagggtgcgggccgtcagcgcctctgccctgcgcttctgcaacccagggaaagagtatagaccttgcgacccgcagctggtgtcggagcgggtggccaagctagagcagagctatgaggcactgtgcgagttggcagcggcgcggcgggcccggctggaggaatcacggcggctctggcgtttcctctgggaggtgggtgaagctgaggcctgggtgcgggagcagcagcacctcctggcctcagccgacacgggccgagacctgaccggtgccctccgcctgctcaacaagcacacagccctgcggggcgagatgagcggccggctggggcccctgaagctcaccctggagcagggccagcagttggtggccgagggtcaccctggggcaagccaggcctctgcccgtgcagctgaactccaagcccagtgggagcggctagaggccctggccgaggagcgtgcccagcggctggcccaagccgccagcctctaccagttccaggccgatgcaaacgacatggaggcctggttggttgacgcactgcgcctggtgtccagccccgagctggggcacgacgagttctccacgcaggctctagccaggcagcatcgggccctggaggaggagattcgaagccaccggccaaccctggacgccttgagggaacaggcagcagccctgccccccacactgagccgcacgcccgaggtgcagagccgggtgcccaccctggagcggcactacgaggagctgcaggcccgggcaggcgagcgagcgcgggccttggaggcagccctggcgctctacaccatgctcagcgaggccggggcctgtggactctgggtggaggagaaggagcagtggctcaacgggctggccctgcctgaacgcctggaggacctggaggtcgtgcagcagaggttcgagaccctggagcctgaaatgaacacccttgcagcacaaatcaccgcggtgaatgacattgccgagcagttactgaaggccaaccccccaggcaaagaccgcattgtcaacacccaggagcagctcaaccacaggtggcagcagtttcggcgtctggcagacggcaagaaggcagctctcacctcagccctgagcatccagaactaccacttagagtgcacggagacccaggcctggatgagagagaagaccaaagtcatcgagtccacccagggcctaggcaacgatctggctggggtgctggccctgcagcgcaagctggccggcacggagcgggacctggaggccatcgccgcccgggtgggcgaactgactcgagaggcaaatgccctggctgccggccatcccgctcaggcagtggccatcaacgcccggctgagagaggtgcagaccggctgggaggacctcagggccaccatgcggcgtcgagaagagtcgctgggggaggcgcggcggctgcaggacttcttgcgcagcttggatgacttccaggcctggctaggccgcactcagactgctgtggcctctgaagaagggccggccaccctgcctgaggcagaggccctcctggcccaacatgcagccctgcggggagaggtggagcgggcccagagcgagtatagccggctgcgagccctgggcgaggaggtgacccgggaccaggctgacccccagtgcctcttcctacgacagcgactggaggccctgggaactggctgggaggagctgggccgaatgtgggagagccggcaaggtcgcctggcccaggcccacggcttccagggattcctgcgggatgctcgtcaggctgagggcgtgctcagcagccaggaatatgttctgtctcacacggagatgccagggacactccaggctgctgatgctgccattaaaaaactggaggacttcatgagcaccatggacgccaatggggaacggatccacgggctcctggaggctggccgccagctggtatctgaaggcaacatccacgccgacaagattcgggaaaaggcagactccattgagaggaggcacaagaagaatcaagacgcagcgcagcaatttctgggccgtcttcgggacaaccgggagcagcagcatttcctgcaagattgtcacgagctgaagctctggatcgacgagaagatgctgacagcccaggacgtgtcctatgacgaggcccgcaacctgcatactaagtggcagaagcaccaggcattcatggccgagctggctgccaacaaagactggctggacaaggtggacaaggaagggcgagagctcacccttgagaagccagagctgaaagccctggtgtcggagaagctgagagacctgcacaggcgctgggacgagctggagaccaccacccaagccaaggcccgcagcctctttgatgccaaccgagctgagctgtttgcccagagctgctgtgccctggagagctggctggagagcctgcaggcccagctgcactcggatgactacggcaaggacctcaccagcgtcaacatcctgctcaagaagcagcagatgctggaatgggagatggctgtgagagagaaggaggtggaggcaatccaggcccaggccaaagcactggcccaggaggaccagggtgcaggggaggtggagagaacctcgagggccgtggaggagaagttcagggccttgtgccagcccatgcgggaacgctgccggcgcctgcaggcttctcgcgagcagcaccagttccaccgcgatgtggaagatgagattttgtgggtgacagagcggctgcccatggccagctccatggagcatggcaaggacctgcccagcgtccagcttctcatgaagaaaaaccagaccctgcagaaagagattcagggccatgagccccggatcgcggacctgagggagcggcagcgtgctctaggtgcagcagcagcaggtccagagctggctgagctgcaggaaatgtggaaacgcctgggccacgagctggaacttcgagggaagcgactggaggatgccctgcgagcccagcagttctaccgcgatgccgccgaggcggaggcctggatgggcgagcaggaattacacatgatgggccaggagaaggccaaggatgagctgagtgcccaggcagaggtgaagaagcaccaggtgctggagcaagccctggccgactacgcgcagaccatccaccagctggcggccagcagccaggacatgattgaccacgagcacccagagagcactcggatatccatccgccaagcccaggtggacaagctgtatgccggcctgaaggagctggctggagagcggcgggagcgcctgcaggagcacctccggctgtgccagctccgccgcgagctggatgacctggaacagtggatccaggagcgcgaggtggtggcggcctcccacgagctgggccaggactacgagcatgtgactatgctccgagacaaattccgagagttctcccgggacacaagcaccatcggtcaggagcgcgtagatagcgccaatgcgctggccaatgggctcattgctgggggccatgctgcacgggccaccgtggccgagtggaaggacagtctcaacgaggcctgggctgacctgcttgagctgctggacacacggggtcaggtgctggccgcggcgtacgagctgcagcgcttcctgcacggggcacgccaagccctggcgcgggtgcagcacaagcagcagcagcttccggacgggactggccgcgacctcaacgctgccgaggccctgcagcgccgacactgtgcctacgagcatgacattcaggccctcagcccccaggtccagcaggtgcaggacgacggccaccggctccagaaggcctacgctggagacaaggctgaggagatcggccgccacatgcaggccgtggccgaggcctgggcccagcttcagggaagctctgccgcccgccggcagctgctgctggacaccacagacaagttccgcttcttcaaggctgtccgggaactgatgctctggatggatgaggtcaacctgcagatggatgcccaggagcgtccccgggatgtgtcctccgcggatctagtcatcaagaaccagcaaggcatcaaggcagagatagaggcccgggcagaccgcttctcctcctgcatcgacatggggaaggagctgctggccaggagccactatgcggccgaggagatctcagagaagctgtctcagctgcaggcacggcgccaggagacagctgagaagtggcaggagaagatggactggcttcagctggttttggaggtgcttgtgtttggaagagatgcagggatggcagaggcctggctctgcagccaggagccactggtgcgcagcgctgagctgggttgcacggtcgacgaagttgagagcctcatcaagcggcacgaggccttccagaagtcagcagtggcctgggaggagcgattctgtgcgctggagaagcttactgcgctagaggagcgggagaaggagcgaaagagaaagagggaggaggaggagcggcggaaacagccgcctgctcccgaacccacagccagtgtgcctccaggggacctggtgggcggccagacagcttctgacaccacctgggacggaacccagccacggccaccaccatccacacaagcacccagtgttaatggagtctgcacagatggagagccctcacagcccctgctgggacaacagagacttgagcacagcagcttccccgaagggccgggacctggctcaggggacgaagccaatgggccccggggagagaggcagacccggactcggggcccggccccatctgcaatgccccagagcaggtctaccgagtcagcccatgctgccaccctgccgcctcgaggcccagagccatctgcccaggagcagatggaggggatgctgtgccgcaagcaggagatggaggccttcgggaagaaggctgccaacaggtcctggcagaacgtgtactgtgtcctgcggcgtgggagcctcggcttttacaaggatgccaaggcagccagcgcgggagtgccataccacggagaagtgcctgtcagcctggccagggcccagggcagcgtcgcctttgattaccgaaagcgcaaacatgtcttcaagctgggcttacaggatggaaaagaatatttattccaggccaaggatgaggtgagctgtccttcgtgttcctctctgtccgtgccattccagaagcttccagctgcagactccccttctttccctgtcctccctctttttcctggtcttgtcctttgtggtaagactggatgtgtgcgacggccgcaccaggccgcactccctgtctaagccggccacattctcctaatagcatgaaacagtcagctcactttctgcctcctcctcttacacttccctgctgtccactgcggccaactcagcacagtgtccttgaagctgattgagggtctttccatccacaggcagagatgagctcgtggctacgggtggtgaatgcagccattgccacagcgtcttctgcctctggagagcctgaagagccggtggtgcccagcaccacccggggcatgacccgggccatgaccatgcccccagtgtcacccgtcggggctgaggggcctgttgtgctccgcagcaaagacggcagagaacgagagcgagaaaaacgcttcagcttctttaagaagaacaagtagttgggggcaaggtcccaggccaactccctccctccgttcaggaaactgccagggacagtcgacagggaccgccctcttgtcaggacaactgcctgctgctagggtctgttgccaaggtcaacccatcaccaggaactgtcactggggacgagtccatgttcccaagggcagcccttctcttctgctgtttaattccagactggtggtgggacccaggtaaccccctctcccacccccgccgacttctcccctttccccagcctcgtgcctctgtccctcaccacggtgtggacagtgccgcaccctcaacataggccatgtggggagtggctgcccctgcctcagggtcattctcctgccatgcgagggcactcgccttctgccttctggttcctcacccctcagaccagccaggaacctctcagagctgaagcaggccctgggggcagaagtgccagatgacagtcagaggcgcaggagccctccctccccacccccaccctgtaactccagctgccactccatctccagctgctctcaatggcttccaggtgtgttgttcggggacagccaccgccttgagtctggccaaggaggtgattaaacagctcagcttctc

SEQ ID NO: 285025 - DNA, 8128 bp, Artificial Sequence
  derived and/or modified sequence
gatgttctgggagggagagccggcccagctgcctgaaggaggacgcgagagcgaggggacgggtgagaggaatgcttagcggagacggactggaggtgcccggagaggaaaggggaacggaggctggatctcgggaaacctcgtcggcagtgtcattagaggaaggatcgcgtgtctcggggatacggattttggaggaaaagcagaatagggacaaaggcttcccaggtggcttcccctcttcccctgggggctgatttccactgagcagccaaccgcagcctctggccacaaggagagcggagcacaggagcaggaagccgcctaccaccatgagcagcacgctgtcacccacagactttgacagcttggaaatccagggccagtacagtgacatcaacaaccgctgggaccttcctgactcggactgggacaatgacagcagctcggcccgcctctttgagaggtctcgcattaaggctctggcagatgaacgagaagctgtgcagaagaaaaccttcaccaagtgggtaaactcgcacctggcccgggtcacgtgccgggtgggggacctgtacagcgacctccgggacggacgcaacctgctgaggctcctcgaggtgctctcgggagagatactgccaaagcctacaaagggccgcatgcggatccactgcctggagaacgtggacaaggcactgcagttcctcaaggagcagaaagtgcacttggaaaacatgggctcccatgacattgtggacggaaaccaccgactgacccttgggctggtctggaccatcatccttcgattccagatccaagacatcagtgtggagacagaagacaacaaggagaagaagtcagccaaggatgccctgcttctgtggtgccagatgaagactgcaggttatcccaacgtcaatgtacacaacttcaccaccagctggagagatggactagctttcaacgccatcgtgcataaacaccggccagacctgctggattttgagtctctgaagaagtgtaatgcacactataatctgcagaatgcattcaatctggctgaaaaggaactgggacttaccaagctgctggatcccgaagacgtgaatgtggaccagccagatgagaagtcaatcattacctatgtggctacttactaccattacttctccaagatgaaggccctggccgtggaaggcaagagaattggcaaggtgctggaccatgccatggaggcagagcgcctggtggagaaatacgagtccctggcctcggagctgctgcagtggatcgagcaaacgatcgtgaccctcaatgaccggcagttggccaactcccttagcggggtccagaaccagctgcagtccttcaactcctaccgcaccgtggagaagccgcccaagtttaccgagaaagggaacttggaagtgctgctcttcaccatccagagcaagcttcgggccaacaaccagaaggtctacacgccccgcgagggccggctcatctcggacatcaacaaggcttgggagcggctggagaaggcggagcacgagcgtgagctggccctgcgcaccgagctcatccgccaggagaagctggagcagctggccgcccgcttcgaccgcaaggctgccatgcgggagacctggctcagcgagaaccagcgcctcgtgtcccaggacaactttgggctggagctggcagctgtcgaggcagcagtacggaagcacgaagccattgagacggacatcgtggcctacagcggccgggtgcaggcagtggacgccgtggctgcagagctggccgccgagcgctaccacgacatcaagcgcatcgccgctcggcagcacaacgtggcacggctctgggacttcttgcggcagatggtggccgcccggcgggagcggctcctcctcaacctggagctgcagaaggtgttccaggacctgctctacctcatggactggatggaagagatgaagggccggctgcagtctcaggacctgggcaggcacctagcaggagtggaggacctgctgcagctgcacgagctggtggaggcagacatcgccgtgcaggccgagagggtgcgggccgtcagcgcctctgccctgcgcttctgcaacccagggaaagagtatagaccttgcgacccgcagctggtgtcggagcgggtggccaagctagagcagagctatgaggcactgtgcgagttggcagcggcgcggcgggcccggctggaggaatcacggcggctctggcgtttcctctgggaggtgggtgaagctgaggcctgggtgcgggagcagcagcacctcctggcctcagccgacacgggccgagacctgaccggtgccctccgcctgctcaacaagcacacagccctgcggggcgagatgagcggccggctggggcccctgaagctcaccctggagcagggccagcagttggtggccgagggtcaccctggggcaagccaggcctctgcccgtgcagctgaactccaagcccagtgggagcggctagaggccctggccgaggagcgtgcccagcggctggcccaagccgccagcctctaccagttccaggccgatgcaaacgacatggaggcctggttggttgacgcactgcgcctggtgtccagccccgagctggggcacgacgagttctccacgcaggctctagccaggcagcatcgggccctggaggaggagattcgaagccaccggccaaccctggacgccttgagggaacaggcagcagccctgccccccacactgagccgcacgcccgaggtgcagagccgggtgcccaccctggagcggcactacgaggagctgcaggcccgggcaggcgagcgagcgcgggccttggaggcagccctggcgctctacaccatgctcagcgaggccggggcctgtggactctgggtggaggagaaggagcagtggctcaacgggctggccctgcctgaacgcctggaggacctggaggtcgtgcagcagaggttcgagaccctggagcctgaaatgaacacccttgcagcacaaatcaccgcggtgaatgacattgccgagcagttactgaaggccaaccccccaggcaaagaccgcattgtcaacacccaggagcagctcaaccacaggtggcagcagtttcggcgtctggcagacggcaagaaggcagctctcacctcagccctgagcatccagaactaccacttagagtgcacggagacccaggcctggatgagagagaagaccaaagtcatcgagtccacccagggcctaggcaacgatctggctggggtgctggccctgcagcgcaagctggccggcacggagcgggacctggaggccatcgccgcccgggtgggcgaactgactcgagaggcaaatgccctggctgccggccatcccgctcaggcagtggccatcaacgcccggctgagagaggtgcagaccggctgggaggacctcagggccaccatgcggcgtcgagaagagtcgctgggggaggcgcggcggctgcaggacttcttgcgcagcttggatgacttccaggcctggctaggccgcactcagactgctgtggcctctgaagaagggccggccaccctgcctgaggcagaggccctcctggcccaacatgcagccctgcggggagaggtggagcgggcccagagcgagtatagccggctgcgagccctgggcgaggaggtgacccgggaccaggctgacccccagtgcctcttcctacgacagcgactggaggccctgggaactggctgggaggagctgggccgaatgtgggagagccggcaaggtcgcctggcccaggcccacggcttccagggattcctgcgggatgctcgtcaggctgagggcgtgctcagcagccaggaatatgttctgtctcacacggagatgccagggacactccaggctgctgatgctgccattaaaaaactggaggacttcatgagcaccatggacgccaatggggaacggatccacgggctcctggaggctggccgccagctggtatctgaaggcaacatccacgccgacaagattcgggaaaaggcagactccattgagaggaggcacaagaagaatcaagacgcagcgcagcaatttctgggccgtcttcgggacaaccgggagcagcagcatttcctgcaagattgtcacgagctgaagctctggatcgacgagaagatgctgacagcccaggacgtgtcctatgacgaggcccgcaacctgcatactaagtggcagaagcaccaggcattcatggccgagctggctgccaacaaagactggctggacaaggtggacaaggaagggcgagagctcacccttgagaagccagagctgaaagccctggtgtcggagaagctgagagacctgcacaggcgctgggacgagctggagaccaccacccaagccaaggcccgcagcctctttgatgccaaccgagctgagctgtttgcccagagctgctgtgccctggagagctggctggagagcctgcaggcccagctgcactcggatgactacggcaaggacctcaccagcgtcaacatcctgctcaagaagcagcagatgctggaatgggagatggctgtgagagagaaggaggtggaggcaatccaggcccaggccaaagcactggcccaggaggaccagggtgcaggggaggtggagagaacctcgagggccgtggaggagaagttcagggccttgtgccagcccatgcgggaacgctgccggcgcctgcaggcttctcgcgagcagcaccagttccaccgcgatgtggaagatgagattttgtgggtgacagagcggctgcccatggccagctccatggagcatggcaaggacctgcccagcgtccagcttctcatgaagaaaaaccagaccctgcagaaagagattcagggccatgagccccggatcgcggacctgagggagcggcagcgtgctctaggtgcagcagcagcaggtccagagctggctgagctgcaggaaatgtggaaacgcctgggccacgagctggaacttcgagggaagcgactggaggatgccctgcgagcccagcagttctaccgcgatgccgccgaggcggaggcctggatgggcgagcaggaattacacatgatgggccaggagaaggccaaggatgagctgagtgcccaggcagaggtgaagaagcaccaggtgctggagcaagccctggccgactacgcgcagaccatccaccagctggcggccagcagccaggacatgattgaccacgagcacccagagagcactcggatatccatccgccaagcccaggtggacaagctgtatgccggcctgaaggagctggctggagagcggcgggagcgcctgcaggagcacctccggctgtgccagctccgccgcgagctggatgacctggaacagtggatccaggagcgcgaggtggtggcggcctcccacgagctgggccaggactacgagcatgtgactatgctccgagacaaattccgagagttctcccgggacacaagcaccatcggtcaggagcgcgtagatagcgccaatgcgctggccaatgggctcattgctgggggccatgctgcacgggccaccgtggccgagtggaaggacagtctcaacgaggcctgggctgacctgcttgagctgctggacacacggggtcaggtgctggccgcggcgtacgagctgcagcgcttcctgcacggggcacgccaagccctggcgcgggtgcagcacaagcagcagcagcttccggacgggactggccgcgacctcaacgctgccgaggccctgcagcgccgacactgtgcctacgagcatgacattcaggccctcagcccccaggtccagcaggtgcaggacgacggccaccggctccagaaggcctacgctggagacaaggctgaggagatcggccgccacatgcaggccgtggccgaggcctgggcccagcttcagggaagctctgccgcccgccggcagctgctgctggacaccacagacaagttccgcttcttcaaggctgtccgggaactgatgctctggatggatgaggtcaacctgcagatggatgcccaggagcgtccccgggatgtgtcctccgcggatctagtcatcaagaaccagcaaggcatcaaggcagagatagaggcccgggcagaccgcttctcctcctgcatcgacatggggaaggagctgctggccaggagccactatgcggccgaggagatctcagagaagctgtctcagctgcaggcacggcgccaggagacagctgagaagtggcaggagaagatggactggcttcagctggttttggaggtgcttgtgtttggaagagatgcagggatggcagaggcctggctctgcagccaggagccactggtgcgcagcgctgagctgggttgcacggtcgacgaagttgagagcctcatcaagcggcacgaggccttccagaagtcagcagtggcctgggaggagcgattctgtgcgctggagaagcttactgcgctagaggagcgggagaaggagcgaaagagaaagagggaggaggaggagcggcggaaacagccgcctgctcccgaacccacagccagtgtgcctccaggggacctggtgggcggccagacagcttctgacaccacctgggacggaacccagccacggccaccaccatccacacaagcacccagtgttaatggagtctgcacagatggagagccctcacagcccctgctgggacaacagagacttgagcacagcagcttccccgaagggccgggacctggctcaggggacgaagccaatgggccccggggagagaggcagacccggactcggggcccggccccatctgcaatgccccagagcaggtctaccgagtcagcccatgctgccaccctgccgcctcgaggcccagagccatctgcccaggagcagatggaggggatgctgtgccgcaagcaggagatggaggccttcgggaagaaggctgccaacaggtcctggcagaacgtgtactgtgtcctgcggcgtgggagcctcggcttttacaaggatgccaaggcagccagcgcgggagtgccataccacggagaagtgcctgtcagcctggccagggcccagggcagcgtcgcctttgattaccgaaagcgcaaacatgtcttcaagctgggcttacaggatggaaaagaatatttattccaggccaaggatgaggcagagatgagctcgtggctacgggtggtgaatgcagccattgccacagcgtcttctgcctctggagagcctgaagagccggtggtgcccagcaccacccggggcatgacccgggccatgaccatgcccccagtgtcacccgtcggggctgaggggcctgttgtgctccgcagcaaagacggcagagaacgagagcgagaaaaacgcttcagcttctttaagaagaacaagtagttgggggcaaggtcccaggccaactccctccctccgttcaggaaactgccagggacagtcgacagggaccgccctcttgtcaggacaactgcctgctgctagggtctgttgccaaggtcaacccatcaccaggaactgtcactggggacgagtccatgttcccaagggcagcccttctcttctgctgtttaattccagactggtggtgggacccaggtaaccccctctcccacccccgccgacttctcccctttccccagcctcgtgcctctgtccctcaccacggtgtggacagtgccgcaccctcaacataggccatgtggggagtggctgcccctgcctcagggtcattctcctgccatgcgagggcactcgccttctgccttctggttcctcacccctcagaccagccaggaacctctcagagctgaagcaggccctgggggcagaagtgccagatgacagtcagaggcgcaggagccctccctccccacccccaccctgtaactccagctgccactccatctccagctgctctcaatggcttccaggtgtgttgttcggggacagccaccgccttgagtctggccaaggaggtgattaaacagctcagcttctctcac

SEQ ID NO: 285026 - protein, 252 aa, Artificial Sequence
  derived and/or modified sequence
MKDRLEQLKAKQLTQDDDTDAVEIAIDNTAFMDEFFSEIEETRLNIDKISEHVEEAKKLYSIILSAPIPEPKTKDDLEQLTTEIKKRANNVRNKLKSMEKHIEEDEVRSSADLRIRKSQHSVLSRKFVEVMTKYNEAQVDFRERSKGRIQRQLEITGKKTTDEELEEMLESGNPAIFTSGIIDSQISKQALSEIEGRHKDIVRLESSIKELHDMFMDIAMLVENQKLIIIIVLVVVLLGILALIIGLSVGLN

SEQ ID NO: 285027 - DNA, 759 bp, Artificial Sequence
  derived and/or modified sequence
atgaaggacagactggagcagctgaaggccaagcagctgacccaggacgacgacaccgacgccgtggagatcgccatcgacaacaccgccttcatggacgagttcttcagcgagatcgaggagaccagactgaacatcgacaagatcagcgagcacgtggaggaggccaagaagctgtacagcatcatcctgagcgcccccatccccgagcccaagaccaaggacgacctggagcagctgaccaccgagatcaagaagagagccaacaacgtgagaaacaagctgaagagcatggagaagcacatcgaggaggacgaggtgagaagcagcgccgacctgagaatcagaaagagccagcacagcgtgctgagcagaaagttcgtggaggtgatgaccaagtacaacgaggcccaggtggacttcagagagagaagcaagggcagaatccagagacagctggagatcaccggcaagaagaccaccgacgaggagctggaggagatgctggagagcggcaaccccgccatcttcaccagcggcatcatcgacagccagatcagcaagcaggccctgagcgagatcgagggcagacacaaggacatcgtgagactggagagcagcatcaaggagctgcacgacatgttcatggacatcgccatgctggtggagaaccagaagctgatcatcatcatcgtgctggtggtggtgctgctgggcatcctggccctgatcatcggcctgagcgtgggcctgaactag

SEQ ID NO: 285028 - DNA, 759 bp, Artificial Sequence
  derived and/or modified sequence
atgaaagaccggcttgagcagctgaaggcaaaacagcttacccaggacgacgacaccgacgcggtagagatagccattgataatactgccttcatggatgagttcttctccgagattgaagaaaccaggctgaacattgataaaatctcggaacacgttgaggaagcaaagaaattgtattccatcattctctcggctcccatcccggaacctaaaaccaaagatgacctcgaacaactcacaacggagatcaagaagcgcgcgaacaacgtccggaataaactcaagagcatggagaagcatatcgaggaggacgaagtgagatcttcagctgacttgagaattaggaagagtcagcacagtgttctgtcccggaagtttgttgaagtgatgacaaagtataacgaggcccaagttgattttcgggaaaggagcaaagggcggattcagcgtcagctggagatcaccggcaagaagaccaccgatgaggagctggaggaaatgttggagagtggaaatccagctattttcacaagtgggatcatcgatagccagatctcaaagcaggccctgagcgagatagaggggcgccataaagatattgtgagactggagagctcaatcaaggagttacacgacatgtttatggatattgctatgttggtcgagaatcaaaagctaattatcatcattgtgcttgtcgtagttttgctcggcattctcgctttgatcatcggactatcggtgggtctgaattag

SEQ ID NO: 285029 - DNA, 759 bp, Artificial Sequence
  derived and/or modified sequence
atgaaggaccggctggagcagctgaaggccaagcagctgacccaggatgatgacacagatgctgtggagatcgccatcgacaacacagccttcatggatgagttcttcagcgagattgaggagacccggctgaacatcgacaagatcagcgagcacgtggaggaggccaagaagctgtacagcatcatcctgagcgcccccatccctgagcccaagaccaaggatgacctggagcagctgaccacagagatcaagaagagggccaacaacgtgaggaacaagctgaagtccatggagaagcacatcgaggaggatgaggtgcgcagcagcgctgacctgcgcatcaggaagagccagcacagcgtgctgagcaggaagtttgtggaggtgatgaccaagtacaatgaggcccaggtggacttccgggagaggagcaagggccgcatccagaggcagctggagatcaccgggaagaagaccacagatgaggagctggaggagatgctggagagcggcaacccagccatcttcaccagcggcatcatcgacagccagatcagcaagcaggccctgtctgaaattgagggccgccacaaggacatcgtgcggctggagagcagcatcaaggagctgcatgacatgttcatggacatcgccatgctggtggagaaccagaagctgatcatcatcatcgtgctggtggtggtgctgctgggcatcctggccctgatcatcggcctgtctgtgggcctgaactag

SEQ ID NO: 285030 - DNA, 759 bp, Artificial Sequence
  derived and/or modified sequence
atgaaggaccggctggagcagctgaaggccaagcagctgacccaggatgacgataccgatgctgtggaaattgccatcgataatactgcttttatggacgagtttttctctgaaattgaggaaactcggctgaatattgataagatatccgagcacgtggaggaagctaagaagctctacagcattattctttctgctcccattccagagcccaagacaaaagatgacctcgagcaactgactactgaaattaagaagagagccaataacgtgaggaacaagctgaagtccatggagaagcatatcgaggaggacgaagtgcgctcatctgcggatctgcgaatcagaaaatcccaacactccgtgctatctcgtaagtttgtagaagtgatgaccaaatacaatgaagctcaggtggattttcgtgagcgcagtaagggaagaatacagagacagctggagattactggcaagaaaaccaccgacgaggaactggaggagatgctcgaatctggcaatccggctatttttaccagtggcataatagattctcagatctcaaagcaggctctgagcgagatagagggccgccataaggatatcgtgaggttagaatcttcaataaaggagcttcacgacatgttcatggatattgccatgctggtggaaaatcaaaagttgatcatcatcatagtgctggttgtcgtgttactgggaatcctggcactcattatcggcctctcagtcgggcttaactag

SEQ ID NO: 285031 - DNA, 759 bp, Artificial Sequence
  derived and/or modified sequence
atgaaggataggcttgagcagttaaaggccaaacagttaacgcaggatgacgacacagacgctgttgagattgctatcgataatacagctttcatggatgagtttttttccgagattgaagaaaccagactgaatatcgacaaaatttcagaacatgtggaggaggccaagaagttgtacagcattatcttgtccgccccaatccctgagccaaaaactaaagatgatttagagcagctcaccactgaaatcaaaaagagggcgaacaatgtgcgaaataaactgaaatcgatggagaaacacattgaggaagatgaagtgcgctcatctgcggacctgcgcatcagaaagtcacaacatagcgtgctttcaagaaagttcgtggaggtcatgactaaatataacgaggcccaagtcgattttcgagagcggtcgaaaggacgaatccaacgccaactagagattacggggaaaaagaccacagacgaagagctagaggagatgctcgagtccgggaatcccgcaatctttacgtccgggatcatcgactcacaaatctctaagcaggcgctgtctgaaatcgagggccgtcacaaagatatcgtgcggctcgagagttccatcaaggagctgcacgatatgtttatggatatcgctatgttagtcgagaaccagaagttgatcataatcatcgtcctggtagttgtgctgctgggtatcctggcccttattattggcctgagcgtcggactgaactag

SEQ ID NO: 285032 - DNA, 132 bp, Artificial Sequence
  derived and/or modified sequence
tgaagtcgcaatgacgatatctgcatctacggcggactgggtctcgggggcctgctgctgctggctgtggtccttttgtctgcctgcctgtgttggctacacaggcgggaggccgccagtgcccaacagtag

SEQ ID NO: 285033 - protein, 270 aa, Artificial Sequence
  derived and/or modified sequence
MTITYTSQVANARLGSFSRLLLCWRGSIYKLLYGEFLIFLLCYYIIRFIYRLALTEEQQLMFEKLTLYCDSYIQLIPISFVLGFYVTLVVTRWWNQYENLPWPDRLMSLVSGFVEGKDEQGRLLRRTLIRYANLGNVLILRSVSTAVYKRFPSAQHLVQAGFMTPAEHKQLEKLSLPHNMFWVPWVWFANLSMKAWLGGRIRDPILLQSLLNEMNTLRTQCGHLYAYDWISIPLVYTQPEQRGDGVPAQSGGRGGCSRWHHWPLPRPAVP

SEQ ID NO: 285034 - DNA, 813 bp, Artificial Sequence
  derived and/or modified sequence
atgacgattacgtacactagtcaagtagcaaacgctagactggggagcttctcccgtcttctcctgtgttggaggggttcgatttacaagctgctgtacggagaattcttgattttcctgctgtgctattacattatccgcttcatatatcgattggcactaactgaggaacaacagctgatgtttgaaaaattgaccttgtactgcgacagctacatccaactcatcccgatcagctttgtgcttgggttctatgttacgttggtcgtcacaaggtggtggaatcagtatgagaatttgccatggccagaccgcctgatgagtttggtgtcaggtttcgtcgaaggaaaggacgaacaggggagactgctcagacgaaccctcatacgatacgcgaacttaggcaatgtgcttatcctcaggtccgtaagcaccgcagtttacaagagattcccctctgctcaacacttggtacaggcaggttttatgactccggctgagcataagcaactggaaaagttatccctaccacataatatgttctgggtgccttgggtatggttcgccaatctaagtatgaaagcatggctgggtggtagaattagggacccaatactgctgcaatcactgttaaacgagatgaacaccctgcgaacccagtgcggacatctctacgcttatgactggatttcaatacccctcgtctacacccagcccgagcagagaggggatggagtgccagcacagagcggtggccggggagggtgctcacggtggcaccactggccactgccgcggcccgcggtgccgtag

SEQ ID NO: 285035 - DNA, 813 bp, Artificial Sequence
  derived and/or modified sequence
atgaccatcacctacaccagccaggtggccaatgcccggctgggcagcttcagccggctgctgctgtgctggaggggcagcatctacaagctgctgtatggagagttcctgatcttcctgctgtgctactacatcatccgcttcatctaccgcctggccctgacagaggagcagcagctgatgtttgagaagctgaccctgtactgtgacagctacatccagctgatccccatcagctttgtgctgggcttctacgtgaccctggtggtgacccgctggtggaaccagtatgagaacctgccctggccagaccggctgatgagcctggtgtctggctttgtggagggcaaggatgagcagggccgcctgctgcggaggaccctcatccgctatgccaacctgggcaatgtgctgatcctgcggtctgtgtccacagctgtgtacaagcgcttccccagcgcccagcacctggtgcaggccggcttcatgaccccagctgagcacaagcagctggagaagctgagcctgccccacaacatgttctgggtgccctgggtgtggtttgccaacctgtccatgaaggcctggctgggcggccgcatccgggaccccatcctgctgcagagcctgctgaatgagatgaacaccctgcggacccagtgtggccacctgtatgcctatgactggatcagcatccccctggtgtacacccagcctgagcagagaggagatggagtgcctgcccagagcggcggccggggcggctgcagccgctggcaccactggcccctgcccaggcctgctgtgccctag

SEQ ID NO: 285036 - DNA, 813 bp, Artificial Sequence
  derived and/or modified sequence
atgaccatcacctacaccagccaggtggccaacgcccggctgggctccttctctaggctcctgctgtgttggagaggtagcatctacaagctgctctacggtgaattcctgatctttctcctctgctactatattatacgattcatctacaggttagccctgactgaagaacagcagttaatgttcgagaagctcaccctatactgtgacagctacatccagctgatcccaattagttttgtcctgggattttatgtaacactcgtggtgacaagatggtggaaccagtacgaaaatctgccatggcccgatagactgatgagtcttgtcagtggcttcgttgagggtaaagatgaacagggccgcctgctacgacggacacttattaggtatgcaaacctcgggaatgttctcatcctccggtctgtcagcacagccgtttacaagcgtttcccttcagcccagcacctcgtacaggctggattcatgaccccggccgagcacaaacaacttgagaaactttcactgccacacaatatgttctgggtcccatgggtgtggtttgcaaacctgtcaatgaaagcttggcttggcggcagaataagggatcccatcctgctgcagtccctactcaacgagatgaacacactccgtacccagtgcggccatctttacgcctatgactggataagcattcctctcgtctacactcagcccgagcaacggggagatggtgtccctgcccagagtggaggcagggggggatgcagcaggtggcaccattggccactccctcgaccggccgtaccatag

SEQ ID NO: 285037 - DNA, 813 bp, Artificial Sequence
  derived and/or modified sequence
atgaccatcacttatactagtcaggtcgctaacgcgaggctgggatccttcagtagactgctgctgtgctggcgcggtagtatttacaagttactctatggcgaattcttgatcttcctgttgtgttattacattatccgcttcatctatcggcttgcactgacagaggaacaacagctgatgttcgaaaaactgaccctgtactgcgactcgtacatccagctcatcccaatctcctttgtactgggcttttacgtcactctggtggttactaggtggtggaaccaatacgaaaatctgccgtggcccgaccgattgatgtctctggttagtggatttgtggagggaaaggatgagcagggcagattgctccgccgaacattaatacgctacgctaacctcggaaacgtgctcatcctgagatctgtgtcgacggccgtgtacaaaagattccccagcgctcagcacctcgtccaggccggttttatgacacccgctgagcacaagcagttagagaagttgtccttaccccataacatgttttgggtgccctgggtgtggtttgccaatctgtctatgaaggcgtggctgggtgggcgtattagagacccgatcctgctgcaaagtctgctgaacgaaatgaatactctccggactcagtgcgggcatctgtatgcctacgactggattagcatccccctcgtctacactcagccagagcagaggggcgacggagtgccagcacagagtgggggacgcggtggctgtagccggtggcaccactggccacttccccgacccgctgtgccctag

SEQ ID NO: 285038 - DNA, 1023 bp, Artificial Sequence
  derived and/or modified sequence
acagagtcccagggagtcccaccagcctagtcgccagaccttctgtgggatcatcggacccacctggaaccccacctgacccaagcccacctgctgcagcccactgcctggccatgaccatcacttacacaagccaagtggctaatgcccgcttaggctccttctcccgcctgctgctgtgctggcggggcagcatctacaagctgctatatggcgagttcttaatcttcctgctctgctactacatcatccgctttatttataggctggccctcacggaagaacaacagctgatgtttgagaaactgactctgtattgcgacagctacatccagctcatccccatttccttcgtgctgggcttctacgtgacgctggtcgtgacccgctggtggaaccagtacgagaacctgccgtggcccgaccgcctcatgagcctggtgtcgggcttcgtcgaaggcaaggacgagcaaggccggctgctgcggcgcacgctcatccgctacgccaacctgggcaacgtgctcatcctgcgcagcgtcagcaccgcagtctacaagcgcttccccagcgcccagcacctggtgcaagcaggctttatgactccggcagaacacaagcagttggagaaactgagcctaccacacaacatgttctgggtgccctgggtgtggtttgccaacctgtcaatgaaggcgtggcttggaggtcgaatccgggaccctatcctgctccagagcctgctgaacgagatgaacaccttgcgtactcagtgtggacacctgtatgcctacgactggattagtatcccactggtgtatacacagcctgaacaaagaggagatggagttccagcccaatcaggaggacgaggaggatgctcacgctggcatcattggccgcttcctaggcctgcagtcccatgatcaccatcctcccagggcaaactcaaggaccaaactactgtggcccaagagggaatcccttctccacgagggcctgcccaaaaaccacaaggcagcc

SEQ ID NO: 285039 - DNA, 813 bp, Artificial Sequence
  derived and/or modified sequence
atgaccatcacctacaccagccaggtggccaacgccagactgggcagcttcagcagactgctgctgtgctggagaggcagcatctacaagctgctgtacggcgagttcctgatcttcctgctgtgctactacatcatcagattcatctacagactggccctgaccgaggagcagcagctgatgttcgagaagctgaccctgtactgcgacagctacatccagctgatccccatcagcttcgtgctgggcttctacgtgaccctggtggtgaccagatggtggaaccagtacgagaacctgccctggcccgacagactgatgagcctggtgagcggcttcgtggagggcaaggacgagcagggcagactgctgagaagaaccctgatcagatacgccaacctgggcaacgtgctgatcctgagaagcgtgagcaccgccgtgtacaagagattccccagcgcccagcacctggtgcaggccggcttcatgacccccgccgagcacaagcagctggagaagctgagcctgccccacaacatgttctgggtgccctgggtgtggttcgccaacctgagcatgaaggcctggctgggcggcagaatcagagaccccatcctgctgcagagcctgctgaacgagatgaacaccctgagaacccagtgcggccacctgtacgcctacgactggatcagcatccccctggtgtacacccagcccgagcagagaggcgacggcgtgcccgcccagagcggcggcagaggcggctgcagcagatggcaccactggcccctgcccagacccgccgtgccctag

SEQ ID NO: 285040 - protein, 5890 aa, Artificial Sequence
  derived and/or modified sequence
MEKEETTRELLLPNWQGSGSHGLTIAQRDDGVFVQEVTQNSPAARTGVVKEGDQIVGATIYFDNLQSGEVTQLLNTMGHHTVGLKLHRKGDRSPEPGQTWTREVFSSCSSEVVLSGDDEEYQRIYTTKIKPRLKSEDGVEGDLGETQSRTITVTRRVTAYTVDVTGREGAKDIDISSPEFKIKIPRHELTEISNVDVETQSGKTVIRLPSGSGAASPTGSAVDIRAGAISASGPELQGAGHSKLQVTMPGIKVGGSGVNVNAKGLDLGGRGGVQVPAVDISSSLGGRAVEVQGPSLESGDHGKIKFPTMKVPKFGVSTGREGQTPKAGLRVSAPEVSVGHKGGKPGLTIQAPQLEVSVPSANIEGLEGKLKGPQITGPSLEGDLGLKGAKPQGHIGVDASAPQIGGSITGPSVEVQAPDIDVQGPGSKLNVPKMKVPKFSVSGAKGEETGIDVTLPTGEVTVPGVSGDVSLPEIATGGLEGKMKGTKVKTPEMIIQKPKISMQDVDLSLGSPKLKGDIKVSAPGVQGDVKGPQVALKGSRVDIETPNLEGTLTGPRLGSPSGKTGTCRISMSEVDLNVAAPKVKGGVDVTLPRVEGKVKVPEVDVRGPKVDVSAPDVEAHGPEWNLKMPKMKMPTFSTPGAKGEGPDVHMTLPKGDISISGPKVNVEAPDVNLEGLGGKLKGPDVKLPDMSVKTPKISMPDVDLHVKGTKVKGEYDVTVPKLEGELKGPKVDIDAPDVDVHGPDWHLKMPKMKMPKFSVPGFKAEGPEVDVNLPKADVDISGPKIDVTAPDVSIEEPEGKLKGPKFKMPEMNIKVPKISMPDVDLHLKGPNVKGEYDVTMPKVESEIKVPDVELKSAKMDIDVPDVEVQGPDWHLKMPKMKMPKFSMPGFKAEGPEVDVNLPKADVDISGPKVGVEVPDVNIEGPEGKLKGPKFKMPEMNIKAPKISMPDVDLHMKGPKVKGEYDMTVPKLEGDLKGPKVDVSAPDVEMQGPDWNLKMPKIKMPKFSMPSLKGEGPEFDVNLSKANVDISAPKVDTNAPDLSLEGPEGKLKGPKFKMPEMHFRAPKMSLPDVDLDLKGPKMKGNVDISAPKIEGEMQVPDVDIRGPKVDIKAPDVEGQGLDWSLKIPKMKMPKFSMPSLKGEGPEVDVNLPKADVVVSGPKVDIEAPDVSLEGPEGKLKGPKFKMPEMHFKTPKISMPDVDLHLKGPKVKGDVDVSVPKVEGEMKVPDVEIKGPKMDIDAPDVEVQGPDWHLKMPKMKMPKFSMPGFKGEGREVDVNLPKADIDVSGPKVDVEVPDVSLEGPEGKLKGPKFKMPEMHFKAPKISMPDVDLNLKGPKLKGDVDVSLPEVEGEMKVPDVDIKGPKVDISAPDVDVHGPDWHLKMPKVKMPKFSMPGFKGEGPEVDVKLPKADVDVSGPKMDAEVPDVNIEGPDAKLKGPKFKMPEMSIKPQKISIPDVGLHLKGPKMKGDYDVTVPKVEGEIKAPDVDIKGPKVDINAPDVEVHGPDWHLKMPKVKMPKFSMPGFKGEGPEVDMNLPKADLGVSGPKVDIDVPDVNLEAPEGKLKGPKFKMPSMNIQTHKISMPDVGLNLKAPKLKTDVDVSLPKVEGDLKGPEIDVKAPKMDVNVGDIDIEGPEGKLKGPKFKMPEMHFKAPKISMPDVDLHLKGPKVKGDMDVSVPKVEGEMKVPDVDIKGPKVDIDAPDVEVHDPDWHLKMPKMKMPKFSMPGFKAEGPEVDVNLPKADIDVSGPSVDTDAPDLDIEGPEGKLKGSKFKMPKLNIKAPKVSMPDVDLNLKGPKLKGEIDASVPELEGDLRGPQVDVKGPFVEAEVPDVDLECPDAKLKGPKFKMPEMHFKAPKISMPDVDLHLKGPKVKGDADVSVPKLEGDLTGPSVGVEVPDVELECPDAKLKGPKFKMPDMHFKAPKISMPDVDLHLKGPKVKGDVDVSVPKLEGDLTGPSVGVEVPDVELECPDAKLKGPKFKMPEMHFKTPKISMPDVDLHLKGPKVKGDMDVSVPKVEGEMKVPDVDIKGPKMDIDAPDVDVHGPDWHLKMPKMKMPKFSMPGFKAEGPEVDVNLPKADVVVSGPKVDVEVPDVSLEGPEGKLKGPKLKMPEMHFKAPKISMPDVDLHLKGPKVKGDVDVSLPKLEGDLTGPSVDVEVPDVELECPDAKLKGPKFKMPEMHFKTPKISMPDVNLNLKGPKVKGDMDVSVPKVEGEMKVPDVDIRGPKVDIDAPDVDVHGPDWHLKMPKMKMPKFSMPGFKGEGPEVDVNLPKADVDVSGPKVDVEVPDVSLEGPEGKLKGPKFKMPEMHFKTPKISMPDVDFNLKGPKIKGDVDVSAPKLEGELKGPELDVKGPKLDADMPEVAVEGPNGKWKTPKFKMPDMHFKAPKISMPDLDLHLKSPKAKGEVDVDVPKLEGDLKGPHVDVSGPDIDIEGPEGKLKGPKFKMPDMHFKAPNISMPDVDLNLKGPKIKGDVDVSVPEVEGKLEVPDMNIRGPKVDVNAPDVQAPDWHLKMPKMKMPKFSMPGFKAEGPEVDVNLPKADVDISGPKVDIEGPDVNIEGPEGKLKGPKLKMPEMNIKAPKISMPDFDLHLKGPKVKGDVDVSLPKVEGDLKGPEVDIKGPKVDINAPDVGVQGPDWHLKMPKVKMPKFSMPGFKGEGPDGDVKLPKADIDVSGPKVDIEGPDVNIEGPEGKLKGPKFKMPEMNIKAPKISMPDIDLNLKGPKVKGDVDVSLPKVEGDLKGPEVDIKGPKVDIDAPDVDVHGPDWHLKMPKIKMPKISMPGFKGEGPDVDVNLPKADIDVSGPKVDVECPDVNIEGPEGKWKSPKFKMPEMHFKTPKISMPDIDLNLTGPKIKGDVDVTGPKVEGDLKGPEVDLKGPKVDIDVPDVNVQGPDWHLKMPKMKMPKFSMPGFKAEGPEVDVNLPKADVDVSGPKVDVEGPDVNIEGPEGKLKGPKFKMPEMNIKAPKIPMPDFDLHLKGPKVKGDVDISLPKVEGDLKGPEVDIRGPQVDIDVPDVGVQGPDWHLKMPKVKMPKFSMPGFKGEGPDVDVNLPKADLDVSGPKVDIDVPDVNIEGPEGKLKGPKFKMPEMNIKAPKISMPDIDLNLKGPKVKGDMDVSLPKVEGDMKVPDVDIKGPKVDINAPDVDVQGPDWHLKMPKIKMPKISMPGFKGEGPEVDVNLPKADLDVSGPKVDVDVPDVNIEGPDAKLKGPKFKMPEMNIKAPKISMPDLDLNLKGPKMKGEVDVSLANVEGDLKGPALDIKGPKIDVDAPDIDIHGPDAKLKGPKLKMPDMHVNMPKISMPEIDLNLKGSKLKGDVDVSGPKLEGDIKAPSLDIKGPEVDVSGPKLNIEGKSKKSRFKLPKFNFSGSKVQTPEVDVKGKKPDIDITGPKVDINAPDVEVQGKVKGSKFKMPFLSISSPKVSMPDVELNLKSPKVKGDLDIAGPNLEGDFKGPKVDIKAPEVNLNAPDVDVHGPDWNLKMPKMKMPKFSVSGLKAEGPDVAVDLPKGDINIEGPSMNIEGPDLNVEGPEGGLKGPKFKMPDMNIKAPKISMPDIDLNLKGPKVKGDVDISLPKLEGDLKGPEVDIKGPKVDINAPDVDVHGPDWHLKMPKVKMPKFSMPGFKGEGPEVDVTLPKADIDISGPNVDVDVPDVNIEGPDAKLKGPKFKMPEMNIKAPKISMPDFDLNLKGPKMKGDVVVSLPKVEGDLKGPEVDIKGPKVDIDTPDINIEGSEGKFKGPKFKIPEMHLKAPKISMPDIDLNLKGPKVKGDVDVSLPKMEGDLKGPEVDIKGPKVDINAPDVDVQGPDWHLKMPKVKMPKFSMPGFKGEGPDVDVNLPKADLDVSGPKVDIDVPDVNIEGPEGKLKGPKFKMPEMNIKAPKISMPDIDLNLKGPKVKGDMDVSLPKVEGDMQVPDLDIKGPKVDINAPDVDVRGPDWHLKMPKIKMPKISMPGFKGEGPEVDVNLPKADLDVSGPKVDVDVPDVNIEGPDAKLKGPKFKMPEMNIKAPKISMPDFDLHLKGPKVKGDVDVSLPKMEGDLKAPEVDIKGPKVDIDAPDVDVHGPDWHLKMPKVKMPKFSMPGFKGEGPEVDVNLPKADIDVSGPKVDIDTPDIDIHGPEGKLKGPKFKMPDLHLKAPKISMPEVDLNLKGPKMKGDVDVSLPKVEGDLKGPEVDIKGPKVDIDVPDVDVQGPDWHLKMPKVKMPKFSMPGFKGEGPDVDVNLPKADLDVSGPKVDIDVPDVNIEGPDAKLKGPKFKMPEMNIKAPKISMPDFDLHLKGPKVKGDVDVSLPKVEGDLKGPEVDIKGPKVDIDAPDVDVHGPDWHLKMPKVKMPKFSMPGFKGEGPDVDVTLPKADIEISGPKVDIDAPDVSIEGPDAKLKGPKFKMPEMNIKAPKISMPDIDFNLKGPKVKGDVDVSLPKVEGDLKGPEIDIKGPSLDIDTPDVNIEGPEGKLKGPKFKMPEMNIKAPKISMPDFDLHLKGPKVKGDVDVSLPKVESDLKGPEVDIEGPEGKLKGPKFKMPDVHFKSPQISMSDIDLNLKGPKIKGDMDISVPKLEGDLKGPKVDVKGPKVGIDTPDIDIHGPEGKLKGPKFKMPDLHLKAPKISMPEVDLNLKGPKVKGDMDISLPKVEGDLKGPEVDIRDPKVDIDVPDVDVQGPDWHLKMPKVKMPKFSMPGFKGEGPDVDVNLPKADIDVSGPKVDVDVPDVNIEGPDAKLKGPKFKMPEMSIKAPKISMPDIDLNLKGPKVKGDVDVTLPKVEGDLKGPEADIKGPKVDINTPDVDVHGPDWHLKMPKVKMPKFSMPGFKGEGPDVDVSLPKADIDVSGPKVDVDIPDVNIEGPDAKLKGPKFKMPEINIKAPKISIPDVDLDLKGPKVKGDFDVSVPKVEGTLKGPEVDLKGPRLDFEGPDAKLSGPSLKMPSLEISAPKVTAPDVDLHLKAPKIGFSGPKLEGGEVDLKGPKVEAPSLDVHMDSPDINIEGPDVKIPKFKKPKFGFGAKSPKADIKSPSLDVTVPEAELNLETPEISVGGKGKKSKFKMPKIHMSGPKIKAKKQGFDLNVPGGEIDASLKAPDVDVNIAGPDAALKVDVKSPKTKKTMFGKMYFPDVEFDIKSPKFKAEAPLPSPKLEGELQAPDLELSLPAIHVEGLDIKAKAPKVKMPDVDISVPKIEGDLKGPKVQANLGAPDINIEGLDAKVKTPSFGISAPQVSIPDVNVNLKGPKIKGDVPSVGLEGPDVDLQGPEAKIKFPKFSMPKIGIPGVKMEGGGAEVHAQLPSLEGDLRGPDVKLEGPDVSLKGPGVDLPSVNLSMPKVSGPDLDLNLKGPSLKGDLDASVPSMKVHAPGLNLSGVGGKMQVGGDGVKVPGIDATTKLNVGAPDVTLRGPSLQGDLAVSGDIKCPKVSVGAPDLSLEASEGSIKLPKMKLPQFGISTPGSDLHVNAKGPQVSGELKGPGVDVNLKGPRISAPNVDFNLEGPKVKGSLGATGEIKGPTVGGGLPGIGVQGLEGNLQMPGIKSSGCDVNLPGVNVKLPTGQISGPEIKGGLKGSEVGFHGAAPDISVKGPAFNMASPESDFGINLKGPKIKGGADVSGGVSAPDISLGEGHLSVKGSGGEWKGPQVSSALNLDTSKFAGGLHFSGPKVEGGVKGGQIGLQAPGLSVSGPQGHLESGSGKVTFPKMKIPKFTFSGRELVGREMGVDVHFPKAEASIQAGAGDGEWEESEVKLKKSKIKMPKFNFSKPKGKGGVTGSPEASISGSKGDLKSSKASLGSLEGEAEAEASSPKGKFSLFKSKKPRHRSNSFSDEREFSGPSTPTGTLEFEGGEVSLEGGKVKGKHGKLKFGTFGGLGSKSKGHYEVTGSDDETGKLQGSGVSLASKKSRLSSSSSNDSGNKVGIQLPEVELSVSTKKE

SEQ ID NO: 285041 - protein, 86 aa, Artificial Sequence
  derived and/or modified sequence
MEKEETTRELLLPNWQGSGSHGLTIAQRDDGVFVQEVTQNSPAARTGVVKEGDQIVGATIYFDNLQSGEVTQLLNTMGHHTVGLKL

SEQ ID NO: 285042 - DNA, 17673 bp, Artificial Sequence
  derived and/or modified sequence
atggagaaggaagagactactagggagctgctgctccctaactggcaagggtctggttctcacggcctcaccatcgctcaaagagacgatggagtgtttgttcaggaagtaacgcagaatagccccgctgcaagaacgggtgtagttaaagagggcgatcagattgtgggggccaccatttactttgacaacctgcagagcggggaggtaacacagctgttgaataccatgggtcatcacactgtgggacttaaacttcatcggaaaggtgaccggagccccgagcctgggcagacttggacccgggaagtttttagcagttgttctagcgaggtggtgttgtcgggagacgacgaggaatatcaacgcatctacactacaaagatcaaaccaaggctcaaaagcgaagacggcgtggagggagacttaggggagacgcagagcagaaccatcaccgtcactcgacgcgtaactgcttataccgtggatgtcacaggtagagagggagccaaggatattgacatatcctcaccagagtttaagataaagattcctagacacgaactgaccgaaatatccaatgtggatgtcgaaacccaatcaggtaaaactgtgataaggctcccctccggatcgggtgcggccagtccaactggttccgctgtggatataagggctggcgcgataagcgcgtccggtcccgaactgcaaggcgccggacattccaagctgcaggtaaccatgcctggcattaaggtgggagggagtggggtgaacgtcaatgcaaaaggcctggatctcggaggtagaggcggagtccaggtgcctgcagttgatatctcgtccagcctaggaggtcgtgctgtcgaggtacagggaccgtccctggaatccggtgatcatggaaagattaaatttcctaccatgaaagtgccaaagtttggggtttctacagggcgggaaggccaaacccccaaagctggtctgcgagtatctgctcccgaggtgagtgtgggtcataaaggcggcaaaccaggcctaacgatccaggcccctcagcttgaggtttcagtgcctagcgctaacatcgagggcctggagggaaagctcaagggacctcagataactgggccgtctctggaaggcgacttaggcctaaagggagcaaaaccgcaaggacacattggggtggatgcctcagccccccagatcggtgggtcaatcaccggcccctctgtggaggttcaggcgccagacattgatgtccagggccccggtagcaaacttaatgtccccaagatgaaggttcctaaattctcagtttcgggggctaagggcgaggaaactggcatcgatgtcacgctgccaacaggggaagttaccgtgccaggggtctccggggacgtatcgctgcccgaaatagctactgggggcttagaaggcaaaatgaagggaaccaaagtcaagacccccgaaatgatcattcagaagccaaaaatatccatgcaggatgtggacctgtctctcggctcccccaaattaaaaggcgacattaaggtaagcgctcccggggtccagggagacgtaaagggacctcaggtggcccttaagggcagccgagtcgatatcgagacccccaacctcgagggtacccttactggcccacgtctcggcagcccttcagggaaaacgggcacttgtcgcattagcatgtccgaggtggatttaaatgtggccgcacctaaggtgaaaggaggcgtggacgttactttgcccagggtcgagggtaaggtgaaggttccggaggtggacgttcggggacctaaagttgacgtctccgcaccggatgtggaggcacacggtcctgagtggaacctgaagatgcccaagatgaaaatgcctactttttcaactccaggcgcgaaaggcgaaggcccggacgtccatatgacgttgcccaaaggcgatatctccattagcgggcccaaggtgaatgtagaagctccggacgtcaacctggaggggctaggcggcaagctgaaggggcctgacgtcaagctccccgacatgagtgtgaagactccgaaaatttctatgcctgacgtggatctgcacgtgaaggggactaaggtcaagggggagtatgatgtgacggtgccgaagctggaaggggaactcaagggccctaaggtggatatcgatgctcctgacgtggacgtgcatgggcccgactggcacctgaagatgccaaagatgaaaatgcctaagttcagcgtccctggctttaaggctgagggccccgaggtagacgtgaacctcccgaaggctgatgtggacattagtggccctaaaattgatgtgacagctcccgatgtgtcaattgaggagccagaagggaaactgaagggtccaaaattcaagatgccagagatgaacatcaaagtacctaagataagcatgcccgatgttgacctgcatctgaagggtcccaatgtaaagggagaatacgatgtgacaatgccaaaggtggaaagtgagataaaagtgccggatgtggaactgaagagcgcaaagatggacatagatgtacctgatgttgaggtccagggcccagattggcacctgaaaatgccaaagatgaaaatgcctaaattttcgatgccgggcttcaaagcagaaggtcctgaagtcgatgtaaacctgcccaaagccgatgtagatatcagcggaccgaaagtgggcgtggaagtgccagacgttaacattgagggtccagaaggcaagctcaaagggcctaaatttaagatgcccgaaatgaacatcaaggcccctaaaatttcaatgcccgatgtcgacctgcacatgaaaggccccaaagtgaagggcgagtatgacatgacagtcccgaaattagagggagacttaaagggccctaaggtcgatgttagcgctcccgacgtagagatgcaagggccagattggaatctgaaaatgccaaagatcaaaatgccaaagttttctatgccgagccttaaaggagagggtcctgagtttgacgtgaatctgagcaaggccaacgtagacatatcagccccaaaggtggatactaacgcacccgatctttcgctggaggggcccgaagggaagttaaagggccccaaatttaagatgccagagatgcactttcgggcacctaaaatgagcctccccgacgtcgacctggaccttaaggggccaaagatgaaggggaacgttgacatctctgccccaaagatcgaaggcgaaatgcaggtgccggacgtcgatattcgggggcctaaggttgatatcaaagctcctgatgtggaaggccagggtctagattggagcctgaaaatcccgaagatgaaaatgcccaaattctcgatgcctagcctgaagggagaaggtcctgaagtggatgtgaatctgccgaaggccgatgtagtggtgagtggacctaaggtcgacatcgaggctccagacgtgtccctcgaggggcccgaggggaaactcaagggccccaagtttaagatgccggaaatgcactttaaaactcccaagatctccatgccagacgttgacctacatcttaagggcccaaaagtcaagggtgatgtcgacgtatcagtccctaaagttgaaggggagatgaaagtgcctgacgttgaaatcaagggacccaagatggatatcgacgcacctgacgtcgaggttcagggccccgattggcatctcaagatgccaaaaatgaagatgcccaaattcagcatgccaggcttcaagggagaaggcagagaggttgatgtaaatctgccaaaggccgatatagatgtttctggaccaaaggtggacgtggaggttccagatgtgtcattagaaggcccagagggaaaactcaaaggaccgaagtttaaaatgcctgaaatgcacttcaaggctcctaagatctctatgcccgacgtcgacttaaacctcaagggccctaagctaaaaggcgatgtggatgtctccctgcccgaggtggaaggagagatgaaggtcccagacgtggatatcaagggacccaaagtcgacataagtgctcccgatgtcgacgtccacggccccgattggcacttgaagatgccaaaagtcaaaatgcccaaattcagcatgcctggctttaagggtgaaggacctgaggtagacgtgaaacttcccaaagccgacgttgacgtctccggtccaaagatggacgcggaggtgccagacgtgaacatcgaaggaccagacgcaaaactgaaaggcccaaaatttaagatgcctgagatgtcgatcaagcctcagaagatctccattccggacgttggtctgcacttgaaggggcccaagatgaaaggcgattatgatgtgacagttccaaaggtggaaggcgagattaaagcccctgacgtagatataaaggggccaaaagtggacataaacgcaccggacgtggaggttcacgggcctgactggcacctcaaaatgcctaaagtcaaaatgcccaaattctcaatgccagggtttaaaggggagggcccagaggtcgacatgaatctgcctaaagctgacctgggggtgtccggtcctaaagtggacatcgacgtgcccgatgtgaacttggaggctcctgaaggaaagctcaaggggcccaagttcaagatgcctagtatgaacatccaaacacacaagatctcaatgcctgatgtggggctgaacctgaaagctcccaaattgaaaacagacgttgatgtctcactgccgaaggtagaaggggacctgaaaggtcccgaaatagacgtgaaggcccctaagatggatgtgaacgtcggggatatcgatatcgagggaccagagggaaagctgaaggggccgaagtttaagatgcccgagatgcattttaaggcccctaagattagtatgcccgatgtcgatctccacctcaaagggccgaaggtcaaaggcgatatggatgtgtccgtgcctaaggtcgaaggagaaatgaaggtgccggatgtggatatcaaaggccccaaggttgatattgatgcacctgatgtggaagtacatgaccctgactggcatctgaaaatgcccaaaatgaagatgccaaagtttagtatgccggggtttaaggctgaaggccccgaagtcgacgttaatcttccgaaggcagacattgatgtttctggcccttctgtggatacggatgcccccgatttggacattgaaggcccagaagggaagctaaagggaagtaagttcaagatgccaaagctgaatatcaaagccccgaaagtctctatgccagatgttgatctgaatttgaagggcccgaaactaaagggcgagattgatgcttccgtgccggaattggagggagatcttcggggcccccaggtagacgtaaagggcccttttgtggaggccgaagtacctgatgttgatcttgaatgtccagatgctaaactgaagggccccaaatttaagatgcctgaaatgcacttcaaagctcccaaaattagcatgcctgacgtcgacctgcacttgaaaggacccaaggttaaaggagatgcggatgtctccgtcccaaagctggagggggatctgacagggccctcagtcggcgtggaagtacccgacgtcgagctcgagtgccccgacgcaaagctcaaaggcccgaagttcaagatgcccgacatgcactttaaggcccctaagatctccatgccagatgtggacctccatcttaagggtcccaaagtaaaaggagacgttgatgtgagcgtgcccaagctcgagggggacctgacaggcccatctgtcggggtcgaggtcccagacgtagaactggagtgcccagacgctaaactgaaaggccccaagtttaaaatgccggagatgcacttcaagacgccaaaaatatctatgcctgacgtggatcttcatctgaagggaccaaaagtcaaaggagacatggacgttagtgtccccaaggtggagggcgaaatgaaggttcctgacgtcgatattaaaggaccaaagatggatatcgacgcacctgacgtggacgtgcacggccctgactggcacctcaaaatgccgaagatgaagatgcccaagttttcgatgcccggcttcaaggctgaagggcccgaggtggacgtgaacctaccgaaagccgacgttgtggtgagcggacccaaagtagacgtggaggtccccgatgtttctcttgaaggaccggaggggaagcttaagggccctaaactgaaaatgccggaaatgcacttcaaggcccccaagattagcatgccagacgtagatctgcatctgaagggtcctaaggtgaagggcgacgtcgacgttagcctcccgaagctcgagggtgatcttaccgggccatctgtggatgtggaagttcctgatgtggaactcgaatgccctgacgcaaagctgaaaggcccgaagttcaaaatgccggaaatgcattttaaaacgccaaagattagtatgccagacgtcaatctcaatctcaagggacccaaagttaagggtgacatggatgtttctgtgcccaaagtcgagggcgagatgaaggtccctgacgtggatatcaggggccctaaagtggacatagacgctcctgacgtcgacgtccacggaccggattggcatttgaaaatgccgaagatgaagatgcctaagttctcaatgcccggatttaagggggaagggcccgaagtcgatgtgaatctgcctaaagccgacgttgacgtcagcggccctaaggtcgatgttgaagtgccggacgtatccctcgagggcccagaaggaaaactcaaggggcctaaatttaagatgcccgaaatgcacttcaaaacaccaaagataagcatgcccgacgtggattttaacctgaagggaccaaaaattaagggcgacgtcgacgtctccgcgcctaagttagagggcgagctcaaggggcccgagctggacgtaaaaggaccaaaactggatgccgacatgcccgaagtcgctgtggagggccctaacggcaagtggaaaacgccaaaattcaaaatgcccgacatgcacttcaaggcacccaaaatcagcatgcccgacttggacctgcatcttaagagcccaaaggccaagggagaggtggatgtggacgttccaaagctcgagggcgatcttaaggggccgcatgttgatgtgtctggacccgatatcgatatcgagggccctgagggcaagctgaaagggcccaaattcaaaatgcccgacatgcacttcaaagctcccaacatctcaatgccagacgtggacctgaatctgaaaggacccaaaataaagggagatgtggatgtgagtgtgccggaggtcgaagggaaactggaggtaccagacatgaatatcaggggcccgaaggtcgatgtcaacgcccctgatgtgcaggctcctgattggcatttgaaaatgcccaaaatgaagatgccaaaattttcaatgccaggcttcaaggctgagggaccggaggtggacgtcaacctgcctaaggctgatgtggacatctcaggccccaaagtagatattgaaggtcccgatgttaatatcgaaggcccagaagggaagctaaagggaccaaagctcaagatgcctgaaatgaatatcaaagctcccaaaataagcatgcctgattttgacctacatctcaaaggacctaaggtcaaaggcgatgtcgacgtaagcctccctaaagttgaaggagacttaaagggccctgaggtcgacatcaaggggcctaaagtcgatattaatgccccagatgtcggcgtccaggggcccgattggcatttgaagatgccaaaagtcaagatgcccaaattttctatgccagggttcaagggcgagggacctgatggcgatgtcaagctgcccaaggcagacatcgacgtgagcggacccaaggtggatattgaggggcctgatgtaaatatcgagggacccgaaggaaagctgaagggacctaaatttaaaatgcctgaaatgaatataaaagctcccaaaatctcgatgccggatattgatctgaacctcaagggtcctaaggtgaagggcgacgttgacgtgagcttacctaaagtcgagggagacctgaagggaccggaggtcgatattaaggggccgaaggttgatatcgacgcgccagacgtcgacgtccacggccccgactggcatctgaagatgcccaaaatcaaaatgcccaaaatttctatgcctggctttaagggggagggtcctgatgtcgatgtcaatctgccaaaggcggatatcgacgtttctggacctaaggtagacgtggagtgtccagacgtgaacatagagggtcccgaagggaaatggaagagtcccaaattcaagatgcccgaaatgcacttcaaaacccccaagatttctatgcccgatattgatctgaatcttacagggcccaaaattaagggcgatgtcgatgtcactggtccaaaggtagagggcgatcttaagggtccagaggttgatctgaagggcccaaaggtggatatcgacgttcccgatgtaaacgtgcagggccccgattggcatctgaagatgcccaaaatgaagatgcctaaattttcaatgcctgggtttaaagcggaagggcccgaggtagacgtgaatctgcccaaggctgatgtagacgtgagcgggcctaaggtggacgttgaaggcccggacgtgaatatcgagggccctgaaggaaaacttaaaggacccaaatttaagatgcctgaaatgaacattaaagcccccaaaataccaatgcccgacttcgacctgcatcttaagggaccaaaagtcaagggtgacgtagatatcagcctgcccaaggtcgagggcgacttgaaggggccggaggttgacattaggggcccacaagttgatatagatgtgccagatgtgggggtgcagggccccgactggcaccttaagatgcctaaagtcaagatgcctaagttttcgatgccaggattcaagggggagggacctgatgtggacgtgaatctgcccaaggccgatttagacgtgtccggccccaaagtcgatattgatgttcctgatgtaaacattgagggccccgaaggcaaactcaaaggtcctaagtttaaaatgccagagatgaatataaaagcgcccaagatttctatgcctgacatcgatttgaacctaaaggggccgaaagtgaaaggggacatggatgtgtcgcttcccaaggtggaaggcgatatgaaagtccccgatgtcgatattaagggacccaaagttgatatcaatgcaccggacgtcgacgttcaaggccctgattggcacttgaaaatgccgaaaatcaaaatgcccaaaatttcaatgcctgggtttaagggcgaaggcccagaagtagacgtaaatctgcctaaagccgatctcgatgtgagcggaccaaaggttgacgttgatgtgccagatgttaatatcgaaggtcccgacgcaaaactgaagggcccaaagttcaagatgcccgaaatgaatattaaggcccccaagatctccatgcccgacttggacctgaacctaaaggggccaaaaatgaagggcgaggttgatgtgtctctggcaaacgttgagggcgaccttaagggacctgcgctggatataaagggccccaaaatcgatgtggatgcccccgatatcgatattcacggccctgacgccaagctgaagggccccaagctcaagatgcccgacatgcatgtgaacatgcctaagatatcaatgcctgaaattgacctgaacctgaaggggagtaagctgaaaggagacgtcgatgtaagcggtccgaagctagagggcgatatcaaagctcccagcctggatataaaaggacctgaagttgacgtctccggcccaaaactcaacattgagggcaagtcaaaaaagtctagattcaagctgcctaaatttaacttcagcgggagcaaagtgcagaccccggaggtggacgttaaagggaagaagccagacatcgatataactggacctaaagtggacatcaatgcgcccgatgtggaggtgcaagggaaagtgaagggctctaagttcaagatgccattcttgagtattagcagccccaaggtgtccatgccagatgtcgagttgaatctgaagagccccaaggttaagggagatctggacatcgccggccctaatctggaaggcgatttcaagggcccaaaagtcgatatcaaagcacctgaggtgaatctgaacgctccagacgtggatgttcacgggcctgactggaacctcaaaatgccaaagatgaagatgccaaaattctccgtcagcggtctgaaagcagaggggccagatgtggccgtggacctgccaaagggcgatattaacatcgaaggaccatcaatgaacattgagggaccggacctaaacgttgagggtcctgaaggaggcctgaaggggccaaagtttaaaatgccagacatgaacataaaagctcctaagatctctatgcccgacatcgatctcaacctgaaaggaccaaaagtgaaaggcgatgtcgacatctccctgcccaagctggagggcgacctcaaggggcctgaggtagacatcaagggtcctaaggtcgatattaatgccccagatgtagatgtccatgggccagactggcacttgaagatgccgaaagtgaagatgcctaagttttccatgccggggttcaagggggagggaccagaagtggacgtgacactgcccaaggctgacattgatatcagtggccccaacgttgacgttgatgtgcccgacgtgaacatcgagggtccagatgccaagttgaaggggcctaagtttaaaatgcctgaaatgaacatcaaagcacctaagatatccatgccggacttcgatttgaacttgaagggccccaaaatgaaaggagacgtggtagtgtctcttcccaaggtcgagggggatctcaagggcccagaggtcgacattaaggggccaaaagttgacatagatacgccggacattaacattgagggatctgaaggcaagttcaagggccccaaatttaagattccggaaatgcatttaaaggccccaaaaatttccatgcccgatattgatctgaacttgaagggcccaaaagtgaaaggcgatgttgacgtgtctttgccaaagatggaaggggatttgaaaggcccagaggtcgacattaaaggccccaaggtcgacattaacgcacctgatgtggatgtgcaggggcccgattggcacctcaagatgcctaaagtgaagatgccaaaattttctatgcctggattcaaaggtgagggccctgatgtcgacgtgaatctgcctaaggctgacttggatgtcagcggccccaaagtcgacatcgatgtcccagatgtgaacattgaagggcctgaagggaagctgaagggaccaaaattcaaaatgccagaaatgaacatcaaggcccctaagatatccatgccagacattgatttgaacctgaagggaccaaaagtgaagggagatatggacgtgagtttaccaaaggtggagggagacatgcaggtgcctgacttggatatcaaggggccgaaggtggatattaatgcacctgacgtcgatgtgcgggggccggattggcacttgaaaatgccaaaaattaagatgcccaagatttccatgcccggcttcaagggcgagggccccgaagtcgacgtcaacttgccaaaggccgacctggatgtgtcagggcctaaagtagatgtggatgttcctgacgtcaatattgaaggaccagatgcaaagcttaaaggccctaaatttaagatgccagagatgaacattaaagcgcctaaaatatcgatgccagattttgacttgcacctaaaaggtcctaaggtgaaaggagacgtggacgtctctttaccaaagatggaaggggatctaaaagcacccgaggttgacataaagggtcccaaggtggacatcgacgcccccgatgtggacgtccatggacccgactggcacttgaaaatgcccaaggtcaagatgcctaaattctcaatgcctggctttaaaggggaaggacctgaagtggacgtgaacctgcccaaggctgacattgacgtgtctggccctaaagtcgacatcgatacaccagacattgatatccatggccctgaaggcaagctcaagggaccgaagttcaaaatgcccgatctgcacttaaaagctcctaaaatctccatgccggaggtcgatctaaacctgaagggtccgaagatgaagggcgacgtggacgtgtctctgcctaaggtcgaaggggatctcaaggggcccgaggtcgatatcaaaggcccgaaagttgacatcgatgtgcccgacgtcgacgtacaaggcccagattggcatctcaagatgccaaaggtgaagatgccaaaattctctatgccaggatttaagggcgaaggacccgatgttgacgtgaacctgcctaaggcagatctagacgtgagtggacctaaggtggatatcgatgtccccgacgtgaacattgagggccccgacgctaaactcaaaggccctaagttcaagatgcccgagatgaacattaaggccccaaaaattagcatgcccgacttcgacctgcacctgaaaggccctaaggtgaaaggggatgtggacgtctcactgcccaaagtggagggcgacctgaaggggcctgaggtggatataaagggccctaaggtggatatcgacgcccctgacgtggacgtgcacggcccggattggcatttgaagatgccaaaagtaaagatgcctaaattttctatgcccggattcaagggtgaaggcccggatgtagatgtgacacttccaaaagcggatatagagatatcgggcccgaaagtcgatattgatgctcctgacgtgtccatcgaggggccagacgcaaaactgaagggacctaagttcaagatgcccgagatgaacattaaagctcccaagatttcaatgcctgacatcgatttcaatctgaaaggtccgaaggtgaagggagacgttgacgtgagtctgcccaaggttgaaggagatctgaaaggacccgagatcgatatcaaaggcccatccctggatatcgacacccccgacgtgaatatcgaaggtccggaaggaaagttaaaagggcccaaattcaagatgccagagatgaatattaaggcgccaaaaatttcaatgcccgactttgatttgcaccttaagggacccaaggtgaagggggacgtcgacgttagtttgccaaaggtcgagtctgacctgaaaggccccgaagtagatatcgaaggtcctgagggcaagcttaaaggccccaagtttaaaatgcccgacgtccacttcaagtctccacagatttcgatgagtgacatcgatcttaatctgaagggtcccaagatcaagggcgacatggatatttctgtgcccaagttggaaggggacctgaaaggtcctaaagtcgacgtcaaggggccaaaagtgggtattgatacacctgatatcgacatacatggtcctgagggcaaactgaagggccctaagttcaaaatgccagatctccacctaaaggctccgaaaatcagcatgcctgaggtggacctgaacttgaaaggtcccaaggtgaagggcgacatggacatctcgctgccaaaggttgagggagacctgaagggacctgaagtggatattagggaccctaaggtcgacattgacgtgccggatgtcgacgtgcagggacctgactggcatctaaagatgccaaaggtgaagatgcctaagttttccatgcctggttttaagggcgagggcccagacgtggacgtcaatctgcctaaagcagatattgatgtctccggtccaaaggtcgatgtggatgttcccgatgttaatatcgagggcccagacgctaaactcaaaggtcctaagttcaaaatgccagagatgagtataaaagcgcctaaaattagcatgcccgatatcgatctcaacttgaaagggccgaaagttaagggcgatgtggacgttacacttcctaaggttgagggcgatttgaaaggtcccgaggctgatattaaagggcctaaagtggacatcaatacgcctgatgtggacgtgcatggcccggactggcatctgaagatgcccaaggtgaagatgccaaagttttccatgcccgggtttaaaggagaggggcccgacgtcgacgtgtccttgcccaaggcagatatagacgttagcggacctaaggttgacgtcgacattcctgatgtgaacatcgagggccctgatgctaagctgaaaggtccaaagttcaaaatgccggaaatcaacattaaagcacccaaaatatccatccccgacgtggatctcgacttgaagggcccaaaggtaaagggtgatttcgacgtgtcggtgcctaaagtggaaggaactctgaaaggacccgaagtggatttgaaaggccccaggctcgactttgagggacctgacgctaaactgtctggaccatctctgaagatgcctagtctggaaataagtgctcctaaagtcaccgcaccagacgtagatctgcacttgaaagcccccaaaatcggctttagcggacccaagctagagggaggagaggtggacctaaaaggccccaaagtggaggccccaagcctggatgttcacatggactctccggacataaatatagaagggcctgatgttaaaattccgaaattcaaaaagccaaagtttggctttggagcaaaatcccccaaagcagacattaaatctccttctcttgatgtgactgtgccagaagccgaactgaacctcgagacccccgaaatctctgtgggtggcaagggtaagaaatcgaagttcaaaatgccaaaaattcacatgagcggcccaaaaatcaaagccaaaaagcaggggttcgatttaaatgtccctggaggggagatcgatgcttctctgaaagcccccgatgtcgacgtcaatattgccggccccgacgcagcactcaaagtggatgtaaagtcaccaaagactaaaaagactatgtttggtaagatgtacttccctgacgttgaattcgacatcaagtctcccaagtttaaagccgaggccccactgccgtctccaaaactggaaggggagttacaggcacccgatctggagctgagtctgcctgccatccacgtcgaaggcttagatatcaaagcaaaggcacctaaggtgaagatgcctgacgtcgacatatctgtacccaaaattgagggtgacttaaaaggtccgaaggtacaggccaaccttggtgcaccagatataaatatcgagggtctcgacgccaaagtcaagaccccaagttttggcatcagcgccccccaggtgtctatacctgacgtgaacgtaaatctaaagggtccaaagataaagggcgacgtaccctccgtgggccttgaaggccctgacgttgatctgcagggcccggaggcaaaaataaaattcccaaaattcagcatgccaaagattgggatacctggggtgaaaatggaaggcggaggtgcggaggtccatgcccaactcccttctctggaaggggatcttagaggccccgacgtgaaactggaagggcctgatgtcagcctaaagggtcctggcgttgacctgcccagcgttaatctgtctatgcctaaggtgtctggcccagatctggacctgaacttaaagggcccctcactcaaaggagatctggacgcctctgtgccctcgatgaaggtccatgcccccgggctgaacctgagcggggtcggcggtaagatgcaggtgggtggagatggcgtgaaggttccaggaattgatgccaccactaagctgaatgtaggcgcccccgacgttaccttgcggggcccctctcttcaaggcgatctggcagtgagcggcgatattaaatgtcctaaggtgtctgtgggtgcacccgacctgagtttggaagcaagcgagggaagtataaaactgcccaagatgaagctccctcagttcggcatcagcacaccaggatccgatctacacgtaaatgctaaaggaccgcaagtcagcggcgagttgaagggtccaggagtcgatgttaatctcaaggggcctcgaatctctgcgcccaatgtggattttaatctggaaggtcctaaagtgaaaggctcattgggagcgacgggagaaataaaagggccaacggtaggaggcggactaccaggaatcggtgtacagggcctggaaggcaacttacagatgccggggataaaatcctccggatgcgacgtcaatttgcccggtgtaaacgtcaagctaccaactggccagatatccggacccgaaatcaaggggggattaaaaggatccgaggtgggtttccatggtgcagcccctgatatatcagtcaaaggacccgcctttaatatggcaagtcccgagtcagacttcgggattaatctcaagggccctaagatcaaagggggagctgatgtttccgggggtgtctctgcaccagacattagtctcggggaaggacatctgagcgtgaaaggctctggaggtgaatggaaggggccacaggtcagtagtgctctcaacctggacacatctaaatttgccggtgggctgcacttcagcggccctaaagttgagggtggggtaaaaggaggacaaataggcttgcaggcccccggactgtctgtcagcgggccacagggccacctcgaaagtgggtctgggaaggtcacatttcccaagatgaaaattcccaaatttacattttctggacgagaactcgtgggaagagagatgggagtcgatgtgcactttccaaaagcggaagctagtatccaggctggtgccggcgatggagagtgggaggagtccgaggtgaagctgaaaaagtctaagatcaagatgccaaaattcaatttcagcaaacctaagggtaaagggggagtcactggttctccggaggcttccatctccggatcaaaaggagatcttaaatctagcaaagcctctctggggtccttggagggagaggcagaggcagaggcatcatctcctaagggaaaatttagcctcttcaaaagcaagaagccccggcaccggtctaactctttttctgatgagagagaattctctggtccatctaccccgactgggacacttgagttcgaaggaggcgaggtgtctctggaagggggaaaggtgaaggggaagcacggtaaacttaagtttggtactttcggaggattaggcagcaagagtaagggacactacgaagtgacaggtagtgacgacgagaccggtaaacttcagggctctggtgtgtccctggcctccaagaaatccaggctgtcaagtagcagcagtaacgacagcggtaacaaggtgggaatccaactgccggaggtggagctgagcgtgtcgacaaaaaaggaatag

SEQ ID NO: 285043 - DNA, 435 bp, Artificial Sequence
  derived and/or modified sequence
atggaaaaggaggagaccactagagagttgctgctgcccaattggcaagggtcaggaagccacggattgactatcgctcaaagagacgacggcgtgttcgtccaggaagtcacgcagaattctcccgctgccaggacgggagtagtaaaggaaggagaccagatcgtgggggcaacaatctatttcgataacctccagtctggcgaggtgacccagctcctcaacaccatgggccatcacacagtgggcctgaagttgcaccgtaagggggaccgttcgcctgaacccggacagacttggacacgagaagtcttttccagctgttcctcagaggttgtcctcagcggggatgacgaggagtaccagcgcatttacacaaccaaaattaagccgaggctgaagtccgaggatggggttgagggtgatttaggatag

SEQ ID NO: 285044 - DNA, 17673 bp, Artificial Sequence
  derived and/or modified sequence
atggagaaggaggagaccacccgggagctgctgctgcccaactggcagggcagcggcagccacggcctgaccatcgcccagagagatgatggagtgtttgtgcaggaggtgacccagaacagccctgctgccaggactggagtggtgaaggagggggaccagatcgtgggcgccaccatctactttgacaacctgcagagcggggaggtgacccagctgctgaacaccatgggccaccacacagtgggcctgaagctgcacaggaaaggagacaggagccctgagcccggccagacctggacccgggaggtgttcagcagctgcagcagcgaggtggtgctgtctggagatgatgaggagtaccagaggatctacaccaccaagatcaagccccggctgaagtcagaagatggagtggagggggacctgggggagacccagagcaggaccatcaccgtgaccaggagagtgacagcctacacagtggatgtgacaggccgggagggcgccaaggacatcgacatcagcagccctgagttcaagatcaagatccccaggcatgagctgacagagatcagcaatgtggatgtggagacccagagcggcaagacagtcatccggctgcccagcggcagcggggccgccagccccaccggcagcgctgtggacatccgggccggggccatcagcgccagcggccctgagctgcagggcgccggccacagcaagctgcaggtgaccatgcctggcatcaaggtgggcggcagcggcgtgaatgtgaatgccaagggcctggacctgggcggccggggcggcgtgcaggtgcctgctgtggacatcagcagcagcctgggcggccgggctgtggaggtgcagggccccagcctggagagcggggaccacggcaagatcaagttccccaccatgaaggtgcccaagtttggagtgtccacaggccgggagggccagacccccaaggccggcctgcgggtgtctgcccctgaggtgtctgtgggccacaagggcggcaagccaggcctgaccatccaggccccccagctggaggtgtctgtgcccagcgccaacatcgagggcctggagggcaagctgaagggcccccagatcaccggccccagcctggagggggacctgggcctgaagggggccaagccccagggccacatcggcgtggatgccagcgccccccagatcggcggcagcatcaccggccccagcgtggaggtgcaggccccagacattgatgtgcagggccctggcagcaagctgaatgtgcccaagatgaaggtgcccaagttctctgtgtctggggccaagggggaggagactggaattgatgtgaccctgcccactggagaggtgacagtgcctggggtgtctggagatgtgtccctgcctgagatcgccaccggcggcctggagggcaagatgaagggcaccaaggtgaagaccccagagatgatcatccagaagcccaagatctccatgcaggatgtggacctgagcctgggcagccccaagctgaagggggacatcaaggtgtctgcccctggggtgcagggagatgtgaagggcccccaggtggccctgaagggcagccgggtggacatcgagacccccaacctggagggcaccctgaccggcccccggctgggcagccccagcggcaagacaggcacctgccgcatctccatgtctgaggtggacctgaatgtggccgcccccaaggtgaagggcggcgtggatgtgaccctgccccgggtggagggcaaggtgaaggtgcctgaggtggatgtgcggggccccaaggtggatgtgtctgccccagatgtggaggcccacggccctgagtggaacctgaagatgcccaagatgaagatgcccaccttcagcacccctggggccaagggggagggcccagatgtgcacatgaccctgcccaagggggacatcagcatcagcggccccaaggtgaatgtggaggccccagatgtgaacctggagggcctgggcggcaagctgaagggcccagatgtgaagctgcctgacatgtctgtgaagacccccaagatctccatgccagatgtggacctgcacgtgaagggcaccaaggtgaagggggagtatgatgtgacagtgcccaagctggagggggagctgaagggccccaaggtggacattgatgccccagatgtggatgtgcacggccctgactggcacctgaagatgcccaagatgaagatgcccaagttctctgtgcccggcttcaaggccgagggccctgaggtggatgtgaacctgcccaaggcagatgtggacatcagcggccccaagattgatgtgacagccccagatgtgtccattgaggagcctgagggcaagctgaagggccccaagttcaagatgcctgagatgaacatcaaggtgcccaagatctccatgccagatgtggacctgcacctgaagggccccaacgtgaagggggagtatgatgtgaccatgcccaaggtggagagcgagatcaaggtgcctgatgtggagctgaagagcgccaagatggacattgatgtgcctgatgtggaggtgcagggccctgactggcacctgaagatgcccaagatgaagatgcccaagttctccatgcctggcttcaaggccgagggccctgaggtggatgtgaacctgcccaaggcagatgtggacatcagcggccccaaggtgggcgtggaggtgcctgatgtgaacatcgagggccctgagggcaagctgaagggccccaagttcaagatgcctgagatgaacatcaaggcccccaagatctccatgccagatgtggacctgcacatgaagggccccaaggtgaagggggagtatgacatgacagtgcccaagctggagggggacctgaagggccccaaggtggatgtgtctgccccagatgtggagatgcagggccctgactggaacctgaagatgcccaagatcaagatgcccaagttctccatgcccagcctgaagggggagggccctgagtttgatgtgaacctgagcaaggccaacgtggacatcagcgcccccaaggtggacaccaatgccccagacctgagcctggagggccctgagggcaagctgaagggccccaagttcaagatgcctgagatgcacttccgggcccccaagatgagcctgcctgatgtggacctggacctgaagggccccaagatgaagggaaatgtggacatcagcgcccccaagattgaaggagagatgcaggtgcctgatgtggacatccggggccccaaggtggacatcaaggccccagatgtggagggccagggcctggactggagcctgaagatccccaagatgaagatgcccaagttctccatgcccagcctgaagggggagggccctgaggtggatgtgaacctgcccaaggcagatgtggtggtgtctggccccaaggtggacatcgaggccccagatgtgtccctggagggccctgagggcaagctgaagggccccaagttcaagatgcctgagatgcacttcaagacccccaagatctccatgccagatgtggacctgcacctgaagggccccaaggtgaagggagatgtggatgtgtctgtgcccaaggtggagggggagatgaaggtgcctgatgtggagatcaagggccccaagatggacattgatgccccagatgtggaggtgcagggccctgactggcacctgaagatgcccaagatgaagatgcccaagttctccatgcctggcttcaagggggagggccgggaggtggatgtgaacctgcccaaggctgacattgatgtgtctggccccaaggtggatgtggaggtgcctgatgtgtccctggagggccctgagggcaagctgaagggccccaagttcaagatgcctgagatgcacttcaaggcccccaagatctccatgccagatgtggacctgaacctgaagggccccaagctgaagggagatgtggatgtgtccctgcctgaggtggagggggagatgaaggtgcctgatgtggacatcaagggccccaaggtggacatcagcgccccagatgtggatgtgcacggccctgactggcacctgaagatgcccaaggtgaagatgcccaagttctccatgcctggcttcaagggggagggccctgaggtggatgtgaagctgcccaaggcagatgtggatgtgtctggccccaagatggatgctgaggtgcctgatgtgaacatcgagggcccagatgccaagctgaagggccccaagttcaagatgcctgagatgagcatcaagccccagaagatcagcatcccagatgtgggcctgcacctgaagggccccaagatgaagggggactatgatgtgacagtgcccaaggtggagggggagatcaaggccccagatgtggacatcaagggccccaaggtggacatcaatgccccagatgtggaggtgcacggccctgactggcacctgaagatgcccaaggtgaagatgcccaagttctccatgcctggcttcaagggggagggccctgaggtggacatgaacctgcccaaggctgacctgggcgtgtctggccccaaggtggacattgatgtgcctgatgtgaacctggaggcccctgagggcaagctgaagggccccaagttcaagatgcccagcatgaacatccagacccacaagatctccatgccagatgtgggcctgaacctgaaggcccccaagctgaagacagatgtggatgtgtccctgcccaaggtggagggggacctgaagggccctgagattgatgtgaaggcccccaagatggatgtgaatgtgggggacattgatattgagggccctgagggcaagctgaagggccccaagttcaagatgcctgagatgcacttcaaggcccccaagatctccatgccagatgtggacctgcacctgaagggccccaaggtgaagggggacatggatgtgtctgtgcccaaggtggagggggagatgaaggtgcctgatgtggacatcaagggccccaaggtggacattgatgccccagatgtggaggtgcatgaccctgactggcacctgaagatgcccaagatgaagatgcccaagttctccatgcctggcttcaaggccgagggccctgaggtggatgtgaacctgcccaaggctgacattgatgtgtctggccccagcgtggacacagatgccccagacctggacatcgagggccctgagggcaagctgaagggcagcaagttcaagatgcccaagctgaacatcaaggcccccaaggtgtccatgccagatgtggacctgaacctgaagggccccaagctgaagggggagattgatgcctctgtgcctgagctggagggggacctgcggggcccccaggtggatgtgaagggcccctttgtggaggccgaggtgcctgatgtggacctggagtgcccagatgccaagctgaagggccccaagttcaagatgcctgagatgcacttcaaggcccccaagatctccatgccagatgtggacctgcacctgaagggccccaaggtgaagggagatgctgatgtgtctgtgcccaagctggagggggacctgaccggccccagcgtgggcgtggaggtgcctgatgtggagctggagtgcccagatgccaagctgaagggccccaagttcaagatgccagacatgcacttcaaggcccccaagatctccatgccagatgtggacctgcacctgaagggccccaaggtgaagggagatgtggatgtgtctgtgcccaagctggagggggacctgaccggccccagcgtgggcgtggaggtgcctgatgtggagctggagtgcccagatgccaagctgaagggccccaagttcaagatgcctgagatgcacttcaagacccccaagatctccatgccagatgtggacctgcacctgaagggccccaaggtgaagggggacatggatgtgtctgtgcccaaggtggagggggagatgaaggtgcctgatgtggacatcaagggccccaagatggacattgatgccccagatgtggatgtgcacggccctgactggcacctgaagatgcccaagatgaagatgcccaagttctccatgcctggcttcaaggccgagggccctgaggtggatgtgaacctgcccaaggcagatgtggtggtgtctggccccaaggtggatgtggaggtgcctgatgtgtccctggagggccctgagggcaagctgaagggccccaagctgaagatgcctgagatgcacttcaaggcccccaagatctccatgccagatgtggacctgcacctgaagggccccaaggtgaagggagatgtggatgtgtccctgcccaagctggagggggacctgaccggccccagcgtggatgtggaggtgcctgatgtggagctggagtgcccagatgccaagctgaagggccccaagttcaagatgcctgagatgcacttcaagacccccaagatctccatgccagatgtgaacctgaacctgaagggccccaaggtgaagggggacatggatgtgtctgtgcccaaggtggagggggagatgaaggtgcctgatgtggacatccggggccccaaggtggacattgatgccccagatgtggatgtgcacggccctgactggcacctgaagatgcccaagatgaagatgcccaagttctccatgcctggcttcaagggggagggccctgaggtggatgtgaacctgcccaaggcagatgtggatgtgtctggccccaaggtggatgtggaggtgcctgatgtgtccctggagggccctgagggcaagctgaagggccccaagttcaagatgcctgagatgcacttcaagacccccaagatctccatgccagatgtggacttcaacctgaagggccccaagatcaagggagatgtggatgtgtctgcccccaagctggagggggagctgaagggccctgagctggatgtgaagggccccaagctggatgctgacatgcctgaggtggccgtggagggccccaacgggaagtggaagacccccaagttcaagatgccagacatgcacttcaaggcccccaagatctccatgccagacctggacctgcacctgaagagccccaaggccaagggggaggtggatgtggatgtgcccaagctggagggggacctgaagggcccccacgtggatgtgtctggccctgacattgatattgagggccctgagggcaagctgaagggccccaagttcaagatgccagacatgcacttcaaggcccccaacatctccatgccagatgtggacctgaacctgaagggccccaagatcaagggagatgtggatgtgtctgtgcctgaggtggagggcaagctggaggtgcctgacatgaacatccggggccccaaggtggatgtgaatgccccagatgtgcaggccccagactggcacctgaagatgcccaagatgaagatgcccaagttctccatgcctggcttcaaggccgagggccctgaggtggatgtgaacctgcccaaggcagatgtggacatcagcggccccaaggtggacatcgagggcccagatgtgaacatcgagggccctgagggcaagctgaagggccccaagctgaagatgcctgagatgaacatcaaggcccccaagatctccatgccagactttgacctgcacctgaagggccccaaggtgaagggagatgtggatgtgtccctgcccaaggtggagggggacctgaagggccctgaggtggacatcaagggccccaaggtggacatcaatgccccagatgtgggcgtgcagggccctgactggcacctgaagatgcccaaggtgaagatgcccaagttctccatgcctggcttcaagggggagggcccagatggagatgtgaagctgcccaaggctgacattgatgtgtctggccccaaggtggacatcgagggcccagatgtgaacatcgagggccctgagggcaagctgaagggccccaagttcaagatgcctgagatgaacatcaaggcccccaagatctccatgccagacatcgacctgaacctgaagggccccaaggtgaagggagatgtggatgtgtccctgcccaaggtggagggggacctgaagggccctgaggtggacatcaagggccccaaggtggacattgatgccccagatgtggatgtgcacggccctgactggcacctgaagatgcccaagatcaagatgcccaagatctccatgcctggcttcaagggggagggcccagatgtggatgtgaacctgcccaaggctgacattgatgtgtctggccccaaggtggatgtggagtgcccagatgtgaacatcgagggccctgagggcaagtggaagagccccaagttcaagatgcctgagatgcacttcaagacccccaagatctccatgccagacatcgacctgaacctgaccggccccaagatcaagggagatgtggatgtgacaggccccaaggtggagggggacctgaagggccctgaggtggacctgaagggccccaaggtggacattgatgtgcctgatgtgaatgtgcagggccctgactggcacctgaagatgcccaagatgaagatgcccaagttctccatgcctggcttcaaggccgagggccctgaggtggatgtgaacctgcccaaggcagatgtggatgtgtctggccccaaggtggatgtggagggcccagatgtgaacatcgagggccctgagggcaagctgaagggccccaagttcaagatgcctgagatgaacatcaaggcccccaagatccccatgccagactttgacctgcacctgaagggccccaaggtgaagggagatgtggacatcagcctgcccaaggtggagggggacctgaagggccctgaggtggacatccggggcccccaggtggacattgatgtgcctgatgtgggcgtgcagggccctgactggcacctgaagatgcccaaggtgaagatgcccaagttctccatgcctggcttcaagggggagggcccagatgtggatgtgaacctgcccaaggctgacctggatgtgtctggccccaaggtggacattgatgtgcctgatgtgaacatcgagggccctgagggcaagctgaagggccccaagttcaagatgcctgagatgaacatcaaggcccccaagatctccatgccagacatcgacctgaacctgaagggccccaaggtgaagggggacatggatgtgtccctgcccaaggtggagggggacatgaaggtgcctgatgtggacatcaagggccccaaggtggacatcaatgccccagatgtggatgtgcagggccctgactggcacctgaagatgcccaagatcaagatgcccaagatctccatgcctggcttcaagggggagggccctgaggtggatgtgaacctgcccaaggctgacctggatgtgtctggccccaaggtggatgtggatgtgcctgatgtgaacatcgagggcccagatgccaagctgaagggccccaagttcaagatgcctgagatgaacatcaaggcccccaagatctccatgccagacctggacctgaacctgaagggccccaagatgaagggggaggtggatgtgtccctggccaacgtggagggggacctgaagggccctgccctggacatcaagggccccaagattgatgtggatgccccagacatcgacatccacggcccagatgccaagctgaagggccccaagctgaagatgccagacatgcacgtgaacatgcccaagatctccatgcctgagattgacctgaacctgaagggcagcaagctgaagggagatgtggatgtgtctggccccaagctggagggggacatcaaggcccccagcctggacatcaagggccctgaggtggatgtgtctggccccaagctgaacatcgagggcaagagcaagaagagccgcttcaagctgcccaagttcaacttcagcggcagcaaggtgcagaccccagaggtggatgtgaagggcaagaagccagacatcgacatcaccggccccaaggtggacatcaatgccccagatgtggaggtgcagggcaaggtgaagggcagcaagttcaagatgcccttcctgagcatcagcagccccaaggtgtccatgccagatgtggagctgaacctgaagagccccaaggtgaagggggacctggacattgctggccccaacctggagggggacttcaagggccccaaggtggacatcaaggcccctgaggtgaacctgaatgccccagatgtggatgtgcacggccctgactggaacctgaagatgcccaagatgaagatgcccaagttctctgtgtctggcctgaaggccgagggcccagatgtggccgtggacctgcccaagggggacatcaacatcgagggccccagcatgaacatcgagggccctgacctgaatgtggagggccctgagggcggcctgaagggccccaagttcaagatgccagacatgaacatcaaggcccccaagatctccatgccagacatcgacctgaacctgaagggccccaaggtgaagggagatgtggacatcagcctgcccaagctggagggggacctgaagggccctgaggtggacatcaagggccccaaggtggacatcaatgccccagatgtggatgtgcacggccctgactggcacctgaagatgcccaaggtgaagatgcccaagttctccatgcctggcttcaagggggagggccctgaggtggatgtgaccctgcccaaggctgacatcgacatcagcggccccaacgtggatgtggatgtgcctgatgtgaacatcgagggcccagatgccaagctgaagggccccaagttcaagatgcctgagatgaacatcaaggcccccaagatctccatgccagactttgacctgaacctgaagggccccaagatgaagggagatgtggtggtgtccctgcccaaggtggagggggacctgaagggccctgaggtggacatcaagggccccaaggtggacatcgacaccccagacatcaacatcgagggcagcgagggcaagttcaagggccccaagttcaagatccctgagatgcacctgaaggcccccaagatctccatgccagacatcgacctgaacctgaagggccccaaggtgaagggagatgtggatgtgtccctgcccaagatggagggggacctgaagggccctgaggtggacatcaagggccccaaggtggacatcaatgccccagatgtggatgtgcagggccctgactggcacctgaagatgcccaaggtgaagatgcccaagttctccatgcctggcttcaagggggagggcccagatgtggatgtgaacctgcccaaggctgacctggatgtgtctggccccaaggtggacattgatgtgcctgatgtgaacatcgagggccctgagggcaagctgaagggccccaagttcaagatgcctgagatgaacatcaaggcccccaagatctccatgccagacatcgacctgaacctgaagggccccaaggtgaagggggacatggatgtgtccctgcccaaggtggagggggacatgcaggtgcctgacctggacatcaagggccccaaggtggacatcaatgccccagatgtggatgtgcggggccctgactggcacctgaagatgcccaagatcaagatgcccaagatctccatgcctggcttcaagggggagggccctgaggtggatgtgaacctgcccaaggctgacctggatgtgtctggccccaaggtggatgtggatgtgcctgatgtgaacatcgagggcccagatgccaagctgaagggccccaagttcaagatgcctgagatgaacatcaaggcccccaagatctccatgccagactttgacctgcacctgaagggccccaaggtgaagggagatgtggatgtgtccctgcccaagatggagggggacctgaaggcccctgaggtggacatcaagggccccaaggtggacattgatgccccagatgtggatgtgcacggccctgactggcacctgaagatgcccaaggtgaagatgcccaagttctccatgcctggcttcaagggggagggccctgaggtggatgtgaacctgcccaaggctgacattgatgtgtctggccccaaggtggacatcgacaccccagacatcgacatccacggccctgagggcaagctgaagggccccaagttcaagatgccagacctgcacctgaaggcccccaagatctccatgcctgaggtggacctgaacctgaagggccccaagatgaagggagatgtggatgtgtccctgcccaaggtggagggggacctgaagggccctgaggtggacatcaagggccccaaggtggacattgatgtgcctgatgtggatgtgcagggccctgactggcacctgaagatgcccaaggtgaagatgcccaagttctccatgcctggcttcaagggggagggcccagatgtggatgtgaacctgcccaaggctgacctggatgtgtctggccccaaggtggacattgatgtgcctgatgtgaacatcgagggcccagatgccaagctgaagggccccaagttcaagatgcctgagatgaacatcaaggcccccaagatctccatgccagactttgacctgcacctgaagggccccaaggtgaagggagatgtggatgtgtccctgcccaaggtggagggggacctgaagggccctgaggtggacatcaagggccccaaggtggacattgatgccccagatgtggatgtgcacggccctgactggcacctgaagatgcccaaggtgaagatgcccaagttctccatgcctggcttcaagggggagggcccagatgtggatgtgaccctgcccaaggctgacatcgagatcagcggccccaaggtggacattgatgccccagatgtgtccattgagggcccagatgccaagctgaagggccccaagttcaagatgcctgagatgaacatcaaggcccccaagatctccatgccagacatcgacttcaacctgaagggccccaaggtgaagggagatgtggatgtgtccctgcccaaggtggagggggacctgaagggccctgagattgacatcaagggccccagcctggacatcgacaccccagatgtgaacatcgagggccctgagggcaagctgaagggccccaagttcaagatgcctgagatgaacatcaaggcccccaagatctccatgccagactttgacctgcacctgaagggccccaaggtgaagggagatgtggatgtgtccctgcccaaggtggagagtgacctgaagggccctgaggtggacatcgagggccctgagggcaagctgaagggccccaagttcaagatgccagatgtgcacttcaagagcccccagatctccatgtctgacatcgacctgaacctgaagggccccaagatcaagggggacatggacatctctgtgcccaagctggagggggacctgaagggccccaaggtggatgtgaagggccccaaggtgggcatcgacaccccagacatcgacatccacggccctgagggcaagctgaagggccccaagttcaagatgccagacctgcacctgaaggcccccaagatctccatgcctgaggtggacctgaacctgaagggccccaaggtgaagggggacatggacatcagcctgcccaaggtggagggggacctgaagggccctgaggtggacatccgggaccccaaggtggacattgatgtgcctgatgtggatgtgcagggccctgactggcacctgaagatgcccaaggtgaagatgcccaagttctccatgcctggcttcaagggggagggcccagatgtggatgtgaacctgcccaaggctgacattgatgtgtctggccccaaggtggatgtggatgtgcctgatgtgaacatcgagggcccagatgccaagctgaagggccccaagttcaagatgcctgagatgagcatcaaggcccccaagatctccatgccagacatcgacctgaacctgaagggccccaaggtgaagggagatgtggatgtgaccctgcccaaggtggagggggacctgaagggccctgaggccgacatcaagggccccaaggtggacatcaacaccccagatgtggatgtgcacggccctgactggcacctgaagatgcccaaggtgaagatgcccaagttctccatgcctggcttcaagggggagggcccagatgtggatgtgtccctgcccaaggctgacattgatgtgtctggccccaaggtggatgtggacatcccagatgtgaacatcgagggcccagatgccaagctgaagggccccaagttcaagatgcctgagatcaacatcaaggcccccaagatcagcatcccagatgtggacctggacctgaagggccccaaggtgaagggggactttgatgtgtctgtgcccaaggtggagggcaccctgaagggccctgaggtggacctgaagggcccccggctggactttgagggcccagatgccaagctgagcggccccagcctgaagatgcccagcctggagatcagcgcccccaaggtgacagccccagatgtggacctgcacctgaaggcccccaagattggcttcagcggccccaagctggagggcggggaggtggacctgaagggccccaaggtggaggcccccagcctggatgtgcacatggacagcccagacatcaacatcgagggcccagatgtgaagatccccaagttcaagaagcccaagtttggatttggagccaagagccccaaggctgacatcaagagccccagcctggatgtgacagtgcctgaggccgagctgaacctggagaccccagagatctctgtgggcggcaagggcaagaagagcaagttcaagatgcccaagatccacatgagcggccccaagatcaaggccaagaagcagggctttgacctgaatgtgcctggaggagaaattgatgccagcctgaaggccccagatgtggatgtgaacattgctggcccagatgctgccctgaaggtggatgtgaagagccccaagaccaagaagaccatgtttgggaagatgtacttcccagatgtggagtttgacatcaagagccccaagttcaaggccgaggcccccctgcccagccccaagctggagggggagctgcaggccccagacctggagctgagcctgcctgccatccacgtggagggcctggacatcaaggccaaggcccccaaggtgaagatgccagatgtggacatctctgtgcccaagattgaaggagacctgaagggccccaaggtgcaggccaacctgggcgccccagacatcaacatcgagggcctggatgccaaggtgaagacccccagctttggcatcagcgccccccaggtgtccatcccagatgtgaatgtgaacctgaagggccccaagatcaagggagatgtgcccagcgtgggcctggagggcccagatgtggacctgcagggccctgaggccaagatcaagttccccaagttctccatgcccaagattggcatccctggggtgaagatggagggcggcggcgctgaggtgcacgcccagctgcccagcctggagggggacctgcggggcccagatgtgaagctggagggcccagatgtgtccctgaagggccctggggtggacctgcccagcgtgaacctgtccatgcccaaggtgtctggccctgacctggacctgaacctgaagggccccagcctgaagggggacctggatgcctctgtgcccagcatgaaggtgcacgcccctggcctgaacctgagcggcgtgggcggcaagatgcaggtgggcggagatggagtgaaggtgcccggcattgatgccaccaccaagctgaatgtgggcgccccagatgtgaccctgcggggccccagcctgcagggcgacctggccgtgtctggggacatcaagtgccccaaggtgtctgtgggcgccccagacctgagcctggaggccagcgagggcagcatcaagctgcccaagatgaagctgccccagtttggcatcagcaccccaggcagtgacctgcacgtgaatgccaagggcccccaggtgtctggagagctgaagggccctggggtggatgtgaacctgaagggcccccgcatcagcgccccaaatgtggacttcaacctggagggccccaaggtgaagggcagcctgggcgccaccggggagatcaagggccccaccgtgggcggcggcctgcccggcattggagtgcagggcctggagggcaacctgcagatgcctggcatcaagagcagcggctgtgatgtgaacctgcccggggtgaatgtgaagctgcccaccggccagatcagcggccctgagatcaagggcggcctgaagggcagcgaggtgggcttccatggagctgccccagacatctctgtgaagggccctgccttcaacatggccagccctgagagtgactttggcatcaacctgaagggccccaagatcaagggcggcgcagatgtgtctggaggagtgtctgccccagacatcagcctgggggagggccacctgtctgtgaagggcagcggcggggagtggaagggcccccaggtgagcagcgccctgaacctggacaccagcaagtttgctgggggcctgcacttcagcggccccaaggtggagggcggcgtgaagggcggccagatcggcctgcaggcccctggcctgtctgtgtctggcccccagggccacctggagagcggcagcggcaaggtgaccttccccaagatgaagatccccaagttcaccttcagcggccgggagctggtgggccgggagatgggcgtggatgtgcacttccccaaggccgaggccagcatccaggccggggctggagatggagagtgggaggagagcgaggtgaagctgaagaagagcaagatcaagatgcccaagttcaacttcagcaagcccaagggcaaaggaggagtgacaggcagccctgaggccagcatcagcggcagcaagggggacctgaagagcagcaaggccagcctgggcagcctggagggggaggccgaggccgaggccagcagccccaagggcaagttcagcctcttcaagagcaagaagcccaggcacaggagcaacagcttcagtgatgagcgggagttcagcggccccagcacccccaccggcaccctggagtttgaaggaggagaggtgtccctggagggcggcaaggtgaagggcaagcacggcaagctgaagtttggcacctttggaggcctgggcagcaagagcaagggccactatgaggtgactggaagtgatgatgaaacaggcaagctgcagggcagcggcgtgtccctggccagcaagaagagccggctgagcagcagcagcagcaatgacagcggcaacaaggtgggcatccagctgcctgaggtggagctgtctgtgtccaccaagaaggagtag

SEQ ID NO: 285045 - DNA, 435 bp, Artificial Sequence
  derived and/or modified sequence
atggagaaggaggagaccacccgggagctgctgctgcccaactggcagggcagcggcagccacggcctgaccatcgcccagagagatgatggagtgtttgtgcaggaggtgacccagaacagccctgctgccaggactggagtggtgaaggagggggaccagatcgtgggcgccaccatctactttgacaacctgcagagcggggaggtgacccagctgctgaacaccatgggccaccacacagtgggcctgaagctgcacaggaaaggagacaggagccctgagcccggccagacctggacccgggaggtgttcagcagctgcagcagcgaggtggtgctgtctggagatgatgaggagtaccagaggatctacaccaccaagatcaagccccggctgaagtcagaagatggagtggagggggacctgggctag

SEQ ID NO: 285046 - DNA, 17673 bp, Artificial Sequence
  derived and/or modified sequence
atggagaaggaggagaccacccgggagctgctgctgcccaactggcagggaagtggcagccacggactcacgattgcccagcgggacgacggcgtcttcgtgcaagaggtgacccaaaatagtccggccgcaagaacgggcgttgtaaaggagggagaccagatagtgggtgccactatctacttcgataatttacaatcaggggaggtgacgcaattgctcaacacaatgggacaccacactgtcgggctaaagctgcaccgcaagggcgatagatcacctgagcccggccagacatggactcgggaggtcttttcatcatgttcttctgaggtagtcctaagcggtgatgacgaggaataccagcgaatctatacaaccaagattaagcctagactgaaatctgaggacggcgttgaaggagacctaggcgagacccagtcacggaccatcaccgtgacaaggagggttacggcctacacggtcgatgtgacaggccgcgagggcgccaaagacattgatatttcatccccggaatttaaaattaaaatccctaggcacgagctcacagagatcagcaacgtggatgtggagactcagtcggggaaaacagtgattagattaccctccgggtccggcgctgcctcgcctacgggtagcgcggtagacattcgcgcgggggccatcagcgcatccggcccagaattacagggcgcaggacacagcaagctgcaggtgacaatgcctggcatcaaagtgggtggctccggtgtcaacgtaaacgcaaaggggctcgatttgggtggtcgtggcggagtccaggtgcccgccgtggacatctcctccagcctgggcgggagggctgtggaagtgcagggcccgtccctggaaagtggcgatcacggtaaaattaaattccctacaatgaaagtgccgaaattcggtgtcagcaccgggcgggagggacagacaccaaaggcgggactgagggtatcagcacccgaggtgagtgtaggccacaaggggggaaagcccggacttaccatccaagccccccagctagaagtaagtgtgcccagcgccaatatagagggtctcgagggcaaactcaaaggtccacagattactggacccagtctggaaggtgacctggggctgaagggagccaagccccaaggtcatataggcgtcgacgcctcagcccctcagattggcggatcaattactggccctagcgtggaggtccaagccccagacattgatgtacaagggcctggatccaaactcaacgtcccgaagatgaaggtgcccaagttttccgtgagcggagccaagggagaagaaactggcattgacgttacactaccaaccggggaggtgacagtgccaggtgttagtggagacgtgagtctgccagagatagcaactggaggtctggagggtaaaatgaagggcaccaaggtgaagactcccgagatgattatccagaaaccaaaaatcagcatgcaggacgttgacctttccttaggcagtcctaaactgaagggagacatcaaggttagcgcccctggggtccagggcgatgtcaaaggacctcaggtagcacttaaaggcagccgggttgacatcgaaaccccaaatctggaggggaccctcaccgggcctagactcgggtcgccaagcgggaagactggaacctgccgaatcagcatgtcagaggtggatctgaatgtggctgcgcccaaagtgaagggaggcgtcgacgtcactctgccaagggtggaaggaaaagtgaaagtgcccgaggtcgacgtgagaggccctaaggtcgatgtcagtgcacccgatgttgaagcgcatgggccggaatggaatctcaagatgcccaagatgaaaatgccaactttttccaccccaggagccaaaggcgaaggccctgatgttcacatgacgctgccgaaaggtgacatcagcatctccggccctaaagttaatgtggaggctcccgacgtgaatttggagggcctcggaggtaagctgaagggtccagatgtgaagctgcctgacatgtccgtcaagacgcctaaaattagcatgccagatgtggatctacacgtgaagggtaccaaagtcaagggggagtacgatgtgacggtccccaaactggagggcgaactgaaaggacctaaggtggacattgatgccccagatgttgatgtccacggccccgactggcacttgaaaatgccgaagatgaagatgccgaaattctccgtgccgggtttcaaggctgaaggccccgaggtggacgttaatctgcctaaagccgacgtggatatcagtgggcccaaaatcgacgttaccgcaccagatgtgtcaatagaggagcctgaaggtaaactaaagggccccaaattcaaaatgcctgagatgaacataaaagtgcccaaaatctcgatgcccgacgtagacctgcacctcaagggacctaatgtgaagggagagtacgacgtcactatgccaaaggtggagtctgaaatcaaagttcccgacgtagagctcaagagcgccaaaatggatatagatgtacctgatgtggaagtgcaggggcccgactggcacttgaagatgcccaaaatgaagatgccgaagttcagcatgccaggcttcaaagcagaagggccagaggtggacgttaacctcccgaaagcagacgtcgatatctccggtccgaaagtgggagtcgaggtgcccgatgtcaatattgaggggccagaaggcaaactgaagggccccaaattcaagatgcctgaaatgaacataaaggcgccgaagatttccatgcccgacgttgatcttcatatgaagggccctaaagtcaaaggtgaatacgacatgactgtgcctaagctcgaaggcgacctgaaagggccgaaagtggacgtgtctgcccctgacgttgaaatgcaaggtccagactggaatctgaaaatgcccaagataaagatgccaaaattttccatgccttccctgaagggggagggcccagagttcgacgtaaatctgtcaaaggccaatgtggatatctccgctcctaaggtggatacaaacgcccccgacctaagcctggaggggcccgagggcaagttgaaggggccgaaatttaagatgcctgagatgcattttagagcacctaagatgtccctgccagacgtcgacctggatctgaagggccctaagatgaagggaaatgttgacatctcagcccccaaaattgaaggcgagatgcaagttcccgacgtcgatatccgcggcccaaaagtagatattaaggcacctgacgtcgagggacagggtcttgattggtctttaaagatccctaagatgaagatgcccaaattttccatgccaagtctgaagggggaagggcccgaggttgatgtcaacctgcctaaagccgacgtcgttgtttcaggacctaaggtggatatcgaagccccagatgtcagcctggaaggccctgagggcaagctgaagggaccaaagttcaaaatgccagagatgcactttaagaccccaaaaatatctatgcccgatgtcgatctgcacttaaagggcccaaaggtaaagggcgacgtcgatgtaagcgtgcccaaagtcgagggcgagatgaaggtccctgacgttgaaattaaagggcctaagatggatatcgacgccccagacgtggaggtgcaggggcctgattggcacttaaaaatgcccaagatgaaaatgcccaaattctccatgcctggcttcaagggtgagggccgagaagttgatgtgaatctgccaaaagcagatatcgacgtgagcggcccaaaggtggacgtggaggtgcccgatgtgagcctagagggccctgaaggaaagttgaagggcccaaagtttaaaatgcctgagatgcattttaaggcccccaaaatcagcatgcccgacgtagacctgaatctcaagggacccaaattaaaaggtgatgtggacgtctcactgcctgaagtggaaggggaaatgaaggtccccgatgtggatatcaagggaccgaaggtggacattagtgctccggacgtcgacgtacatggacctgactggcatctgaagatgcccaaagtgaagatgcccaaattttctatgcccggcttcaagggcgagggacctgaggtggatgtcaaattacctaaggccgacgtggatgtgtccgggccaaaaatggatgcagaagtccccgacgtaaacatcgaaggacccgacgcaaaactgaaaggacctaaattcaagatgcccgagatgagcatcaagcctcagaagatctctattcctgatgttggactacacctgaaggggccaaaaatgaagggagattatgatgttactgttccgaaagttgaaggagagattaaagcccccgatgtcgacattaaggggccgaaggtggacatcaatgcccctgatgtggaagtgcacggacctgattggcacctgaagatgcctaaggtaaaaatgccaaaattctccatgcctgggttcaaaggggaaggacccgaggtagacatgaatctgcctaaagcagatctcggcgtgtcagggccaaaagtggacatcgacgttccggatgtgaaccttgaagcccccgagggcaagttgaaaggtcctaaattcaaaatgcctagcatgaacattcagacacacaagatttcaatgcccgacgttgggctaaacctgaaggccccaaaactgaaaacagatgtcgacgtaagtcttccgaaagttgaaggagacctcaaaggacctgagattgacgtgaaggcgccaaaaatggacgtgaacgtgggcgatatcgacattgagggcccggagggtaagctgaaaggtcctaaattcaaaatgccagagatgcacttcaaagcccccaagatctcaatgccggacgtagatcttcacttaaagggcccaaaggtgaagggagacatggatgtttcggtccccaaggtggagggggaaatgaaagtgcccgacgtggacattaaagggcccaaagtggatatcgatgctcctgatgtcgaggtgcacgatcccgattggcatctgaaaatgcccaagatgaaaatgccaaagttcagcatgcctggctttaaagctgaaggacctgaagtcgatgtgaacctgccaaaagccgatatcgatgtctcagggcctagtgtcgacacagacgcacccgatcttgatatcgaggggccagagggcaagctgaaggggtctaaatttaaaatgcctaaactgaacatcaaagcgcctaaagtgagtatgccagacgttgatctcaatcttaagggacccaagctgaagggcgaaatcgatgcgtccgtacctgagctcgaaggtgatctgcggggtcctcaagtagatgttaagggacctttcgtggaagctgaagttccggacgtcgatctggaatgccctgatgctaagttgaaggggcctaaattcaaaatgccagagatgcattttaaggccccaaaaattagtatgcctgatgtggacctgcacctcaagggaccgaaggtcaaaggtgacgctgatgtgtcagtcccaaagttggagggggatctcaccggtccttcagtgggcgtggaggttcccgatgttgagctggaatgccccgatgcaaaacttaaaggacctaaatttaaaatgccagacatgcacttcaaagcgccgaaaatctcaatgccagacgtcgacctgcacctaaagggacccaaagtgaaaggcgacgtcgacgtcagcgtgcccaagctcgaaggcgacttgaccggcccctcagtcggggtcgaggtgcctgacgtggagcttgagtgtcccgatgcaaaactcaagggcccgaaattcaaaatgcctgaaatgcacttcaagacccccaaaatctccatgcccgatgttgatctgcatctgaaaggcccaaaagtcaagggggatatggatgtcagcgtcccaaaggtagagggggaaatgaaagttccggacgtcgatattaagggccctaagatggacatcgacgcccctgacgtggatgttcacggacctgactggcatttgaaaatgcctaagatgaagatgcctaaattctccatgccaggtttcaaagccgagggccccgaagtagacgttaacctccccaaagccgatgttgtagtatctgggccaaaagttgatgtggaggtaccagacgtctctttagaaggcccagaggggaagcttaagggacctaagcttaaaatgccggaaatgcattttaaggctccaaagatctctatgcccgatgtagaccttcacctgaagggacctaaagttaagggagacgtcgatgtttccttgccgaaacttgagggcgacctcacaggtccaagtgtcgatgtcgaggtgcccgacgtggaactagagtgtccggacgctaagcttaaaggaccaaaatttaaaatgcctgaaatgcattttaagaccccgaagatatcaatgcctgacgtgaatttgaacctaaaaggacccaaggttaagggtgatatggacgtatcagtccctaaggttgagggcgaaatgaaggttcccgacgtggacattcgcggacccaaggtcgatatcgacgccccagacgtggatgtgcatggaccggattggcacctgaagatgcctaagatgaaaatgcccaagtttagcatgccaggctttaaaggcgagggcccggaagttgacgtaaacctccctaaggctgatgtggatgtttctggccccaaggttgatgtggaggtgcctgatgttagtttagaagggcccgaggggaagttaaaaggaccaaagtttaagatgcctgagatgcacttcaagacgcctaagatttcaatgcctgatgttgactttaacctcaaggggcctaagattaagggagacgttgatgtgtctgcccccaaattggagggtgaactgaaaggccctgagctggacgtaaagggccccaagctggacgccgacatgcccgaagtggccgtagaggggcccaacggaaaatggaaaacgcccaagttcaagatgccagatatgcattttaaagcacccaaaatctccatgcctgacctggatttacacctcaaatcaccaaaagctaagggagaagttgacgttgatgttccgaagctggagggagatcttaaaggccctcatgttgacgtcagcggcccggacatcgacatcgaaggacctgagggcaagttaaagggaccgaaatttaaaatgcctgatatgcatttcaaggctccgaacatttccatgccggacgtggacttgaatctcaaaggcccaaagatcaagggagacgttgacgtcagtgttccggaagtggaagggaagctggaggttcccgatatgaacattcgaggtcctaaggtggacgtaaacgcgccagatgttcaggcaccagattggcatctgaagatgccaaagatgaagatgcctaagttttctatgcccggtttcaaggccgaggggcctgaggtggatgtgaatctccccaaggctgatgtggatatttcaggccctaaggttgacattgagggaccagacgtcaacattgaaggaccagaaggtaagctgaaaggcccaaaacttaagatgcccgagatgaatattaaggcccctaagatctcgatgcccgacttcgatctgcatctgaagggtcccaaagtaaagggtgacgtggacgtgagcctgcctaaagttgagggggacctcaaaggtccagaggttgatattaagggacccaaagtggacatcaacgccccagatgtgggagtgcagggaccagattggcacctcaagatgcctaaggttaagatgccaaagtttagtatgcctggatttaaaggggagggtccagacggagatgtgaaacttccaaaggcagacattgatgtgagcggccccaaggtcgacatcgagggccctgacgtcaatatcgagggaccagaggggaaattaaagggaccgaagtttaaaatgccagaaatgaatattaaagcaccaaaaatctcaatgcccgatattgatctgaacctgaagggaccgaaagtgaaaggcgatgttgatgtgtccctcccaaaggtggaaggtgaccttaaaggtccggaggttgacattaagggtccaaaagttgacatcgatgcgccagatgttgacgtccacgggcccgattggcacctgaagatgccaaagatcaagatgcctaagatcagcatgcccggttttaagggtgagggcccagacgtcgacgtgaacttgcccaaggccgacattgacgttagcgggcccaaggttgatgttgagtgcccagacgtcaatatcgagggcccggagggaaagtggaagtcccctaagtttaagatgcccgagatgcactttaaaacgccgaaaatttcgatgccagacattgatttgaatcttacgggcccaaaaatcaagggagacgtggacgtaaccggtccaaaggtggagggagatttgaagggccctgaagtcgacctaaagggccctaaagtggacattgacgtgccagacgtaaacgtgcagggtccagactggcatctgaaaatgccgaaaatgaaaatgccaaaatttagcatgccaggcttcaaggcagaaggtcctgaagtcgatgtaaatctgcccaaggcagatgtagatgttagtggacctaaggtggatgtcgaaggccccgacgtcaacattgagggaccagaaggaaagttgaagggacctaaatttaaaatgccggaaatgaatattaaagcacctaaaatcccgatgcccgattttgatctgcacttaaaaggacctaaggtaaagggcgacgtggatatcagcctgcctaaggtcgagggagacctgaagggcccagaggtggatattcgtgggccccaggtcgatatcgacgtgcctgacgttggcgtgcaaggtcctgattggcacttaaagatgcccaaagtgaaaatgccaaagttctccatgccaggcttcaagggggagggccccgacgtggacgttaacctccctaaggccgatctcgatgttagtggaccaaaggtggacattgacgtgccagacgtcaatatagagggaccagagggaaaactgaagggcccaaagtttaagatgcccgaaatgaacatcaaagcaccgaaaatttccatgccagacatcgatcttaacctcaagggcccgaaggtgaagggcgatatggacgttagcttacctaaggtggagggcgatatgaaggtgcccgatgtggatattaagggacctaaggtcgacatcaatgcccctgacgtggacgtacagggtcctgactggcacctgaaaatgcccaagatcaagatgcccaagatctctatgcctggcttcaagggagagggacctgaagtcgatgtcaacttaccaaaggccgatctcgacgtcagcggtccaaaagtcgacgttgacgtccctgatgtgaacatcgagggccctgacgctaaactcaagggccccaagttcaagatgcccgagatgaatattaaggcacctaaaatctctatgccagaccttgatctgaacctgaaaggtcccaaaatgaagggagaggtggatgtttccttagccaacgtcgagggcgacctaaaaggacccgcattagatattaagggaccgaaaattgacgtggacgcacccgatatcgatatacatggccccgacgcaaagctgaaaggccctaaattaaagatgcccgatatgcacgtcaatatgccaaagatctctatgcctgagatagacctgaatctgaaaggaagcaaattgaaaggagatgttgatgtttccggcccaaagcttgaaggagacatcaaggctccctccctagacatcaaggggccagaggtagacgtgtccggtcctaaactgaatattgagggaaagagcaaaaagagcaggtttaagcttcccaagttcaacttctcagggtcaaaagtgcagacacccgaggtcgatgtgaaagggaagaagccagatatagatattacaggccctaaggttgacatcaacgcacccgatgtcgaggttcagggcaaggttaaaggctcaaagtttaaaatgccattccttagcatctcctctcctaaagtctcaatgccggacgtggagttgaatctgaagagtcctaaggtaaaaggtgatctggatatcgccggaccgaatctcgagggtgattttaaagggccaaaagtcgatatcaaggctcctgaggtcaatctgaacgcgcctgacgttgatgttcatggtccagactggaacctgaagatgcctaagatgaagatgcccaagtttagtgtcagtggcctgaaagcggaaggacccgatgtggccgtggacctccccaagggagacatcaatatagaggggccttctatgaacattgaagggccagacctcaatgtggagggaccggaaggaggtttaaaagggcctaaattcaagatgcccgacatgaatattaaggctcctaaaataagcatgccagacattgacttgaatcttaaaggtcccaaggttaagggcgatgtagacatttcactgcctaagctggaaggggatttgaaaggcccagaggtagacatcaaaggtccaaaggtggacatcaacgcccccgacgtggacgtccatggccctgattggcacctgaaaatgccaaaggtcaagatgcctaagttttcaatgcccggattcaagggtgaaggccccgaagtggatgttacattacctaaggcggacatcgatatttccggccctaacgtggacgtcgacgtccccgacgttaacatagaagggccagatgccaagttgaagggacctaagtttaaaatgcccgaaatgaacataaaagccccaaagatatcaatgcccgacttcgatttgaatcttaagggccctaaaatgaaaggagacgtggttgtttctctccccaaggtggaaggggacttaaagggaccagaagtagacattaaaggccctaaggtcgatatagacactccggacattaacatcgagggctccgaaggtaagtttaagggccccaagttcaagatccccgaaatgcaccttaaagctcccaaaattagcatgcccgacatcgatcttaacttaaaaggccctaaggtgaagggtgacgtggacgtgtctttgccaaaaatggagggcgaccttaaaggccccgaagttgacattaaaggccctaaggtggacatcaacgctcccgacgttgacgtccagggtcctgattggcatctgaaaatgccgaaggtgaaaatgcctaagttcagcatgccgggattcaagggcgaaggacccgatgtggatgttaacctgccgaaagcagacttggacgttagcggtccgaaagtggacattgatgtacccgatgtcaatatcgagggccctgaaggcaagctaaaagggcccaagttcaaaatgcctgagatgaatatcaaagcccccaaaatatctatgccagacatagatcttaaccttaagggcccaaaagtgaagggagacatggatgtgtctctgcctaaggtggagggcgacatgcaagtgcccgacttagatataaagggcccaaaggtggacataaacgccccagacgtggatgtgcgcggtcctgattggcacctgaaaatgccaaagataaaaatgccaaagattagcatgcccggattcaaaggcgagggacctgaagtcgacgtcaacttgccaaaggccgacctcgatgtgagtggccctaaggtcgacgtcgatgtcccggatgttaatatcgaaggtcccgacgcaaagttaaaaggacccaaatttaagatgcctgaaatgaacattaaggcacctaagatttctatgcctgactttgacttgcacctgaaaggcccaaaggtgaagggagatgtcgacgtgtcccttcctaaaatggagggtgatctgaaggcaccggaggtcgacattaaggggccaaaagtggacattgacgcaccggacgttgatgtgcacggccctgattggcaccttaagatgcctaaagttaagatgcccaaattctccatgccagggtttaagggggaggggcccgaggtggatgtcaacctgcccaaggcagacattgacgtgtcggggccaaaagtcgacattgacactcccgatatcgatatccatggtcctgagggcaagctgaagggtcccaagttcaagatgcccgacctacacctaaaggccccaaagatatccatgccagaagtagacttgaacctgaaaggcccaaaaatgaagggggatgtggacgtatccctcccaaaggtagagggtgacctaaagggccctgaagtggacattaaaggccctaaggtggacattgacgttcctgacgtggatgtacaaggcccagattggcacctcaaaatgcctaaagtcaaaatgccaaagttttctatgcctggattcaaaggcgaggggcctgacgtagatgtgaacctccccaaagctgacttagacgtctctggtccaaaagtggatatagacgttcctgacgtcaacatcgaaggacccgacgcgaagctgaaaggccctaagttcaagatgcctgagatgaacattaaggctcctaagatcagcatgcccgacttcgacttacatctcaagggaccgaaagtgaaaggggacgtcgatgtgtctcttcctaaggtggagggagaccttaaaggccctgaagtggacattaaaggccctaaagtggatatcgatgcccctgacgtggacgtgcacggcccggattggcatctgaagatgcccaaagtcaaaatgccaaaattttctatgcctgggtttaaaggggaggggccggatgttgatgtgacactccccaaagcagacatcgaaatctctgggccaaaagtggacatcgacgcgccagatgtatctatagagggacccgacgccaaactgaagggcccaaaatttaaaatgcctgaaatgaacatcaaggcccccaagatttctatgcccgacatcgatttcaatctgaagggtcccaaagtaaagggagatgtagatgtcagcttacccaaggtggaaggcgacctgaagggacccgagattgacatcaagggccctagccttgatattgatacccctgatgttaatatcgagggaccagagggcaagctgaaaggaccaaagttcaagatgcctgagatgaacatcaaggctccaaagatcagcatgcctgatttcgatttacacttgaagggtcccaaggtaaagggggacgtggacgtgtccttgcctaaagtggagagcgatctgaaaggaccggaagtcgacattgaggggccagagggcaaactgaaaggaccaaagttcaaaatgcccgacgtacatttcaagtcaccacaaatctccatgagtgatatcgaccttaacctgaagggaccgaagattaagggagatatggacatatctgttcctaagttggagggggatcttaagggtcccaaagtcgacgtgaaggggcctaaggtggggattgatactcccgatatagacattcatggccctgagggcaagctaaagggtccaaaattcaagatgccggatctgcatctgaaggcacccaaaatctccatgcctgaggtcgatttgaacttaaagggccccaaagtgaaaggagatatggatatttcacttccaaaagttgaaggcgacctcaaaggtcccgaagtggacattagggacccaaaggtggatatcgatgtccctgatgtggatgtgcaaggccccgactggcatctgaagatgccgaaggtcaagatgccaaagttctcgatgcccggcttcaagggggagggaccagacgtggacgtgaacctccctaaagcggatatcgatgtatccggtcccaaagtggacgtggatgtcccagacgtgaatatagaaggccctgatgcaaaattgaagggacctaagtttaagatgccagaaatgtctattaaggctccaaaaatctcaatgcctgacatcgatcttaatctgaagggcccaaaggtgaagggggatgtcgatgtgacgctgccaaaggtggaaggagatctgaagggaccagaggccgacataaagggcccgaaggtcgatattaatacaccagatgtggatgtgcacggacccgattggcatctgaagatgcccaaggtaaagatgccaaagttttcgatgccggggtttaaaggggagggccccgatgttgacgtgtctttgccaaaggccgacatagacgtgagcggtcccaaagtcgatgttgacattcctgacgtgaacattgaggggcccgatgctaagctaaagggccctaaatttaaaatgcccgagattaacattaaggcccccaagatcagcatccccgatgtggacctggacttaaagggaccaaaggtcaagggcgattttgacgtatctgtcccgaaggtcgaaggcacacttaaaggccccgaagtggacttgaagggcccacgactcgacttcgaggggcccgatgctaaactatccggcccatctttgaaaatgccttccctcgaaatcagcgccccaaaggtgaccgcacccgacgtcgatttgcacctcaaggcacccaagatcggtttcagcggccccaagctcgagggaggggaggtggatttaaaggggcctaaagtcgaggccccgtccttggacgtccacatggatagccctgacatcaacatcgaaggaccggatgtgaagattcccaaatttaagaagcccaaatttgggttcggggcaaagagccctaaggccgatattaagtctccctccctcgacgtgacagtgcctgaggcggagctaaacctagagacccccgaaatatctgtgggtgggaaaggcaagaagagcaagtttaaaatgcccaagatccatatgagcggccccaaaattaaggccaagaagcaaggctttgatttaaacgtccccgggggtgaaatcgatgcctcattaaaggcccctgacgtggacgtgaacattgccggccccgatgcagccttaaaagttgacgtcaagagtccaaagacgaagaaaaccatgtttggaaaaatgtacttccctgacgtggagtttgatataaaatcccctaaattcaaggccgaagccccactaccgtcacccaaactggagggagaactccaggcccctgatctggagctgtccctccccgctattcacgtagagggcctggacatcaaggcaaaagccccgaaagttaagatgccagacgtagacatttcagtcccaaagatagaaggcgatctcaagggtcccaaagtacaggcaaatttgggtgcccccgatatcaacatcgaaggactcgacgcaaaggttaaaactccctcttttggtatcagcgccccccaggtctctatccctgatgtaaatgtgaaccttaaggggcccaagatcaaaggggatgtccctagcgttggtctcgagggcccagacgttgacctacagggacccgaggctaaaataaagttccccaagttctccatgccgaaaattgggattccaggagtgaagatggaaggaggcggtgctgaggtgcacgcgcaacttccttccctagaaggggatctccgcgggcctgatgtcaagttggaaggccccgacgtgtcactgaaaggccctggagttgacttaccgagcgtaaacttgtcaatgcctaaggtttctgggcccgacctcgatcttaacctcaaaggccctagtctgaagggcgacctggacgccagcgtgccctccatgaaagttcacgccccgggcctgaacttaagcggcgtgggagggaagatgcaggtgggtggggacggggtcaaggtacccggcattgacgcaactacgaagctgaacgtgggtgcacccgacgtgactctaagggggccatctcttcaaggtgatctggccgtgtctggcgacatcaaatgcccaaaggtcagtgtgggtgccccagacctgagcctggaagcctctgaaggcagcataaagctgcctaagatgaagctgccccagtttgggatcagcacgcctggatccgatctccacgtcaacgccaagggacctcaggtgtccggggaactgaaaggccccggcgtggacgtcaacctgaaggggccaagaatttcagcaccgaacgtggattttaacctcgaaggacccaaggtaaaaggaagcctgggagcaactggagaaatcaagggaccaaccgtggggggggggctgcctgggatcggtgttcaggggctcgagggaaacctacagatgcctggcatcaagagctcaggctgcgatgtgaacctgcccggagtaaatgtgaagctgccgacgggacagatctctgggcccgaaattaagggaggtctcaaggggtctgaggtgggcttccacggcgctgccccagatatcagcgtgaagggccctgcgttcaacatggccagtccggaaagcgattttgggattaatctgaaggggccaaaaattaaaggcggcgccgatgtgtccggaggggttagtgctccagatatttctctcggagaaggccacctctccgttaaaggaagtggaggcgaatggaagggcccccaagtgtcgagcgctctcaatcttgatacgagtaaattcgctggaggtctccacttctctggcccgaaggtcgagggcggagtgaaaggcggccagataggactccaagctcccggtctctccgtttcaggcccccagggacatcttgaatctgggtccggtaaggtcacctttccaaaaatgaaaatccctaagtttactttctcaggccgggagcttgtcggccgagaaatgggcgtggatgttcacttccctaaagctgaggcctccatccaggccggcgcaggggacggagagtgggaagagagcgaagtgaaactgaagaagtcgaaaatcaagatgcctaagttcaacttctccaaacctaagggtaaggggggcgtcacgggtagccccgaggcatcaatatccggctcaaagggagatttaaaaagctctaaggctagtctggggagcttggagggcgaagctgaggccgaggccagcagcccaaagggaaagttttccctgtttaagtccaaaaaacctaggcatagaagcaactccttttctgacgaacgagaattcagcggacctagtaccccaactggcacgctggagttcgagggaggagaagtctctctagaaggcggaaaagtgaagggtaaacacggaaagttaaaattcgggaccttcggaggtttaggatccaagagcaaaggccactacgaggtcacagggtccgacgacgaaactggtaaactgcagggttctggcgtttctctggcatctaaaaaatccagattatcttcttcgtccagcaatgacagcggtaacaaagtgggaatccaattgcctgaggtggaactgtctgtgtccactaagaaagaatag

SEQ ID NO: 285047 - DNA, 435 bp, Artificial Sequence
  derived and/or modified sequence
atggagaaggaggagaccacccgggagctgctgctgcccaactggcaaggatccggttcccacggactgacaatagcacagcgggacgatggtgtcttcgtccaagaggtgacccaaaattcaccagcggctcggactggcgtcgtgaaggagggggatcagatagttggcgctactatctattttgataacctgcagtctggtgaggtgacacaactcctaaatactatgggccatcacactgttggtctcaaactacaccggaaaggagataggagtcccgagcccggtcagacctggacgcgggaagtcttttcctcatgctcatccgaggttgtgcttagcggagatgatgaggagtaccagcggatatacacaaccaaaatcaagccccgcttaaaaagcgaggacggagtagagggcgacctgggctag

SEQ ID NO: 285048 - DNA, 18787 bp, Artificial Sequence
  derived and/or modified sequence
acaagagccgcctccgcgcacgggggcccggccactcggagctgctctgccgcggggactgcaccgcccgccctgccagacccgcccggaacggggctcgtcgccgccagtagccgcagcaccgcagccttgggcctcgcgccggctatggccgtgccctggggctgagccctcaggttgtgaccgagattcccgacgagagagactgaggggaagagaggaaggaggggcgggctcctggcaaggcattcgctcctgagcggaatcctgcaaagatggagaaggaggagacaacccgggagctgctgctgcccaactggcagggtagtggctcccacgggctgaccatcgcccagagggacgacggcgtctttgtgcaggaggtgacgcagaactcccctgcggcccgcactggggtggtcaaggagggggaccagattgtgggtgccaccatctactttgacaacctgcagtcgggtgaggtgacccagctgctgaacaccatggggcaccacacggtgggcctgaagctgcaccgcaagggggaccgctctcccgagcctggccagacctggacccgtgaagtcttcagctcctgcagctctgaagtggttctgagcggggatgatgaggagtaccagcgcatctacaccacgaagatcaagccacggctgaagtcggaagatggagtggaaggagacctcggggagacccagagccgtaccatcacagtgaccagaagggtcacggcctacactgtggatgtgactggccgggaaggagccaaggacatagacatcagtagccctgaattcaagatcaagattccaagacatgaactgactgaaatctccaatgtggatgtggagacccagtctgggaagaccgtgatcagactgccctcgggctcgggggcagcctctccgacaggctctgctgtggatatccgagcaggggccatttctgcttcaggaccagagctccaaggtgctggccactcgaagctccaggtcaccatgcctgggataaaggtgggaggctcaggtgtcaatgtcaatgcaaagggcttggacttgggtggcagaggaggggtccaagttccagcagtggacatttcatcttctcttgggggtagggcagtagaggtacagggcccatctctggagagtggtgatcatggcaaaattaaatttcccaccatgaaagtgccgaaatttggtgtctcaacagggcgtgagggccagacaccaaaggcagggctgagggtttctgcacctgaagtctctgtggggcacaagggcggcaagccaggcttgactatccaagcccctcagctggaagtcagtgtgccctctgccaatattgagggccttgaggggaagctgaagggcccccaaatcactgggccatcacttgagggtgacctaggcctgaaaggtgccaagccacaggggcacattggggtggatgcctctgctccccaaattgggggtagcatcactggccccagtgtggaagttcaggcccctgacattgatgttcaggggcctgggagcaaactgaatgtgcccaagatgaaagtccccaagttctctgtatcaggtgcaaagggagaggaaactgggattgatgtgacactgcctacaggtgaagtgactgttcctggggtctctggggatgtcagcctgcctgagattgctactggtgggctggaaggaaagatgaaaggtactaaagtgaagactcctgaaatgattattcagaaacctaaaatctccatgcaggatgtggatctgagccttgggtctcctaaactgaaaggagatattaaggtttctgctcctggggtgcaaggtgatgttaaaggccctcaagtggcacttaaaggctccagagtggacatagagacaccaaacctagagggaaccttgacaggccctaggcttggcagtccttccgggaaaaccggaacctgtaggatctctatgtcagaagtagacttaaatgtggccgcacctaaagtgaaagggggtgtagatgtcacactccccagagtagaagggaaagtcaaagtccctgaagttgatgtcagaggccccaaagtggatgtcagtgccccagatgtcgaagcgcatggcccagaatggaacctgaaaatgcccaagatgaaaatgcccacgttcagcactccaggagccaaaggggaaggtccagatgttcatatgactctacccaaaggagatatcagtatttcagggcccaaggtcaatgtggaagccccagatgtcaacttggagggtctggggggaaaacttaaaggccccgatgttaagctgcctgatatgagtgtcaagacaccaaagatctccatgcctgatgtagatttgcacgtgaaaggtacaaaggtgaagggagagtatgatgtaactgtaccaaagctggaaggagaactcaaaggcccaaaagtggacattgatgccccagatgtggatgttcatggcccagactggcacttgaagatgcccaagatgaaaatgcccaaattcagtgtgccagggttcaaagcagagggcccagaagtggatgtgaacctgcccaaggctgatgtggacatttccgggcccaagatagatgttactgctcctgatgtgagcattgaggaaccagaagggaaattgaaagggcccaagtttaagatgcctgagatgaacatcaaagtccccaagatctccatgcctgatgtggacttacatctgaaaggccctaacgtaaagggagaatatgatgtcacaatgccaaaggttgaaagtgagattaaagttcctgatgttgaacttaaaagtgccaaaatggacattgatgtcccagatgtggaggttcaaggcccagactggcacctgaagatgcccaagatgaaaatgcccaagttcagcatgcctggcttcaaagcagagggcccagaagtggatgtgaacctgcccaaggctgatgtggacatctcaggacccaaggtgggtgttgaagttccagatgtgaatattgaaggacctgaaggaaagctgaagggccccaagttcaagatgccagagatgaatatcaaggcccccaagatctccatgcctgatgtggacttgcatatgaaaggtcctaaagtaaagggagaatatgatatgacagtgccaaagctggaaggggacctgaaaggcccaaaagtagatgtcagtgccccagatgttgaaatgcagggtcctgactggaacttgaagatgccaaagattaaaatgcccaaatttagcatgcccagcctcaaaggagaggggccagaatttgatgtgaacctgtccaaagcgaatgtggacatttctgcaccaaaagtagatactaatgctccagatctgagccttgaaggacctgaagggaagttgaaaggcccgaagtttaagatgcctgagatgcacttcagagctcctaagatgtctttgccagatgttgacctggatcttaaaggacccaaaatgaaaggaaatgtagatatctctgcaccaaagatagagggtgaaatgcaggttccagatgtggacatcagaggtcccaaggtagatattaaagcaccagatgtggaaggccaaggcctggactggagcctgaaaatacccaagatgaaaatgcccaagttcagcatgcccagcctcaaaggcgagggcccagaagtggatgtgaacttgcctaaggctgacgttgttgtctcaggacccaaggtggacatcgaagccccagatgtgagcctcgaaggtccagaagggaagctgaagggtcccaagtttaagatgcctgagatgcatttcaagacccccaagatctccatgcctgatgtggacttacacttgaaaggccccaaagtcaaaggggatgtggatgtgtctgtgcccaaggtagaaggtgaaatgaaagtgccagatgttgaaatcaaaggacccaaaatggacattgatgccccagatgtggaggttcaaggcccagactggcacctgaagatgcccaagatgaaaatgcccaagtttagcatgcctggcttcaaaggagagggccgagaagtggatgtgaacctgcccaaggctgacattgatgtctcaggacccaaggtggatgttgaagtcccagatgtgagccttgagggcccggaaggaaagctgaagggccccaagtttaagatgcctgagatgcacttcaaggcccccaagatctccatgcctgatgtggacctgaatcttaaggggccaaaattgaagggagatgtggatgtgtccttgcctgaggtagaaggtgaaatgaaagtgccagatgttgacattaaagggcccaaagttgacattagtgctccagatgtggatgttcatggcccagattggcacctgaagatgcccaaggtgaaaatgcccaagttcagcatgcccggcttcaaaggagagggccctgaagtggatgtgaagctgcccaaagctgacgttgatgtctcaggacccaaaatggatgctgaagttccagatgtgaatattgaaggtccagacgcaaaactaaaaggtcccaaattcaagatgccagaaatgagtataaagcctcagaagatatccataccagatgttggtttgcatttgaaaggtcctaaaatgaaaggagattatgatgtaacagttccaaaagtagaaggagagataaaagctcctgatgttgacatcaaaggccccaaagttgatattaatgcaccagatgtggaggttcatggcccagactggcacctgaagatgcccaaggtaaaaatgcccaagttcagcatgcctggctttaaaggagagggcccagaggtggatatgaacctgcccaaggctgaccttggtgtttcaggacccaaggtggacattgatgttccagatgtgaatcttgaagctccagaggggaaactaaaaggccctaagttcaagatgccaagcatgaatatacagacgcacaaaatctctatgcctgatgttggacttaatttgaaagcccctaaactgaaaactgatgtagatgtttcccttcccaaagtggaaggagacttgaagggtcctgaaattgatgtgaaagcccctaagatggatgtgaatgttggtgatattgatattgaaggtccagaagggaagttgaagggccccaagtttaagatgcctgagatgcatttcaaggcccccaagatctccatgcccgatgtggacttacacttgaaaggccccaaagtcaaaggggatatggatgtgtctgtgcccaaggtagaaggtgaaatgaaagtgccagatgttgacattaaagggcccaaagtggacattgatgccccagatgtggaggttcacgacccagattggcacctgaaaatgcccaagatgaaaatgcccaagttcagtatgcctggcttcaaagcagagggccctgaagtggatgtgaatctgccaaaggctgacattgatgtgtctggacccagtgtggacactgatgctcctgatttggatattgagggaccagaaggaaagttgaaaggctccaaatttaagatgcccaagttgaatataaaagctcccaaggtctccatgccagatgtggacttgaatttgaagggacccaaactgaagggagagatagatgcttctgtgccagaactggaaggtgatctcagagggccgcaagttgatgtcaaaggtccttttgtggaagcggaggtgcccgatgttgatctggagtgtcctgatgcaaagttgaaagggcccaagtttaagatgcctgagatgcacttcaaggcccccaagatctccatgcctgatgtggacttacacctgaaaggccccaaagtcaaaggggatgcggatgtgtcggtgccaaaattggagggagatttaacaggccccagtgtgggtgtggaggtgcctgatgttgagctggagtgtcctgatgcaaagttgaaaggccctaaatttaagatgccagacatgcacttcaaggcccccaagatctccatgcctgatgtggacttacacttgaaaggccccaaagtcaaaggggatgtggatgtgtcggtgccaaaattggagggagatttaacaggtcccagtgtgggtgtggaggtgcctgatgttgagctggagtgtcctgatgcaaagttgaaagggcccaagtttaagatgcctgagatgcacttcaagacccccaagatctccatgcctgatgtggacttacacctgaaaggccccaaagtcaaaggggatatggatgtgtctgtgcccaaggtagaaggtgaaatgaaagtgccagatgttgacatcaaaggacccaaaatggacattgatgccccagatgtggatgttcatggcccagactggcacctgaagatgcccaagatgaaaatgcccaagttcagcatgcctggcttcaaagcagagggcccagaagtggatgtgaacttgcccaaggctgatgttgttgtctcaggacccaaggtggatgttgaagtcccagatgtgagccttgaaggtccagaagggaagctgaagggccccaagcttaagatgcctgagatgcacttcaaggcccccaagatctccatgcctgatgtggacttacacttgaaaggccccaaagtcaaaggggatgtggatgtgtctttgccaaaattggagggagatttaacaggccccagtgtggatgtggaggtgcctgatgttgagctggagtgtcctgatgcaaagttgaaagggcccaagtttaagatgcctgagatgcacttcaagacccccaagatctccatgcctgatgtgaacttaaacttgaaaggccccaaagtcaaaggggatatggatgtgtctgttcccaaggtagaaggtgaaatgaaagtgccagatgttgacatcagagggcccaaagtggacattgatgccccagatgtggatgttcatggcccagactggcacctgaagatgcctaagatgaaaatgcccaagttcagcatgcctggcttcaaaggagagggcccagaagtggatgtgaacttgcccaaggctgacgttgatgtctcaggacccaaggtggatgttgaagtcccagatgtgagccttgaaggtccagaagggaagctgaagggccccaagtttaagatgcctgagatgcacttcaagacccccaagatctccatgcctgatgttgatttcaatttaaagggacccaaaatcaaaggagatgttgatgtttctgccccaaagctggagggagagttaaaaggtccagaattggatgtcaaaggtcccaaattagatgctgacatgccagaagtagctgtggaaggcccaaatggcaagtggaaaactcctaagttcaagatgccagatatgcactttaaagctcccaaaatctctatgccagacctcgatctacacttgaagagccccaaggcaaaaggagaggtggatgtagatgttcccaaattggaaggggaccttaaagggccacatgtggatgtcagtgggccagacattgacattgagggaccagagggcaaattgaaaggccctaagttcaagatgcctgatatgcatttcaaagcccccaatatttctatgcctgatgttgatctaaatctcaaaggacccaaaatcaagggggatgtggatgtgtctgtgcctgaggtagaaggtaaacttgaagtaccagatatgaacatcaggggccccaaagttgatgtaaatgcccccgatgtccaagctccagactggcacctgaagatgcccaagatgaaaatgcccaagttcagcatgcctggcttcaaagcagagggccctgaagtagacgtcaacttgcctaaggctgacgttgacatctcaggacccaaggtggacattgaaggccctgatgttaatattgaaggaccagagggaaagttgaaagggcctaagttaaagatgccagagatgaacatcaaagcccccaagatctccatgcctgactttgatttgcatctgaaaggtcccaaggtgaagggcgatgtggatgtttctctgcccaaagtggaaggtgacctcaagggccccgaagttgacatcaaggggcccaaagtggatattaatgccccagatgtgggtgttcaaggcccagactggcacctgaagatgcccaaggtgaaaatgccaaagttcagcatgcctggcttcaaaggagagggcccagatggggatgtgaagctgcccaaggctgacattgatgtctcaggacccaaagtggacattgaaggccctgatgttaacattgaaggaccagagggaaagttgaaagggcctaagttcaagatgccagagatgaatatcaaagcccccaagatctccatgcctgatattgacttaaacctgaaaggacccaaagtgaagggtgatgtggatgtttcccttcctaaagtggaaggtgacctcaagggcccagaagttgacatcaagggcccaaaagtggacattgacgcacctgatgttgatgttcatggcccagactggcacctaaagatgcccaagataaaaatgcccaagatcagcatgcctggcttcaaaggagaaggtccagatgtggacgtgaacctgcccaaggctgacattgatgtctcaggaccgaaagtggatgttgaatgtcccgatgtgaatatcgaaggacctgaaggaaagtggaaaagtccaaagtttaagatgccagagatgcattttaagactccaaagatatccatgccagatattgacctgaatctcacaggtccaaaaataaaaggagatgtggatgttacaggccctaaggtagagggagatctgaaaggtcctgaagttgacctcaaaggccccaaagtggacattgatgtcccagatgttaatgttcagggtccagactggcacctgaagatgcccaagatgaaaatgcccaagttcagcatgcctggcttcaaagcagagggccctgaagtggatgtgaacctgcccaaggctgacgttgatgtctcaggccccaaagtggacgttgaaggccctgatgttaacattgaaggaccagagggaaagttgaaagggcccaagttcaagatgccagagatgaatatcaaagcccccaagatccccatgcctgactttgatttgcatctgaaaggtcccaaggtgaagggcgatgtggatatttctctgcccaaagtggaaggtgacctcaagggccctgaagttgacatcaggggtccccaagtggacattgatgtcccggatgtgggcgttcaaggcccagactggcacctaaaaatgcccaaagtgaaaatgcccaaattcagcatgcctggcttcaaaggagagggcccagatgtggatgtgaacctgcccaaggctgaccttgatgtctcaggacccaaggtggacattgatgttccagatgtgaatatcgaaggcccagagggaaagttgaaaggtcccaaattcaaaatgcctgagatgaacatcaaagcccccaagatctccatgcctgacattgatcttaacctgaaaggtcccaaagtgaagggtgacatggatgtgtctctgccaaaagtggaaggtgacatgaaagttcctgacgtggatattaaaggccccaaagtggatattaatgccccagatgtggatgttcaaggcccagactggcacctgaagatgcctaaaataaaaatgcccaagatcagcatgcctggcttcaaaggagaaggtccagaagtggacgtgaacctgcccaaggctgaccttgacgtctcaggacccaaggtggacgttgatgttccagatgtgaatattgaaggtccagatgcgaaactgaagggccctaaattcaagatgccagagatgaacatcaaagctcctaaaatatcaatgcctgatttggacctcaatcttaaaggccctaaaatgaaaggagaggtggatgtttcacttgcaaatgtagaaggtgatttgaaaggacctgctcttgacataaaaggcccaaagatagatgtagatgctccagatattgacattcatggcccagatgccaaattaaaaggtccaaaactgaagatgcctgacatgcatgtaaacatgcccaagatctccatgccagaaattgacttgaatttgaaaggctcaaagcttaagggagatgttgatgtctctgggcccaagttggaaggtgacattaaagctcccagtttggatataaagggcccagaagtggacgtttccggtcctaagcttaatatcgaaggcaagtcaaagaaatctcgttttaagcttcccaaatttaatttttcgggctctaaagttcagacacctgaagtggatgtcaaaggtaaaaagccagatattgacataacaggtccaaaagttgatattaatgctcctgatgtcgaggtccaaggaaaagtgaaaggatccaagtttaaaatgcctttcctgagtatttcatctcccaaagtttctatgcctgacgtggagctaaatttgaaaagtcccaaagtcaaaggagacttagatattgcaggtcccaatttagaaggtgactttaaaggccccaaagtggatattaaggcaccagaagtcaatcttaatgcacctgatgtggatgttcatggtccagactggaatctgaaaatgcccaagatgaaaatgcccaaattcagtgtgtctggcttaaaagcagaagggccagatgtagctgtggatctaccaaaaggagacatcaacatagagggcccaagtatgaacattgagggcccagatctcaatgtggaaggtccggagggaggcttgaaaggtcccaaattcaagatgcctgacatgaatatcaaagctcccaagatctccatgcctgacattgacttaaacttgaaaggccccaaggtgaaaggtgatgtggatatttctcttcccaaacttgaaggggatctgaaagggccagaggttgatatcaaaggccctaaagtggacatcaatgccccagatgtggatgttcatggtccagactggcatctgaagatgcccaaagtgaaaatgcccaagttcagcatgcctggcttcaaaggagaaggccctgaagtcgatgttaccctccctaaagctgacattgacatttctggtcccaatgtagacgttgatgttccagacgtgaatattgaaggtccagatgcaaagctgaagggccccaagttcaagatgcctgagatgaacatcaaagcccccaagatctccatgcctgactttgacctgaacttgaagggacccaaaatgaagggtgatgtggttgtgtctttgcccaaagtggaaggtgatctaaaaggccctgaggtggacatcaagggccccaaagtggacattgacactcctgacattaacatcgaaggctcagagggtaaattcaagggacccaaatttaagataccagagatgcacctgaaggctcccaaaatatcgatgcctgacattgatttaaacctgaagggccccaaagtcaagggcgatgtggatgtttctctgcccaaaatggaaggtgacctcaagggtcctgaagttgacatcaagggccccaaagtggacattaatgctccagatgttgatgttcaaggcccagactggcacctgaagatgcccaaggtgaaaatgcccaagttcagcatgcctggcttcaaaggagagggcccagatgtggatgtgaacctgcccaaggctgaccttgatgtctcaggacccaaggtggacattgatgttccagatgtgaatatcgaaggcccagagggaaagttgaaaggtcccaaattcaagatgcctgagatgaacatcaaagcccccaagatctccatgcctgacattgatcttaacctgaaaggacccaaagtgaagggtgatatggatgtgtctctgccaaaagtggaaggtgacatgcaagttcctgacttggatattaaaggccccaaagtggatattaatgccccagatgtggatgttcgaggcccagactggcacctgaagatgcctaagataaaaatgcccaagatcagcatgcctggcttcaaaggagaaggtccagaagtggatgtgaacctgcccaaggctgaccttgacgtctcaggacccaaggtggacgttgatgttccagatgtgaatattgaaggtccagatgcgaaactgaagggccctaaattcaagatgccagagatgaacatcaaagcccccaagatctccatgcctgactttgatttgcatctgaaaggccctaaggtgaaaggagatgtggatgtttctctgcctaagatggaaggtgatctaaaggcccctgaagttgacatcaagggccccaaagtggacattgatgccccagatgtggatgttcatggcccagactggcacctgaagatgcccaaggtgaaaatgcccaaattcagcatgccaggatttaaaggagagggcccagaagtggatgttaatttgcccaaagctgacattgatgtctcaggacccaaagtggacattgacactcctgatattgatattcatggtccagaagggaaactgaagggccccaaatttaaaatgcctgacctgcacctcaaggcaccgaagatctctatgcctgaagttgacctgaatctgaaaggtccaaagatgaagggcgacgtggacgtttctctgcccaaagtggaaggcgacctcaagggccctgaagttgacatcaagggccccaaagtggacattgatgtcccagatgtggacgttcaaggcccagactggcacttaaaaatgcccaaagtgaaaatgcccaagttcagcatgcctggcttcaaaggagagggcccagatgtggatgtgaacctgcccaaggctgaccttgacgtctcaggacccaaggtggacattgatgttcctgatgtgaatatcgaaggtccagatgcgaaactaaagggccctaaattcaagatgcctgagatgaacatcaaagcccccaagatctccatgcctgactttgatttgcatctgaaaggtcccaaggtgaagggtgatgtggatgtttcccttcctaaagtggaaggtgacctcaagggcccagaagttgacatcaagggccccaaagtggacatcgatgcccctgatgtagatgttcatggcccagactggcacctgaagatgcccaaggtgaaaatgcccaaattcagcatgccaggattcaaaggagagggcccagatgtggatgttacccttcctaaggctgacattgagatttctggccccaaagtggacattgatgcccctgatgtcagtatcgaaggtccagatgcaaaactcaagggtccaaagttcaagatgccagagatgaacatcaaggcccccaaaatctccatgcctgacattgactttaacttgaagggtcccaaagtgaaaggtgatgtggatgtctctctgcccaaagtggaaggtgatctcaagggccctgaaattgacataaaaggccccagtttggacattgacacacctgatgtcaatattgaaggtccggaaggaaaattgaaggggcccaaatttaagatgcctgagatgaacatcaaagctcccaaaatctctatgcctgactttgatttgcacctgaaaggtcccaaggtgaagggtgatgtggatgtttcactacctaaggtggaaagtgatctgaaagggccagaggtagacattgaaggtcctgaagggaagctcaaaggtcccaagtttaagatgcctgatgtacatttcaaaagcccacaaatctccatgagtgacattgatttgaatttgaaaggacctaagataaaaggagatatggacatttccgttcctaaactggagggagatctgaaaggtcccaaagtggatgtcaaaggccctaaagtgggcattgacactcctgatattgacattcatggtccagaagggaaactgaagggccccaaatttaaaatgcctgacttacacctcaaggcaccgaagatctctatgcctgaagttgacctgaatctgaaaggtccaaaggtgaagggcgacatggacatttctctgcccaaagtggaaggcgacctcaagggccccgaagttgacatcagggaccccaaagtggacattgatgtcccagatgtggacgttcaaggcccagactggcacctaaaaatgcccaaagtgaaaatgcccaagttcagcatgcctggcttcaaaggagagggcccagatgtggatgtgaacctgcccaaggctgacattgatgtctcaggacccaaagtggacgttgatgttcctgatgtgaatatcgaaggtccagatgcgaaactaaagggccccaagttcaagatgcctgagatgagcatcaaagcccccaagatctccatgcctgatattgacttaaacctgaaaggacccaaagtgaagggcgatgtggatgttacccttcctaaagtggaaggtgacctcaagggcccagaagctgacatcaagggcccaaaagtggacatcaacacccctgatgtggatgttcatggcccagactggcacctgaagatgcccaaggtgaaaatgcccaaattcagcatgcctggcttcaaaggagaaggtccagatgtggatgtgagcctgcccaaggccgacatcgatgtctcgggacccaaggtggacgttgatattccagatgtgaatatcgaaggtccagacgcaaaactgaagggccccaagttcaagatgcctgaaataaatatcaaagctcccaagatctccatacctgatgttgacctggatttgaaaggacccaaagtaaaaggagattttgatgtgtctgtccctaaggttgaagggactttgaaaggcccagaagtagatcttaaaggtccacgtctggatttcgaaggccctgatgccaaactcagtggcccatctttgaagatgccatcgctggagatatctgctcctaaagtaactgctcctgatgttgatttgcatctcaaggcaccaaaaattggattttcaggtccgaagttagaaggtggtgaagtggacctcaagggacccaaagttgaagctccaagcttagatgtacacatggacagcccagatattaacatcgaagggccagatgttaaaatccccaaatttaagaaacccaagtttggatttggggcaaaaagccccaaagctgacatcaagtcaccttcactggatgtcactgttcctgaggcagagctgaaccttgagactcctgaaattagtgttggtggcaagggcaagaaaagtaagtttaaaatgcctaaaattcatatgagtggtcctaagattaaggccaaaaaacagggatttgacctgaatgttcctgggggtgaaattgatgccagcctcaaggctccggatgtagatgtcaacatcgcagggccggatgctgcactcaaagtcgacgtgaaatcgcccaaaaccaagaaaacgatgtttggaaaaatgtacttcccagatgtagagtttgacattaaatcacctaaatttaaagctgaggcccctctccctagccccaaactggagggtgaactccaggcacctgatctggaactttctttgccagcgattcacgtcgaaggtcttgacatcaaggcgaaggctcccaaggtcaagatgccagatgtggacatctcagtgccaaaaatagagggtgacctgaaaggccccaaagtgcaggcaaacttgggtgcacctgacatcaacatcgaaggcctagatgctaaagtcaaaacaccgtccttcggcatttctgcccctcaagtctccatccctgatgtgaatgtaaacttgaaaggaccaaagataaagggtgatgtccccagcgtgggactggaaggaccagatgtagatctgcaaggtccagaagcaaaaattaagttccccaagttttccatgcccaagatcggcatcccaggtgtgaaaatggagggtgggggagccgaggtccatgcccagctaccctctcttgaaggagacttgagaggaccagatgttaagctcgaagggcccgatgtttctctaaaggggccaggagtagacttgccttcagtgaacctctctatgccaaaagtctctgggcctgaccttgatctgaacttgaaaggaccaagtttgaagggagacctggatgcatctgttcccagcatgaaggtgcatgctccagggctcaacctcagtggtgtcggtggcaaaatgcaggtgggaggagacggtgtgaaagtgccagggatcgatgccacaacaaagcttaacgttggggcaccagatgtgacactgaggggaccaagcctgcagggagatctggctgtctctggtgacatcaaatgccctaaagtatccgtaggagctcctgatctaagcttggaggcatccgaaggcagcattaaacttcccaaaatgaagctgccccaatttggcatctctactccggggtccgacttgcacgtcaatgccaaggggccacaggtttctggcgaactgaaggggccaggtgtggatgtgaacctgaaagggcctcggatttcagcaccgaatgtggactttaacttggaaggaccaaaagtgaaagggagccttggggccactggtgagatcaaaggccccactgtcggaggaggtcttccaggcattggtgttcaaggcctagaaggaaacctccagatgcctggaattaagtcctctggatgtgatgtgaacctgccaggcgtgaatgtgaaactcccaactgggcagatttctgggcctgaaatcaaaggtggtctgaaaggttcagaagtaggtttccatggggctgctcctgatatcagtgtgaaggggcctgcctttaatatggcatctcctgagtcagattttggcatcaacttgaagggcccaaaaatcaaaggaggtgcggatgtttcagggggtgtcagtgccccagacatcagccttggtgaagggcatttgagtgttaaaggttccgggggtgagtggaagggaccccaagtctcctctgctctcaacttggacacatctaagtttgctgggggccttcatttctcaggaccaaaggtggaaggaggtgtgaaaggaggtcagattggactccaggctcctgggctgagtgtgtctgggcctcaaggtcacttggaaagtggatctggaaaagtaacattccctaaaatgaagatccccaaatttaccttctctggccgtgagctggttggcagagaaatgggggtggatgttcacttccctaaagcagaggccagcatccaagctggtgctggagacggcgagtgggaagagtctgaagtcaaactgaaaaagtccaagatcaaaatgcccaagtttaatttttccaaacctaaagggaaaggtggtgtcactggctcaccagaagcatcaatttctgggtccaaaggtgacctgaaaagttcaaaggccagcctgggctctctggaaggagaggcagaggccgaagcctcttcaccgaaaggcaaattctccttatttaaaagtaagaagccacggcaccgctcaaattcattcagtgatgaaagagagttctctggaccttccaccccgacggggacgctggagtttgaaggtggggaagtgtctctggaaggtgggaaagttaaagggaaacacgggaagctgaaattcggtacctttggtggattggggtcaaagagcaaaggtcattatgaggtgactgggagcgatgatgagacaggcaagttacaggggagtggggtgtccctggcctctaagaagtcccgactgtcctcctcttctagcaatgacagtgggaataaggttggcatccagcttcccgaggtggagctgtcagtttccacaaagaaagagtagcaggcctttgtatgtgtgtacatatatatatatataacaaaacatcagccttgggtggtgtgttcctatataaactccaaagggaaacacaccgactgcctcagcaatcatgcaaagaccttgcctggcccggtggcaagcgctgaaaaaccgaccgcctgtaggctcctggaactatacagataggtaaagagttccaagttcgtccagcccatgtgcaaagtcaacagtatttgccttaagatttcatatatatatatttttttgcattgactgctgagagctcctgtttactaagcaagcttttgtgtttattatcctcatttttactgaacattgttagttttggggtaatggaaacccactttttcattgtaatgactttgggggcttttgttagtaagggtgggtggggtgatgggttgcagacggaggtcaggtcttcctctttcctgagactggatctgttcaaacagcaaacgcccacagatggcccagaggtggtggtagtcagggtgtgtgggtgtttttagggttctttagtgttgtttctttcacccaggggtggtggtcccagccagtttggtgctgacggtgagaggaaattagaatctgtttgcaaattgtccaacccaccccctcaacatgaggggcttccattttctgtgttttgtaagggaactgtttccttcatgccgccatgttcctgatattagttctgatttctttttaacaaatgttatcatgattaagaaaatttccagcactttaatggccaattaactgagaatgtaagaaaattgatgctgtacaaggcaaataaagctgtttattaacct

SEQ ID NO: 285049 - DNA, 580 bp, Artificial Sequence
  derived and/or modified sequence
gagctggcgacccgactccatggtccagcacatggcacagagactggggttgtgaccgagattcccgacgagagagactgaggggaagagaggaaggaggggcgggctcctggcaaggcattcgctcctgagcggaatcctgcaaagatggagaaggaggagacaacccgggagctgctgctgcccaactggcagggtagtggctcccacgggctgaccatcgcccagagggacgacggcgtctttgtgcaggaggtgacgcagaactcccctgcggcccgcactggggtggtcaaggagggggaccagattgtgggtgccaccatctactttgacaacctgcagtcgggtgaggtgacccagctgctgaacaccatggggcaccacacggtgggcctgaagctgcaccgcaagggggaccgctctcccgagcctggccagacctggacccgtgaagtcttcagctcctgcagctctgaagtggttctgagcggggatgatgaggagtaccagcgcatctacaccacgaagatcaagccacggctgaagtcggaagatggagtggaaggagacctcgggg

SEQ ID NO: 285050 - DNA, 17673 bp, Artificial Sequence
  derived and/or modified sequence
atggaaaaggaggagaccaccagagagctacttctgcccaattggcaggggtccggctcccatggtctgacgatcgcccagagggacgacggcgtgttcgtgcaggaagtgacccagaacagcccagctgcccgaacaggagtggtgaaggaaggcgatcagatcgtaggcgctacaatatattttgataacctgcagtccggagaggtgactcagttgctcaatacaatgggccatcatactgtcggcttaaagttgcataggaaaggcgacagaagccccgagccaggccaaacgtggacgcgtgaagtgttctctagctgctctagtgaggtggtgctaagcggtgacgacgaagagtaccagcgcatatatactaccaagattaagcccaggctaaaaagtgaggacggcgtagagggcgacctcggagagactcagagtcgaaccattacagtgactagaagagtgaccgcctataccgtcgatgtcactgggagagaaggcgcaaaggatattgacattagcagccccgagtttaaaattaaaatccctcggcatgagttaaccgagattagtaatgtggatgtggagacccagtccggtaagacagttatccggctgccctccggctctggggctgccagtccaactgggtcagctgttgatattcgcgctggggctatatcagccagtggtccagagttgcaaggagcgggacattcaaagctccaggtgacgatgccagggattaaagtgggcggatctggagtgaatgtgaatgccaagggcctggatctcggcggtcgtggaggtgtccaggtccccgctgtggatatcagttcaagcctgggtggcagagctgttgaggtccagggccctagcttggaaagtggtgaccacggcaagattaagttcccaacgatgaaggtccctaaatttggggtgtctactgggcgtgagggacagacaccgaaagctggactcagagtgagcgccccagaagtctcggtagggcataagggaggaaagcctggcctgactatccaggcccctcagctggaagttagcgttccatctgcgaatattgaaggactagaaggtaagctgaagggcccacagattactggaccctccctcgagggtgacttaggattaaagggcgctaagccccagggacatattggagtggacgcaagcgctccgcagattggagggtccattactggcccatcggtggaagttcaggccccagatatcgatgtacaaggacctggctccaagctgaacgtccctaagatgaaagtgccaaaatttagtgtgagcggggcaaaaggcgaggagactggaattgatgtgaccttacctaccggagaggtgactgtccctggggtgagtggggacgtgagcctgccggagatcgccactgggggtctggagggcaagatgaaaggcactaaggtgaagaccccagagatgatcattcagaagccgaagatatccatgcaagacgttgacctgagtctcggctctcccaagctgaagggggatatcaaagtcagcgctcccggtgtgcagggcgacgtgaaaggccctcaggtggccttaaaaggtagtcgggtagacatcgagacacctaacttagaaggaacactgactggcccaaggctcgggtcgcccagcgggaagacaggtacctgtcgtatatcaatgagtgaggtcgatctgaatgttgcagccccaaaggtaaaaggtggtgtggatgtaacccttccacgggttgaagggaaggtgaaagtccccgaagtggacgtccgcggacctaaagtcgatgtgtcggctcctgatgtggaggctcacgggcctgagtggaatcttaaaatgcctaagatgaaaatgcctacattttctacccctggggctaagggggagggacccgatgttcatatgactctgccgaagggtgacatctccatctctgggccaaaggtcaatgtcgaggccccagacgttaacctcgagggactgggcggtaaactgaagggtcctgatgtgaagctccctgacatgagtgtgaagactcccaagatcagcatgcctgatgtggatctgcacgtgaaaggcactaaagttaaaggggagtacgacgtgactgtgcccaaattggagggcgagctgaaagggccaaaggtggatatcgatgcgcctgatgtggatgtacatggaccggattggcaccttaagatgcctaagatgaaaatgcccaagttctctgtccccggattcaaggctgaggggcctgaggtcgacgttaacctgcccaaagccgatgttgatatctctggcccaaagatcgatgtgaccgcgccagacgtgagcatagaggagccagaaggaaagttgaaaggcccaaagtttaagatgcccgaaatgaacattaaagtcccaaagatatctatgcccgatgtggatctccatcttaaaggaccgaacgtgaagggcgaatatgatgtgaccatgcctaaggtcgagagcgagatcaaggtgcccgacgttgagctcaagtcggctaagatggatatagatgtgccagacgtcgaggttcaggggcctgactggcacttaaagatgcctaaaatgaaaatgcccaagttttcaatgcctgggtttaaggccgaaggccctgaggtcgacgtaaatctgcccaaagctgacgtcgacattagcgggccaaaggttggcgtcgaagtcccagatgtaaatatagagggccctgaaggtaagttgaaagggcctaaatttaaaatgcccgaaatgaacatcaaagcccctaagatttctatgcccgatgtggacctgcatatgaaaggacctaaggttaaaggggagtatgacatgacagttccaaagttggaaggagaccttaagggtccaaaggtcgacgtgtctgctcccgacgttgagatgcagggccctgattggaacctgaaaatgcccaaaattaagatgccaaagttcagcatgcccagtctcaagggcgaggggccagagtttgacgtcaacctctcaaaagctaacgtggatatctcggcgccaaaggtggacacaaatgcccctgacctgtctctagagggtcctgaagggaaactgaaggggccaaaatttaagatgccggagatgcatttcagagctccaaaaatgtccctacccgacgtggatctcgatctgaagggaccgaagatgaagggcaacgtggatatcagtgcaccgaagatagaaggtgagatgcaggtccccgatgtggacatacgaggacctaaggttgacattaaagctcctgacgtggagggccagggcctagattggtctctgaaaatacccaaaatgaagatgcccaaattttctatgccgagtttgaaaggtgagggtcccgaggtcgacgtgaatcttcctaaagccgatgtagttgtgagtggaccgaaggtcgacattgaagctcccgacgtaagcctggaaggacccgaagggaagctgaagggaccaaagtttaaaatgccagaaatgcattttaaaactcccaaaatcagcatgcccgacgttgatctccaccttaaaggacctaaggtcaaaggggacgttgacgtgtctgtacctaaagtcgaaggggaaatgaaggtgcctgacgtggagattaaggggcctaagatggatattgatgctcctgacgttgaggtccaggggcctgactggcacctgaagatgcccaagatgaaaatgccaaaattctctatgccaggcttcaagggcgagggaagggaagtggatgttaacctaccaaaggctgacattgacgtcagtggaccaaaggtggacgtcgaggtacccgacgtgtctcttgaaggacctgagggtaagctgaaaggcccaaagtttaagatgcccgaaatgcactttaaggccccaaaaatctctatgccggacgtggatcttaatctgaaggggcctaaactcaagggtgacgtggacgtgtcgctgccagaagtggagggcgaaatgaaagtgccagacgtcgatatcaagggccctaaggtcgatatctccgctccggatgtcgatgtgcacggtcccgattggcacctgaaaatgccaaaggtgaagatgcctaagttttccatgcctgggttcaagggggaagggccagaggttgacgtcaaactgcccaaagcagatgttgacgtctcgggtcccaagatggacgccgaggtccccgatgtcaatatcgaaggccctgacgccaagctgaaaggcccaaagttcaagatgccggagatgtccatcaagcctcagaagataagcattccagatgtaggcctacatctgaaaggcccaaagatgaagggagactacgacgtaaccgttcctaaagtggagggcgaaattaaggccccagatgtcgatatcaaaggtcctaaggtggatattaacgcccctgacgtagaagtacatggtcctgactggcacctgaaaatgcccaaggtaaaaatgcccaagtttagcatgccagggttcaagggtgaggggccagaggtagatatgaatctaccaaaggctgaccttggggtctcaggaccaaaagtggacattgatgtccccgatgtgaaccttgaagcgcctgagggcaagctgaagggtcccaagtttaagatgccgtctatgaatatacagacccataagatatctatgcccgacgtcggtttaaaccttaaagcgccaaagctgaagacagacgtagatgttagtcttcccaaggtggagggtgacctaaaaggaccggaaattgacgtcaaagcccctaagatggatgtgaacgtgggcgacatcgacattgagggccctgaaggcaagttgaaaggtcctaagtttaaaatgcccgagatgcattttaaagcaccgaagatttccatgccagacgtggatctacacttaaagggcccaaaggtgaaaggcgatatggatgtgagcgtccccaaggtggagggcgaaatgaaggtccctgatgtcgatatcaaaggaccaaaggtggatatagatgcgccagatgttgaagtccacgacccggattggcacttgaagatgcctaagatgaaaatgccgaaatttagcatgccgggtttcaaggcagagggtcctgaagtggacgtgaacttacctaaggcggacattgatgtgagtgggccttctgttgacaccgatgccccagacttagatatcgaggggccagaagggaaactgaagggcagcaagttcaaaatgccaaagcttaacattaaggcgcctaaggtttccatgccagacgtggacttgaatcttaaaggacccaaacttaaaggagaaatcgatgcaagcgtccctgaacttgagggcgatctgaggggtccacaggtcgacgtgaaaggaccttttgtggaagcggaggtccctgacgttgacttagaatgcccagatgcgaagctaaaagggccaaaattcaagatgcccgagatgcacttcaaggcacctaaaatctcaatgcccgatgtggaccttcacctcaagggtccaaaagtcaagggggacgctgatgtgagcgtgcccaaactggagggcgacttgaccggacctagcgttggagtggaggtgccagatgtggaactggagtgcccagatgccaaacttaaggggccaaaattcaaaatgcccgacatgcacttcaaagctccaaaaatttccatgcctgacgtcgacttacatcttaagggccctaaggtcaagggcgacgtggatgtgagcgtgccaaaactcgaaggcgatctaaccggccctagcgtaggcgtggaggtgccagacgttgagctggagtgccctgacgccaaactcaaaggaccaaagtttaagatgcctgaaatgcatttcaagacccccaagatttctatgcccgacgtggaccttcatctgaaaggtcctaaagtcaaaggagatatggacgtgtccgtgcccaaagtggagggcgaaatgaaggttcctgatgtggatattaaaggtccgaagatggatatcgatgcaccagacgtggatgtgcatggtcctgactggcatctgaagatgcccaagatgaaaatgcccaaattctctatgcctggattcaaggcagaaggacctgaggttgatgtaaaccttcccaaagcggatgttgtggtaagcggacccaaggttgatgtggaggttccagacgtctccttggagggacctgagggaaagcttaaaggtcctaaactgaaaatgcctgagatgcactttaaagctcctaaaattagcatgccagacgttgaccttcacttgaaagggcctaaggttaagggcgacgtcgacgtgtcactgccgaagttagagggcgacctgaccgggccttccgttgacgtggaagtacccgacgtggagctcgagtgtcctgacgctaaactcaaaggcccaaagttcaagatgcctgagatgcatttcaaaaccccgaaaatatctatgcctgacgttaatctgaacctgaaaggccctaaggttaaaggggatatggacgtgtcagtacctaaggtggaaggggagatgaaggtacctgatgtggacattcgcggacctaaggtcgacatagatgcccctgacgttgatgtccacggacccgactggcacctgaaaatgccaaagatgaaaatgcctaaattctcaatgcctggttttaaaggcgagggaccagaagtggacgtgaatcttcccaaggcagacgtggatgtctcaggccctaaagtggatgttgaagtgccagatgtttcactggaaggacctgagggcaaactgaaaggacctaaatttaagatgccagagatgcatttcaaaactccaaagatcagtatgcccgacgtggattttaatttgaaagggccaaagatcaagggagacgttgacgtctcagcccctaaactcgagggtgaactgaagggtcctgagctcgacgtaaaggggcctaaacttgacgctgatatgcctgaggtggccgtagaagggcctaatggtaagtggaaaacaccgaaatttaagatgcccgatatgcatttcaaggccccaaaaattagtatgccagatctcgatctgcatctcaaatctcctaaagcaaagggggaagtcgacgtggatgttccaaagttagaaggcgacctgaaggggcctcatgtggatgtgagtgggcctgacatcgacatcgaaggccctgagggaaagctgaaaggccctaagttcaaaatgcctgatatgcatttcaaggccccaaatataagcatgcccgatgtcgatctgaaccttaaggggccaaagatcaaaggtgacgtcgacgtgagcgtgccagaggttgaagggaaactcgaagttcctgacatgaatattagaggtccaaaggtggacgtcaatgccccagatgttcaggcccctgactggcaccttaagatgccgaagatgaaaatgccaaagtttagcatgccgggttttaaagccgaagggcctgaagtggacgtcaacctgcccaaagccgacgttgatattagcgggccaaaggtcgacattgaagggccagatgtaaatattgagggaccagagggtaaactcaagggccctaaactgaagatgcccgagatgaacatcaaagccccaaagataagcatgcctgatttcgatcttcacctgaaggggcctaaggttaagggagatgtggatgtgtcgctgcccaaggtggagggcgacctcaagggacccgaagttgacataaaaggtccaaaggttgatatcaacgccccagacgttggcgtccaagggcctgattggcatctgaagatgccaaaggtcaagatgcccaaattttccatgcccggatttaagggggagggcccagatggagacgtgaagctccctaaggcagacatcgatgtgtcgggtcctaaggtggacatcgaaggtccagacgtcaatatcgagggaccggagggaaagctcaaagggccaaaattcaaaatgccagagatgaatatcaaggcacccaaaataagcatgcctgacatagacctcaacttgaaagggccaaaggtcaagggcgatgtggatgtgtcgctgcctaaagtggaaggcgaccttaaaggccctgaggtagacatcaagggcccaaaagtggacatcgacgctcctgacgtggacgtgcatgggccagactggcatttgaagatgccaaaaataaaaatgcccaagatctctatgcctggcttcaaaggcgaagggcctgacgtggatgttaatttaccaaaagccgacattgacgtctctggacctaaagtggacgtggaatgtccagatgtgaatattgaggggccagagggaaagtggaagagtcccaaatttaaaatgccagaaatgcactttaagactccgaaaatctcgatgccagacatcgatctcaacttgactggtcccaagattaaaggcgacgtggacgttacaggacctaaggtggagggggacctgaaaggacctgaagtggaccttaagggccctaaagtcgacatcgatgtgccagacgtgaatgtccaaggcccagactggcacttgaagatgcctaagatgaagatgccaaagttttcaatgccaggcttcaaggctgaaggccctgaggtagatgtaaatctgcccaaagccgatgtggacgtctccgggccaaaagtggatgttgaaggaccagatgtcaacatcgaaggccctgagggcaaactaaaagggcctaaattcaagatgcccgagatgaatatcaaggccccaaagattcccatgccagatttcgaccttcatcttaaggggcctaaggtaaagggggacgtggatattagtctccctaaggtggagggcgatctgaagggccctgaggtggacattcggggaccccaagtggatatagacgtacccgatgtgggggttcagggtccagactggcatctgaagatgcccaaggtgaaaatgccaaagtttagtatgcctgggttcaagggagaaggtcccgacgttgatgtcaatctgcccaaggcagacctggacgtttcaggaccgaaggtggatatcgatgttcctgatgtgaatatcgaaggtccggaaggaaagttgaagggtcctaagttcaagatgcccgagatgaacataaaggccccaaagattagcatgcccgacattgacttaaatctgaaaggcccaaaggtgaaaggcgacatggacgtgagcctgccaaaggtggagggagacatgaaggtcccagacgtcgacattaaaggccctaaagtcgacatcaatgcgcctgacgttgatgtacagggccctgattggcatctgaagatgcccaaaatcaaaatgcctaagatcagcatgccaggctttaagggagagggaccagaagtggatgtgaacctgccaaaagcagacttggacgtcagcggcccaaaggtagacgtggatgttcctgatgtgaacatcgagggtccggatgcaaaactgaaggggccaaagttcaaaatgccggaaatgaatattaaggccccaaagatcagcatgccagatctagatctgaaccttaaggggccaaaaatgaagggagaagtcgatgtgagcttggctaatgttgaaggagatctgaagggccctgcattggacattaaggggcctaaaatagatgtagatgcccctgatattgacattcacggaccagatgccaagttgaaaggcccaaagctgaaaatgccagacatgcacgtgaacatgcctaaaatttctatgcccgagatcgacttgaacctaaaggggagcaaactcaaaggagacgtcgatgtgagcggccctaaactcgaaggagacataaaggcgccttcactggatatcaagggtccagaggtcgacgtgtcaggacctaaattaaacatcgaagggaagagtaagaaatcaagattcaagttaccaaagtttaatttctcagggtctaaagtacagacgccagaggttgacgttaaaggcaagaagcctgacatcgacatcacagggcctaaagttgatatcaacgcaccagatgtggaagtgcagggtaaggtaaaagggagtaaatttaaaatgcctttcctatcaattagcagtccgaaagtttctatgcccgatgtcgagctgaacctaaagagcccgaaggtgaagggcgatctggacattgcaggtcccaatttggagggggactttaagggcccaaaagtagatattaaggctccagaggtcaatctgaacgcaccagacgtagacgtccatggaccggactggaaccttaagatgcccaaaatgaaaatgccaaaattctccgtgagtggactgaaggcggagggccctgatgtggctgttgacctgcctaaaggggatataaatatagagggtccctccatgaatattgagggacccgatctgaatgtagaaggacccgaagggggtctgaaaggacctaagtttaagatgcccgacatgaacatcaaggcccctaagatctctatgcctgatatcgacttgaacctaaaaggacccaaggtgaagggcgacgtggacatctcactcccaaaattagaaggcgacttgaagggcccagaagtcgacatcaaggggccaaaagtcgacatcaacgctcctgacgtggatgtacacggtcccgactggcacctgaaaatgcctaaggtgaaaatgcccaagttcagtatgccgggatttaaaggcgaggggccagaagttgacgtcactcttcctaaggccgacatcgacatctccggccctaatgtcgatgtagacgtgccagacgtgaacatcgaggggcctgacgccaagcttaagggacctaagttcaaaatgcccgaaatgaacatcaaggctccaaaaatttccatgcccgatttcgacctgaatctgaaggggccaaaaatgaaaggtgacgtcgtggtctccttgccaaaggtcgaaggtgaccttaaagggcctgaggtagatattaagggaccaaaggtggatatcgatacacctgatattaatatcgagggaagtgagggcaagttcaagggcccaaagtttaaaattcctgagatgcacctgaaggcccctaaaatctctatgcccgatatagatctgaacctgaaggggccaaaggtaaaaggcgatgtcgacgtaagtcttcctaagatggaaggagacctgaaaggcccagaggtcgacattaagggcccaaaggtggacattaatgcaccagatgtggacgtccaggggcctgattggcaccttaaaatgccaaaggtgaagatgcctaaatttagcatgcccggattcaagggagagggcccagacgttgatgtgaaccttccaaaagccgacctggatgtttccggcccaaaggtcgacatagatgtccccgacgtcaatattgagggacctgaaggaaaactgaaggggccaaagtttaagatgcccgaaatgaatatcaaagccccaaaaatctccatgccagacatagacctcaaccttaaagggccaaaggttaagggggatatggacgtgtcccttcctaaggtggagggggacatgcaggtacccgacctcgatattaaaggtcctaaagtggatatcaatgcccctgatgtggatgtgcggggacctgattggcacctgaaaatgcccaagatcaagatgcccaagatctccatgcccggattcaaaggtgagggtcccgaggtcgacgtaaacctccctaaggcagatctcgatgtgtccggcccaaaagtggacgtggacgtcccggacgtcaacatcgagggcccagatgcaaagctgaaaggaccaaagtttaaaatgcctgaaatgaacatcaaagcgcctaaaattagcatgcctgatttcgatctacacttgaaaggacccaaggttaagggcgacgtggacgtgagcctgcccaagatggagggggatctcaaagcacccgaagtagacatcaaaggccctaaagtggacattgatgctcctgacgtcgatgtacacggaccagattggcatctcaagatgcccaaggttaaaatgccaaagttttcgatgcccggatttaaaggcgaaggtccagaagtggacgtgaatttgccgaaggccgatatcgacgtgagtgggcctaaagtcgacattgatactccagacatcgacatacatgggccagaagggaaacttaaaggtcccaaatttaaaatgcccgacctgcatttgaaggcccctaaaatcagcatgcctgaagtggacctgaacctgaagggcccaaaaatgaagggagatgtggatgtgagcttgcccaaggtggagggagacttgaaggggcctgaagtagatattaagggacctaaagtggatatcgatgtgccagacgtggacgtgcagggcccagactggcacttgaagatgcccaaagtgaagatgcctaagttcagtatgcccggttttaagggagagggtcccgatgtagacgttaacctgcctaaggccgatctcgacgtgagcgggcctaaggtggacatcgatgtgcctgacgtgaacatcgaaggacccgacgcaaaactgaaagggcctaagtttaagatgcccgaaatgaatatcaaggcaccaaaaatctcgatgccagattttgacttacacctgaagggccctaaagtcaaaggcgacgtggatgtgtcacttcccaaggtggagggtgacctgaagggtcccgaggtagatatcaagggcccaaaggtggatattgatgcgcctgatgtggatgtccacggcccagattggcacctgaagatgcccaaggttaagatgcccaagttttcgatgcccggatttaagggggaggggcctgatgtcgatgtgactcttccgaaagccgacatcgagatctcaggtcctaaggtagatattgacgctcccgacgtgtctattgagggtccagatgccaaacttaaaggcccaaaatttaaaatgcccgagatgaatattaaggcaccaaaaattagcatgcccgacattgacttcaaccttaagggacccaaggtgaaaggtgatgtcgacgtttcattacctaaggtcgagggtgatctgaaggggccagagatcgacatcaagggcccttccctagacatcgacactccggacgtgaatatcgagggcccagaagggaaactcaaaggtcctaagttcaaaatgcccgagatgaacattaaagctcccaaaatatccatgcccgatttcgatctgcacctgaaaggccctaaggtgaaaggcgatgtggacgtctctctcccgaaggtggaatctgacctgaagggacccgaggtcgacatcgagggaccagaggggaaattaaagggaccaaagttcaaaatgcccgacgttcactttaagtccccgcaaataagtatgtctgacatcgatctgaacttaaagggcccaaaaataaaaggggacatggatatctctgtacctaaacttgagggtgatcttaaggggccaaaagtagatgtgaaggggccaaaagtcggcatagatacgccggacatagatattcacgggccagaaggcaagcttaagggccctaagttcaagatgccggacctgcatctgaaagccccaaaaatcagtatgcccgaggtggaccttaatctgaagggccctaaagtcaagggggacatggacatcagcctgcctaaggtcgaaggggacttaaagggtcccgaagttgacatcagagaccctaaagtggatatcgacgtgcctgacgtggatgtccagggacccgattggcatcttaaaatgccaaaggttaagatgccaaagttctcaatgcccggtttcaaaggagaagggcctgatgtcgacgtcaacctgcccaaggccgatatcgacgtaagcggaccaaaggtggacgtggacgtgccagatgtaaacatagagggcccagacgccaaattgaagggccctaagttcaaaatgccagagatgagcattaaggcacctaaaatatctatgccggatattgatctaaacctgaagggtcctaaggttaaaggcgatgtggatgtaacactgcctaaagtggaaggggacctgaaaggaccagaggccgacatcaaaggaccaaaggttgacattaatacacctgacgtggatgtgcatgggcctgattggcatctcaaaatgcccaaagtgaagatgccaaaattcagcatgccaggatttaagggcgagggaccagatgtcgacgtctccctcccaaaggctgatatcgatgtatcaggtcccaaggtagacgttgatatcccagatgtgaatattgaaggcccagacgccaagctgaaagggcctaaattcaagatgcctgaaattaatataaaggctccaaaaattagcattcctgatgtagatctggacctcaagggtccgaaggtcaaaggcgattttgacgtcagcgttccaaaggtagaaggaacccttaaggggccagaagtggacctgaagggacctcgacttgacttcgagggacctgacgctaagttaagcggtccatcgctcaaaatgccgtccctagagatctcagctccgaaggtcactgcccctgatgtcgacctgcacctgaaggctcccaagattggtttctctggccctaaactcgagggaggcgaagtcgacctgaagggaccaaaagtggaagccccaagtctcgacgtccatatggacagtcccgatatcaatattgaagggcctgacgtcaagatccctaaattcaagaaacccaagttcggcttcggggcaaaaagcccaaaggccgatatcaagtctccgtctctggatgtgacagttcccgaggccgagctcaacctggagacgcccgagatctctgtgggaggaaaggggaaaaagagtaagtttaagatgccaaaaatacacatgagcggtcctaagatcaaggccaaaaaacagggctttgacctcaatgtcccaggaggggaaatcgacgccagcctaaaagccccagacgtcgacgttaacattgcgggaccggacgctgccctgaaggtggacgtgaagagtcccaagactaagaaaacaatgttcgggaaaatgtacttcccagacgttgaattcgatatcaaatcccccaaattcaaagccgaggcgcctctgccaagtcctaaactggagggcgagttacaggctccagaccttgagttatcactgcccgctatacacgtggagggactcgacattaaagcaaaggctccaaaggtgaaaatgcccgacgtcgatatctcagtccccaaaattgagggggatctcaagggccctaaagtacaagccaacctgggggcaccagatattaacatcgagggactcgacgctaaagtgaaaacgccttcttttgggataagtgctccccaggtaagtatacccgacgtaaacgtgaaccttaagggaccaaagatcaaaggggacgtccccagtgtaggcctcgaaggtccagacgtcgacttacagggtccagaagctaaaataaaattccctaagttttctatgcctaagatcgggatcccgggagtgaaaatggaaggcggaggagctgaggttcacgcacagctgccttctttggaaggagatttgaggggccctgacgtgaagctcgaaggccctgatgtcagcctcaaaggccctggcgtagatctgccctccgtgaatttgtcaatgccaaaagtgtctggcccagacctggacctgaatctgaagggtccatctctgaaaggggatttggacgccagtgtcccatcaatgaaggtgcatgctcccggactgaacctttctggtgttgggggaaaaatgcaagtgggcggtgatggcgtaaaggttccaggaatcgacgcaacaaccaaacttaacgtgggtgcaccagacgtgacactgaggggtccctccctccagggagatctcgcagtgtctggcgatattaaatgccctaaagtttccgttggggcacccgacctctcactggaggcttcagaggggtcaatcaagcttccaaagatgaaactcccacagtttggtatttctaccccgggaagtgatctgcacgtgaatgccaaggggcctcaggtgtcaggcgaactcaagggacctggggtggacgtgaacctaaagggccctcgaatttcagcccctaatgtggatttcaatttagagggacctaaggtgaaaggaagcctcggggctacaggtgagataaagggccctacggtcgggggtggattgcccggtatcggagtccagggcctcgaaggcaatttgcaaatgcctggaatcaagagctcaggctgtgacgtgaatctgccaggagttaatgtcaaactgccgacggggcagattagcggacctgaaatcaagggagggttgaaaggatccgaggtgggttttcacggagccgcacctgacatctcagtcaagggcccagcctttaacatggcttctccggaatccgacttcggaattaacttgaagggacctaagatcaagggcggtgctgatgtctctgggggtgtgagtgcccctgatatctcactgggtgaaggccatttgagcgtgaaaggctctggtggagagtggaagggcccacaggtgtccagtgctctgaacctcgacacttcaaaatttgctggtggtctccacttctcaggcccaaaagtggagggaggcgtcaagggagggcaaattggacttcaagcccctgggctttctgtgagcggtccccaaggtcacctggagtcaggaagcggcaaggtcactttcccaaagatgaagataccgaaattcacattttcaggacgcgaactcgtgggcagggagatgggggtcgacgtgcacttcccaaaggcagaggcctcaattcaagctggcgctggagacggtgagtgggaggagagcgaggtaaaattaaagaagtctaaaataaagatgcctaaattcaacttcagtaagcccaagggcaagggtggagtcaccgggagtccagaggctagcatcagtgggagcaagggggacctcaaatcctctaaagcttccttgggaagtctggaaggtgaggcagaagctgaagcctcgtcaccaaaagggaagttcagcctgttcaaatccaagaagccgagacaccgcagtaacagcttctctgacgagcgtgaattttcaggacccagcactcctacagggaccctggaatttgaaggcggagaggtttctctcgagggcggtaaagttaaagggaagcatggaaagctcaaatttggaacattcgggggactggggagtaagtcaaaaggccattatgaagttacggggagtgacgacgagacaggcaagctccaaggaagcggcgtctcactggcttccaaaaagtcaagactgtccagtagctctagcaatgatagcggcaacaaagtcggaattcaactcccagaggtcgaactatctgtatcaactaagaaggagtag

SEQ ID NO: 285051 - DNA, 435 bp, Artificial Sequence
  derived and/or modified sequence
atggaaaaggaagagacaaccagagagctgctgttgccaaattggcagggatcaggcagtcatgggttaactatagcacagagagatgacggtgtctttgtccaagaggtgacccagaatagcccggcagcacgcactggagttgtcaaggaaggcgaccagatagttggtgctaccatctacttcgataacctgcagtccggcgaggtcacgcagctgctgaataccatgggtcatcacactgtgggcctcaaactgcaccggaaaggggaccggagcccagaaccaggccagacatggacccgggaggtattttctagttgcagttctgaagtagtcttatcaggagatgatgaggagtatcagcgtatttatactacgaagatcaagccacggttgaagtcagaggatggggtggaaggggatttgggatag

SEQ ID NO: 285052 - DNA, 17673 bp, Artificial Sequence
  derived and/or modified sequence
atggagaaggaggagaccaccagagagctgctgctgcccaactggcagggcagcggcagccacggcctgaccatcgcccagagagacgacggcgtgttcgtgcaggaggtgacccagaacagccccgccgccagaaccggcgtggtgaaggagggcgaccagatcgtgggcgccaccatctacttcgacaacctgcagagcggcgaggtgacccagctgctgaacaccatgggccaccacaccgtgggcctgaagctgcacagaaagggcgacagaagccccgagcccggccagacctggaccagagaggtgttcagcagctgcagcagcgaggtggtgctgagcggcgacgacgaggagtaccagagaatctacaccaccaagatcaagcccagactgaagagcgaggacggcgtggagggcgacctgggcgagacccagagcagaaccatcaccgtgaccagaagagtgaccgcctacaccgtggacgtgaccggcagagagggcgccaaggacatcgacatcagcagccccgagttcaagatcaagatccccagacacgagctgaccgagatcagcaacgtggacgtggagacccagagcggcaagaccgtgatcagactgcccagcggcagcggcgccgccagccccaccggcagcgccgtggacatcagagccggcgccatcagcgccagcggccccgagctgcagggcgccggccacagcaagctgcaggtgaccatgcccggcatcaaggtgggcggcagcggcgtgaacgtgaacgccaagggcctggacctgggcggcagaggcggcgtgcaggtgcccgccgtggacatcagcagcagcctgggcggcagagccgtggaggtgcagggccccagcctggagagcggcgaccacggcaagatcaagttccccaccatgaaggtgcccaagttcggcgtgagcaccggcagagagggccagacccccaaggccggcctgagagtgagcgcccccgaggtgagcgtgggccacaagggcggcaagcccggcctgaccatccaggccccccagctggaggtgagcgtgcccagcgccaacatcgagggcctggagggcaagctgaagggcccccagatcaccggccccagcctggagggcgacctgggcctgaagggcgccaagccccagggccacatcggcgtggacgccagcgccccccagatcggcggcagcatcaccggccccagcgtggaggtgcaggcccccgacatcgacgtgcagggccccggcagcaagctgaacgtgcccaagatgaaggtgcccaagttcagcgtgagcggcgccaagggcgaggagaccggcatcgacgtgaccctgcccaccggcgaggtgaccgtgcccggcgtgagcggcgacgtgagcctgcccgagatcgccaccggcggcctggagggcaagatgaagggcaccaaggtgaagacccccgagatgatcatccagaagcccaagatcagcatgcaggacgtggacctgagcctgggcagccccaagctgaagggcgacatcaaggtgagcgcccccggcgtgcagggcgacgtgaagggcccccaggtggccctgaagggcagcagagtggacatcgagacccccaacctggagggcaccctgaccggccccagactgggcagccccagcggcaagaccggcacctgcagaatcagcatgagcgaggtggacctgaacgtggccgcccccaaggtgaagggcggcgtggacgtgaccctgcccagagtggagggcaaggtgaaggtgcccgaggtggacgtgagaggccccaaggtggacgtgagcgcccccgacgtggaggcccacggccccgagtggaacctgaagatgcccaagatgaagatgcccaccttcagcacccccggcgccaagggcgagggccccgacgtgcacatgaccctgcccaagggcgacatcagcatcagcggccccaaggtgaacgtggaggcccccgacgtgaacctggagggcctgggcggcaagctgaagggccccgacgtgaagctgcccgacatgagcgtgaagacccccaagatcagcatgcccgacgtggacctgcacgtgaagggcaccaaggtgaagggcgagtacgacgtgaccgtgcccaagctggagggcgagctgaagggccccaaggtggacatcgacgcccccgacgtggacgtgcacggccccgactggcacctgaagatgcccaagatgaagatgcccaagttcagcgtgcccggcttcaaggccgagggccccgaggtggacgtgaacctgcccaaggccgacgtggacatcagcggccccaagatcgacgtgaccgcccccgacgtgagcatcgaggagcccgagggcaagctgaagggccccaagttcaagatgcccgagatgaacatcaaggtgcccaagatcagcatgcccgacgtggacctgcacctgaagggccccaacgtgaagggcgagtacgacgtgaccatgcccaaggtggagagcgagatcaaggtgcccgacgtggagctgaagagcgccaagatggacatcgacgtgcccgacgtggaggtgcagggccccgactggcacctgaagatgcccaagatgaagatgcccaagttcagcatgcccggcttcaaggccgagggccccgaggtggacgtgaacctgcccaaggccgacgtggacatcagcggccccaaggtgggcgtggaggtgcccgacgtgaacatcgagggccccgagggcaagctgaagggccccaagttcaagatgcccgagatgaacatcaaggcccccaagatcagcatgcccgacgtggacctgcacatgaagggccccaaggtgaagggcgagtacgacatgaccgtgcccaagctggagggcgacctgaagggccccaaggtggacgtgagcgcccccgacgtggagatgcagggccccgactggaacctgaagatgcccaagatcaagatgcccaagttcagcatgcccagcctgaagggcgagggccccgagttcgacgtgaacctgagcaaggccaacgtggacatcagcgcccccaaggtggacaccaacgcccccgacctgagcctggagggccccgagggcaagctgaagggccccaagttcaagatgcccgagatgcacttcagagcccccaagatgagcctgcccgacgtggacctggacctgaagggccccaagatgaagggcaacgtggacatcagcgcccccaagatcgagggcgagatgcaggtgcccgacgtggacatcagaggccccaaggtggacatcaaggcccccgacgtggagggccagggcctggactggagcctgaagatccccaagatgaagatgcccaagttcagcatgcccagcctgaagggcgagggccccgaggtggacgtgaacctgcccaaggccgacgtggtggtgagcggccccaaggtggacatcgaggcccccgacgtgagcctggagggccccgagggcaagctgaagggccccaagttcaagatgcccgagatgcacttcaagacccccaagatcagcatgcccgacgtggacctgcacctgaagggccccaaggtgaagggcgacgtggacgtgagcgtgcccaaggtggagggcgagatgaaggtgcccgacgtggagatcaagggccccaagatggacatcgacgcccccgacgtggaggtgcagggccccgactggcacctgaagatgcccaagatgaagatgcccaagttcagcatgcccggcttcaagggcgagggcagagaggtggacgtgaacctgcccaaggccgacatcgacgtgagcggccccaaggtggacgtggaggtgcccgacgtgagcctggagggccccgagggcaagctgaagggccccaagttcaagatgcccgagatgcacttcaaggcccccaagatcagcatgcccgacgtggacctgaacctgaagggccccaagctgaagggcgacgtggacgtgagcctgcccgaggtggagggcgagatgaaggtgcccgacgtggacatcaagggccccaaggtggacatcagcgcccccgacgtggacgtgcacggccccgactggcacctgaagatgcccaaggtgaagatgcccaagttcagcatgcccggcttcaagggcgagggccccgaggtggacgtgaagctgcccaaggccgacgtggacgtgagcggccccaagatggacgccgaggtgcccgacgtgaacatcgagggccccgacgccaagctgaagggccccaagttcaagatgcccgagatgagcatcaagccccagaagatcagcatccccgacgtgggcctgcacctgaagggccccaagatgaagggcgactacgacgtgaccgtgcccaaggtggagggcgagatcaaggcccccgacgtggacatcaagggccccaaggtggacatcaacgcccccgacgtggaggtgcacggccccgactggcacctgaagatgcccaaggtgaagatgcccaagttcagcatgcccggcttcaagggcgagggccccgaggtggacatgaacctgcccaaggccgacctgggcgtgagcggccccaaggtggacatcgacgtgcccgacgtgaacctggaggcccccgagggcaagctgaagggccccaagttcaagatgcccagcatgaacatccagacccacaagatcagcatgcccgacgtgggcctgaacctgaaggcccccaagctgaagaccgacgtggacgtgagcctgcccaaggtggagggcgacctgaagggccccgagatcgacgtgaaggcccccaagatggacgtgaacgtgggcgacatcgacatcgagggccccgagggcaagctgaagggccccaagttcaagatgcccgagatgcacttcaaggcccccaagatcagcatgcccgacgtggacctgcacctgaagggccccaaggtgaagggcgacatggacgtgagcgtgcccaaggtggagggcgagatgaaggtgcccgacgtggacatcaagggccccaaggtggacatcgacgcccccgacgtggaggtgcacgaccccgactggcacctgaagatgcccaagatgaagatgcccaagttcagcatgcccggcttcaaggccgagggccccgaggtggacgtgaacctgcccaaggccgacatcgacgtgagcggccccagcgtggacaccgacgcccccgacctggacatcgagggccccgagggcaagctgaagggcagcaagttcaagatgcccaagctgaacatcaaggcccccaaggtgagcatgcccgacgtggacctgaacctgaagggccccaagctgaagggcgagatcgacgccagcgtgcccgagctggagggcgacctgagaggcccccaggtggacgtgaagggccccttcgtggaggccgaggtgcccgacgtggacctggagtgccccgacgccaagctgaagggccccaagttcaagatgcccgagatgcacttcaaggcccccaagatcagcatgcccgacgtggacctgcacctgaagggccccaaggtgaagggcgacgccgacgtgagcgtgcccaagctggagggcgacctgaccggccccagcgtgggcgtggaggtgcccgacgtggagctggagtgccccgacgccaagctgaagggccccaagttcaagatgcccgacatgcacttcaaggcccccaagatcagcatgcccgacgtggacctgcacctgaagggccccaaggtgaagggcgacgtggacgtgagcgtgcccaagctggagggcgacctgaccggccccagcgtgggcgtggaggtgcccgacgtggagctggagtgccccgacgccaagctgaagggccccaagttcaagatgcccgagatgcacttcaagacccccaagatcagcatgcccgacgtggacctgcacctgaagggccccaaggtgaagggcgacatggacgtgagcgtgcccaaggtggagggcgagatgaaggtgcccgacgtggacatcaagggccccaagatggacatcgacgcccccgacgtggacgtgcacggccccgactggcacctgaagatgcccaagatgaagatgcccaagttcagcatgcccggcttcaaggccgagggccccgaggtggacgtgaacctgcccaaggccgacgtggtggtgagcggccccaaggtggacgtggaggtgcccgacgtgagcctggagggccccgagggcaagctgaagggccccaagctgaagatgcccgagatgcacttcaaggcccccaagatcagcatgcccgacgtggacctgcacctgaagggccccaaggtgaagggcgacgtggacgtgagcctgcccaagctggagggcgacctgaccggccccagcgtggacgtggaggtgcccgacgtggagctggagtgccccgacgccaagctgaagggccccaagttcaagatgcccgagatgcacttcaagacccccaagatcagcatgcccgacgtgaacctgaacctgaagggccccaaggtgaagggcgacatggacgtgagcgtgcccaaggtggagggcgagatgaaggtgcccgacgtggacatcagaggccccaaggtggacatcgacgcccccgacgtggacgtgcacggccccgactggcacctgaagatgcccaagatgaagatgcccaagttcagcatgcccggcttcaagggcgagggccccgaggtggacgtgaacctgcccaaggccgacgtggacgtgagcggccccaaggtggacgtggaggtgcccgacgtgagcctggagggccccgagggcaagctgaagggccccaagttcaagatgcccgagatgcacttcaagacccccaagatcagcatgcccgacgtggacttcaacctgaagggccccaagatcaagggcgacgtggacgtgagcgcccccaagctggagggcgagctgaagggccccgagctggacgtgaagggccccaagctggacgccgacatgcccgaggtggccgtggagggccccaacggcaagtggaagacccccaagttcaagatgcccgacatgcacttcaaggcccccaagatcagcatgcccgacctggacctgcacctgaagagccccaaggccaagggcgaggtggacgtggacgtgcccaagctggagggcgacctgaagggcccccacgtggacgtgagcggccccgacatcgacatcgagggccccgagggcaagctgaagggccccaagttcaagatgcccgacatgcacttcaaggcccccaacatcagcatgcccgacgtggacctgaacctgaagggccccaagatcaagggcgacgtggacgtgagcgtgcccgaggtggagggcaagctggaggtgcccgacatgaacatcagaggccccaaggtggacgtgaacgcccccgacgtgcaggcccccgactggcacctgaagatgcccaagatgaagatgcccaagttcagcatgcccggcttcaaggccgagggccccgaggtggacgtgaacctgcccaaggccgacgtggacatcagcggccccaaggtggacatcgagggccccgacgtgaacatcgagggccccgagggcaagctgaagggccccaagctgaagatgcccgagatgaacatcaaggcccccaagatcagcatgcccgacttcgacctgcacctgaagggccccaaggtgaagggcgacgtggacgtgagcctgcccaaggtggagggcgacctgaagggccccgaggtggacatcaagggccccaaggtggacatcaacgcccccgacgtgggcgtgcagggccccgactggcacctgaagatgcccaaggtgaagatgcccaagttcagcatgcccggcttcaagggcgagggccccgacggcgacgtgaagctgcccaaggccgacatcgacgtgagcggccccaaggtggacatcgagggccccgacgtgaacatcgagggccccgagggcaagctgaagggccccaagttcaagatgcccgagatgaacatcaaggcccccaagatcagcatgcccgacatcgacctgaacctgaagggccccaaggtgaagggcgacgtggacgtgagcctgcccaaggtggagggcgacctgaagggccccgaggtggacatcaagggccccaaggtggacatcgacgcccccgacgtggacgtgcacggccccgactggcacctgaagatgcccaagatcaagatgcccaagatcagcatgcccggcttcaagggcgagggccccgacgtggacgtgaacctgcccaaggccgacatcgacgtgagcggccccaaggtggacgtggagtgccccgacgtgaacatcgagggccccgagggcaagtggaagagccccaagttcaagatgcccgagatgcacttcaagacccccaagatcagcatgcccgacatcgacctgaacctgaccggccccaagatcaagggcgacgtggacgtgaccggccccaaggtggagggcgacctgaagggccccgaggtggacctgaagggccccaaggtggacatcgacgtgcccgacgtgaacgtgcagggccccgactggcacctgaagatgcccaagatgaagatgcccaagttcagcatgcccggcttcaaggccgagggccccgaggtggacgtgaacctgcccaaggccgacgtggacgtgagcggccccaaggtggacgtggagggccccgacgtgaacatcgagggccccgagggcaagctgaagggccccaagttcaagatgcccgagatgaacatcaaggcccccaagatccccatgcccgacttcgacctgcacctgaagggccccaaggtgaagggcgacgtggacatcagcctgcccaaggtggagggcgacctgaagggccccgaggtggacatcagaggcccccaggtggacatcgacgtgcccgacgtgggcgtgcagggccccgactggcacctgaagatgcccaaggtgaagatgcccaagttcagcatgcccggcttcaagggcgagggccccgacgtggacgtgaacctgcccaaggccgacctggacgtgagcggccccaaggtggacatcgacgtgcccgacgtgaacatcgagggccccgagggcaagctgaagggccccaagttcaagatgcccgagatgaacatcaaggcccccaagatcagcatgcccgacatcgacctgaacctgaagggccccaaggtgaagggcgacatggacgtgagcctgcccaaggtggagggcgacatgaaggtgcccgacgtggacatcaagggccccaaggtggacatcaacgcccccgacgtggacgtgcagggccccgactggcacctgaagatgcccaagatcaagatgcccaagatcagcatgcccggcttcaagggcgagggccccgaggtggacgtgaacctgcccaaggccgacctggacgtgagcggccccaaggtggacgtggacgtgcccgacgtgaacatcgagggccccgacgccaagctgaagggccccaagttcaagatgcccgagatgaacatcaaggcccccaagatcagcatgcccgacctggacctgaacctgaagggccccaagatgaagggcgaggtggacgtgagcctggccaacgtggagggcgacctgaagggccccgccctggacatcaagggccccaagatcgacgtggacgcccccgacatcgacatccacggccccgacgccaagctgaagggccccaagctgaagatgcccgacatgcacgtgaacatgcccaagatcagcatgcccgagatcgacctgaacctgaagggcagcaagctgaagggcgacgtggacgtgagcggccccaagctggagggcgacatcaaggcccccagcctggacatcaagggccccgaggtggacgtgagcggccccaagctgaacatcgagggcaagagcaagaagagcagattcaagctgcccaagttcaacttcagcggcagcaaggtgcagacccccgaggtggacgtgaagggcaagaagcccgacatcgacatcaccggccccaaggtggacatcaacgcccccgacgtggaggtgcagggcaaggtgaagggcagcaagttcaagatgcccttcctgagcatcagcagccccaaggtgagcatgcccgacgtggagctgaacctgaagagccccaaggtgaagggcgacctggacatcgccggccccaacctggagggcgacttcaagggccccaaggtggacatcaaggcccccgaggtgaacctgaacgcccccgacgtggacgtgcacggccccgactggaacctgaagatgcccaagatgaagatgcccaagttcagcgtgagcggcctgaaggccgagggccccgacgtggccgtggacctgcccaagggcgacatcaacatcgagggccccagcatgaacatcgagggccccgacctgaacgtggagggccccgagggcggcctgaagggccccaagttcaagatgcccgacatgaacatcaaggcccccaagatcagcatgcccgacatcgacctgaacctgaagggccccaaggtgaagggcgacgtggacatcagcctgcccaagctggagggcgacctgaagggccccgaggtggacatcaagggccccaaggtggacatcaacgcccccgacgtggacgtgcacggccccgactggcacctgaagatgcccaaggtgaagatgcccaagttcagcatgcccggcttcaagggcgagggccccgaggtggacgtgaccctgcccaaggccgacatcgacatcagcggccccaacgtggacgtggacgtgcccgacgtgaacatcgagggccccgacgccaagctgaagggccccaagttcaagatgcccgagatgaacatcaaggcccccaagatcagcatgcccgacttcgacctgaacctgaagggccccaagatgaagggcgacgtggtggtgagcctgcccaaggtggagggcgacctgaagggccccgaggtggacatcaagggccccaaggtggacatcgacacccccgacatcaacatcgagggcagcgagggcaagttcaagggccccaagttcaagatccccgagatgcacctgaaggcccccaagatcagcatgcccgacatcgacctgaacctgaagggccccaaggtgaagggcgacgtggacgtgagcctgcccaagatggagggcgacctgaagggccccgaggtggacatcaagggccccaaggtggacatcaacgcccccgacgtggacgtgcagggccccgactggcacctgaagatgcccaaggtgaagatgcccaagttcagcatgcccggcttcaagggcgagggccccgacgtggacgtgaacctgcccaaggccgacctggacgtgagcggccccaaggtggacatcgacgtgcccgacgtgaacatcgagggccccgagggcaagctgaagggccccaagttcaagatgcccgagatgaacatcaaggcccccaagatcagcatgcccgacatcgacctgaacctgaagggccccaaggtgaagggcgacatggacgtgagcctgcccaaggtggagggcgacatgcaggtgcccgacctggacatcaagggccccaaggtggacatcaacgcccccgacgtggacgtgagaggccccgactggcacctgaagatgcccaagatcaagatgcccaagatcagcatgcccggcttcaagggcgagggccccgaggtggacgtgaacctgcccaaggccgacctggacgtgagcggccccaaggtggacgtggacgtgcccgacgtgaacatcgagggccccgacgccaagctgaagggccccaagttcaagatgcccgagatgaacatcaaggcccccaagatcagcatgcccgacttcgacctgcacctgaagggccccaaggtgaagggcgacgtggacgtgagcctgcccaagatggagggcgacctgaaggcccccgaggtggacatcaagggccccaaggtggacatcgacgcccccgacgtggacgtgcacggccccgactggcacctgaagatgcccaaggtgaagatgcccaagttcagcatgcccggcttcaagggcgagggccccgaggtggacgtgaacctgcccaaggccgacatcgacgtgagcggccccaaggtggacatcgacacccccgacatcgacatccacggccccgagggcaagctgaagggccccaagttcaagatgcccgacctgcacctgaaggcccccaagatcagcatgcccgaggtggacctgaacctgaagggccccaagatgaagggcgacgtggacgtgagcctgcccaaggtggagggcgacctgaagggccccgaggtggacatcaagggccccaaggtggacatcgacgtgcccgacgtggacgtgcagggccccgactggcacctgaagatgcccaaggtgaagatgcccaagttcagcatgcccggcttcaagggcgagggccccgacgtggacgtgaacctgcccaaggccgacctggacgtgagcggccccaaggtggacatcgacgtgcccgacgtgaacatcgagggccccgacgccaagctgaagggccccaagttcaagatgcccgagatgaacatcaaggcccccaagatcagcatgcccgacttcgacctgcacctgaagggccccaaggtgaagggcgacgtggacgtgagcctgcccaaggtggagggcgacctgaagggccccgaggtggacatcaagggccccaaggtggacatcgacgcccccgacgtggacgtgcacggccccgactggcacctgaagatgcccaaggtgaagatgcccaagttcagcatgcccggcttcaagggcgagggccccgacgtggacgtgaccctgcccaaggccgacatcgagatcagcggccccaaggtggacatcgacgcccccgacgtgagcatcgagggccccgacgccaagctgaagggccccaagttcaagatgcccgagatgaacatcaaggcccccaagatcagcatgcccgacatcgacttcaacctgaagggccccaaggtgaagggcgacgtggacgtgagcctgcccaaggtggagggcgacctgaagggccccgagatcgacatcaagggccccagcctggacatcgacacccccgacgtgaacatcgagggccccgagggcaagctgaagggccccaagttcaagatgcccgagatgaacatcaaggcccccaagatcagcatgcccgacttcgacctgcacctgaagggccccaaggtgaagggcgacgtggacgtgagcctgcccaaggtggagagcgacctgaagggccccgaggtggacatcgagggccccgagggcaagctgaagggccccaagttcaagatgcccgacgtgcacttcaagagcccccagatcagcatgagcgacatcgacctgaacctgaagggccccaagatcaagggcgacatggacatcagcgtgcccaagctggagggcgacctgaagggccccaaggtggacgtgaagggccccaaggtgggcatcgacacccccgacatcgacatccacggccccgagggcaagctgaagggccccaagttcaagatgcccgacctgcacctgaaggcccccaagatcagcatgcccgaggtggacctgaacctgaagggccccaaggtgaagggcgacatggacatcagcctgcccaaggtggagggcgacctgaagggccccgaggtggacatcagagaccccaaggtggacatcgacgtgcccgacgtggacgtgcagggccccgactggcacctgaagatgcccaaggtgaagatgcccaagttcagcatgcccggcttcaagggcgagggccccgacgtggacgtgaacctgcccaaggccgacatcgacgtgagcggccccaaggtggacgtggacgtgcccgacgtgaacatcgagggccccgacgccaagctgaagggccccaagttcaagatgcccgagatgagcatcaaggcccccaagatcagcatgcccgacatcgacctgaacctgaagggccccaaggtgaagggcgacgtggacgtgaccctgcccaaggtggagggcgacctgaagggccccgaggccgacatcaagggccccaaggtggacatcaacacccccgacgtggacgtgcacggccccgactggcacctgaagatgcccaaggtgaagatgcccaagttcagcatgcccggcttcaagggcgagggccccgacgtggacgtgagcctgcccaaggccgacatcgacgtgagcggccccaaggtggacgtggacatccccgacgtgaacatcgagggccccgacgccaagctgaagggccccaagttcaagatgcccgagatcaacatcaaggcccccaagatcagcatccccgacgtggacctggacctgaagggccccaaggtgaagggcgacttcgacgtgagcgtgcccaaggtggagggcaccctgaagggccccgaggtggacctgaagggccccagactggacttcgagggccccgacgccaagctgagcggccccagcctgaagatgcccagcctggagatcagcgcccccaaggtgaccgcccccgacgtggacctgcacctgaaggcccccaagatcggcttcagcggccccaagctggagggcggcgaggtggacctgaagggccccaaggtggaggcccccagcctggacgtgcacatggacagccccgacatcaacatcgagggccccgacgtgaagatccccaagttcaagaagcccaagttcggcttcggcgccaagagccccaaggccgacatcaagagccccagcctggacgtgaccgtgcccgaggccgagctgaacctggagacccccgagatcagcgtgggcggcaagggcaagaagagcaagttcaagatgcccaagatccacatgagcggccccaagatcaaggccaagaagcagggcttcgacctgaacgtgcccggcggcgagatcgacgccagcctgaaggcccccgacgtggacgtgaacatcgccggccccgacgccgccctgaaggtggacgtgaagagccccaagaccaagaagaccatgttcggcaagatgtacttccccgacgtggagttcgacatcaagagccccaagttcaaggccgaggcccccctgcccagccccaagctggagggcgagctgcaggcccccgacctggagctgagcctgcccgccatccacgtggagggcctggacatcaaggccaaggcccccaaggtgaagatgcccgacgtggacatcagcgtgcccaagatcgagggcgacctgaagggccccaaggtgcaggccaacctgggcgcccccgacatcaacatcgagggcctggacgccaaggtgaagacccccagcttcggcatcagcgccccccaggtgagcatccccgacgtgaacgtgaacctgaagggccccaagatcaagggcgacgtgcccagcgtgggcctggagggccccgacgtggacctgcagggccccgaggccaagatcaagttccccaagttcagcatgcccaagatcggcatccccggcgtgaagatggagggcggcggcgccgaggtgcacgcccagctgcccagcctggagggcgacctgagaggccccgacgtgaagctggagggccccgacgtgagcctgaagggccccggcgtggacctgcccagcgtgaacctgagcatgcccaaggtgagcggccccgacctggacctgaacctgaagggccccagcctgaagggcgacctggacgccagcgtgcccagcatgaaggtgcacgcccccggcctgaacctgagcggcgtgggcggcaagatgcaggtgggcggcgacggcgtgaaggtgcccggcatcgacgccaccaccaagctgaacgtgggcgcccccgacgtgaccctgagaggccccagcctgcagggcgacctggccgtgagcggcgacatcaagtgccccaaggtgagcgtgggcgcccccgacctgagcctggaggccagcgagggcagcatcaagctgcccaagatgaagctgccccagttcggcatcagcacccccggcagcgacctgcacgtgaacgccaagggcccccaggtgagcggcgagctgaagggccccggcgtggacgtgaacctgaagggccccagaatcagcgcccccaacgtggacttcaacctggagggccccaaggtgaagggcagcctgggcgccaccggcgagatcaagggccccaccgtgggcggcggcctgcccggcatcggcgtgcagggcctggagggcaacctgcagatgcccggcatcaagagcagcggctgcgacgtgaacctgcccggcgtgaacgtgaagctgcccaccggccagatcagcggccccgagatcaagggcggcctgaagggcagcgaggtgggcttccacggcgccgcccccgacatcagcgtgaagggccccgccttcaacatggccagccccgagagcgacttcggcatcaacctgaagggccccaagatcaagggcggcgccgacgtgagcggcggcgtgagcgcccccgacatcagcctgggcgagggccacctgagcgtgaagggcagcggcggcgagtggaagggcccccaggtgagcagcgccctgaacctggacaccagcaagttcgccggcggcctgcacttcagcggccccaaggtggagggcggcgtgaagggcggccagatcggcctgcaggcccccggcctgagcgtgagcggcccccagggccacctggagagcggcagcggcaaggtgaccttccccaagatgaagatccccaagttcaccttcagcggcagagagctggtgggcagagagatgggcgtggacgtgcacttccccaaggccgaggccagcatccaggccggcgccggcgacggcgagtgggaggagagcgaggtgaagctgaagaagagcaagatcaagatgcccaagttcaacttcagcaagcccaagggcaagggcggcgtgaccggcagccccgaggccagcatcagcggcagcaagggcgacctgaagagcagcaaggccagcctgggcagcctggagggcgaggccgaggccgaggccagcagccccaagggcaagttcagcctgttcaagagcaagaagcccagacacagaagcaacagcttcagcgacgagagagagttcagcggccccagcacccccaccggcaccctggagttcgagggcggcgaggtgagcctggagggcggcaaggtgaagggcaagcacggcaagctgaagttcggcaccttcggcggcctgggcagcaagagcaagggccactacgaggtgaccggcagcgacgacgagaccggcaagctgcagggcagcggcgtgagcctggccagcaagaagagcagactgagcagcagcagcagcaacgacagcggcaacaaggtgggcatccagctgcccgaggtggagctgagcgtgagcaccaagaaggagtag

SEQ ID NO: 285053 - DNA, 435 bp, Artificial Sequence
  derived and/or modified sequence
atggagaaggaggagaccaccagagagctgctgctgcccaactggcagggcagcggcagccacggcctgaccatcgcccagagagacgacggcgtgttcgtgcaggaggtgacccagaacagccccgccgccagaaccggcgtggtgaaggagggcgaccagatcgtgggcgccaccatctacttcgacaacctgcagagcggcgaggtgacccagctgctgaacaccatgggccaccacaccgtgggcctgaagctgcacagaaagggcgacagaagccccgagcccggccagacctggaccagagaggtgttcagcagctgcagcagcgaggtggtgctgagcggcgacgacgaggagtaccagagaatctacaccaccaagatcaagcccagactgaagagcgaggacggcgtggagggcgacctgggctag

SEQ ID NO: 285054 - protein, 123 aa, Artificial Sequence
  derived and/or modified sequence
MEKEETTRELLLPNWQGSGSHGLTIAQRDDGVFVQEVTQNSPAARTGVVKEGDQIVGATIYFDNLQSGEVTQLLNTMGHHTVGLKLHRKGDRSPEPGQTWTREVFSSCSSEVVLSGDDEEYQR

SEQ ID NO: 285055 - protein, 144 aa, Artificial Sequence
  derived and/or modified sequence
MEKEETTRELLLPNWQGSGSHGLTIAQRDDGVFVQEVTQNSPAARTGVVKEGDQIVGATIYFDNLQSGEVTQLLNTMGHHTVGLKLHRKGDRSPEPGQTWTREVFSSCSSEVVLSGDDEEYQRIYTTKIKPRLKSEDGVEGDLG

SEQ ID NO: 285056 - protein, 462 aa, Artificial Sequence
  derived and/or modified sequence
MSEGVDLIDIYADEEFNQDPEFNNTDQIDLYDDVLTATSQPSDDRSSSTEPPPPVRQEPSPKPNNKTPAILYTYSGLRNRRAAVYVGSFSWWTTDQQLIQVIRSIGVYDVVELKFAENRANGQSKGYAEVVVASENSVHKLLELLPGKVLNGEKVDVRPATRQNLSQFEAQARKRIPPRAHSRDSSDSADGRATPSENLVPSSARVDKPPSVLPYFNRPPSALPLMGLPPPPIPPPPPLSSSFGVPPPPPGIHYQHLMPPPPRLPPHLAVPPPGAIPPALHLNPAFFPPPNATVGPPPDTYMKASAPYNHHGSRDSGPPPSTVSEAEFEDIMKRNRAISSSAISKAVSGASAGDYSDAIETLLTAIAVIKQSRVANDERCRVLISSLKDCLHGIEAKSYSVGASGSSSRKRHRSRERSPSRSRESSRRHRDLLHNEDRHDDYFQERNREHERHRDRERDRHH

SEQ ID NO: 285057 - DNA, 727 bp, Artificial Sequence
  derived and/or modified sequence
ctgcgggcggagggagtcgcgggccttttgagggaggaggcagagcgcgccgggccggtggcatcttccttactttgtccatcctccggactcgcgatcttccttccggagccatgtcagaaggagtggacttgattgatatatatgctgacgaggagttcaaccaggacccagagttcaacaatacagatcagattgacctgtatgatgatgtgctgacagccacctcacagccctcagatgacagaagcagcagcactgaaccacctcctcctgttcgccaggagccatctcccaagcccaacaacaagacccctgcaattctgtatacctacagtggcctgcgtaatagacgagctgccgtttatgtgggcagcttctcctggtggaccacagaccagcagctgatccaggttattcgctctataggagtctatgatgtggtggagttgaaatttgcagagaatcgagcaaatggccagtccaaagggtatgctgaggtggtggtagcctctgaaaactctgtccacaaattgttggaactcctaccagggaaagttcttaatggagaaaaagtggacgtgaggccggccacccggcagaacctgtcacagtttgaggcacaggctcggaaacgaatacctccacgggcccattcccgagattctagtgattctgctgatggacgggccacaccctctgagaaccttgtaccctcatctgctcg

SEQ ID NO: 285058 - DNA, 3524 bp, Artificial Sequence
  derived and/or modified sequence
gcgtgtgacgccggcggcggggggggcgggacctggggcggagagcggttcgcgcgcttcgggcctagtccggactcgccgccgccgccgccatattcccgtggcatcttccttactttgtccatcctccggactcgcgatcttccttccggagccatgtcagaaggagtggacttgattgatatatatgctgacgaggagttcaaccaggacccagagttcaacaatacagatcagattgacctgtatgatgatgtgctgacagccacctcacagccctcagatgacagaagcagcagcactgaaccacctcctcctgttcgccaggagccatctcccaagcccaacaacaagacccctgcaattctgtatacctacagtggcctgcgtaatagacgagctgccgtttatgtgggcagcttctcctggtggaccacagaccagcagctgatccaggttattcgctctataggagtctatgatgtggtggagttgaaatttgcagagaatcgagcaaatggccagtccaaagggtatgctgaggtggtggtagcctctgaaaactctgtccacaaattgttggaactcctaccagggaaagttcttaatggagaaaaagtggacgtgaggccggccacccggcagaacctgtcacagtttgaggcacaggctcggaaacgaatacctccacgggcccattcccgagattctagtgattctgctgatggacgggccacaccctctgagaaccttgtaccctcatctgctcgtgtggataagccccccagtgtgctgccctacttcaatcgtcctccttcggcccttcccctgatgggtctgcccccaccaccaattccacccccaccacctctctcctcaagctttggggtccctcctcctcctcctggtatccactaccagcatctcatgcccccacctcctcgattacctcctcatcttgctgtacctccccctggggccatcccacctgcccttcacctcaatccagccttcttccccccaccaaacgctacagtggggcctccaccagatacttacatgaaggcctctgccccctataaccaccatggcagccgagattcgggccctccaccctctacagtgagtgaagccgaatttgaagatatcatgaagcgaaacagagcaatttccagcagtgccatttccaaagcagtatctggagccagtgcaggggattacagtgacgcaattgagacgctgctcacagccattgcggttatcaaacagtcccgggttgccaatgatgagcgttgccgtgtcctcatctcctctcttaaggactgtcttcatggcatcgaagccaagtcctacagtgtgggtgccagtgggagctcttccaggaaaagacatcgctcccgggaaaggtcacctagccggtcccgggagagcagcaggaggcaccgggatctgcttcataatgaagatcggcatgatgattatttccaagaaaggaaccgggagcatgagagacaccgggatagagaacgggaccggcaccactgagaaaggagtctggttggaagcaaatgtttttttaatggacttgcatctcctcaccttgatcaggactaaaggacggaggccgccccacccccttccctttcctccaaacccctaactccctccagacacccagggaataccctctgccccacaggattgaagactgcttggcagtcctcccaatcccacacctcctgtttgccaggggaaagaacctaaagacttcgtgtgattgggaggggtggcagacaggaagaaaacatgtccaggcccctggtctccatagagaatggtgctttgtccaagaaaacgtatgagtttctgattctccgggagccgttcaatggtgaggttgatgggaagacttccttcccaaagaaaatagatcctccatgcaggatctaggagagtgactgggtgtgccaaaatatgcccagggtcctgccctcagcactagatttaatggggccaagagggtccaaaccccttgctaacataccacttctttgtttaactcctttacctttccagccctttgaggagggaccatgagaacagaaattaccttatgaaaagctacttctgttcctgctttccctctcacgtattgacggtttatttctttgacctcccagagggctgaactctttcaactctgcgctgcccagccttctcagtggacttgcccctcctaagcagagaaggcctatgaggttgcttgctgctgggaagcctggcagagccaattaccaccctctgctgcttagtgcttgggtacctcttgcaataaccagctcttagttgttccctttccctggggcttttccatttaacacatggagcccttcccccagaaggctacttccttgttttagaggaaggtactgcccattgggagatggggacattgggacctcagcaatgaagaacccttgtgaagtaaccaggaggaatggggaaagaagcaagttgggcaggatatggcctacttccataggcttttcttttttcaggtttgatgtaagcatgggcttacatcccccaggtacatacttttacttattgtgggataacctggcactagtaggcaggtaaagtcacaaatttggtgtcttttcaccttttgactgttgacttaatagctcctctcactctgcctggagatacttcctgcctcagatgaggagccagaagaaacagagcccgacttgaatgaactcagctcagagttctaaggaccagcattctgggggccattttctctacaggcaaatggaattgcttttccataacatccaaattgtaatgtggttgctgctgaaggaggaggcagcagcgaggtcctgcggtacccatggggtgatgctacttctgcatgcatctacagggcatctgacacctaacatgagacgtggcatgtgagatgagacttggcatgtgagacatagggtcactagagacccttctgggtcagaggagagagactgaattggactaaacccgtcctctgttcccagcacgtttctcatatagccctcagtcactgagggagtcccccgcaggattggagaggcacattcccttgggacagaggctacaggttggagctttttttcccctgtcccccaaccccatccccacctccacttcagaacatggcaccccacccaactggccaagtgttaagtgatgtgcttattgagagcaactccgggtgtcttttaaaatgtagagaaaaggtgacagtttaaggaaaaatatatatagaataccagaaatgccgtttacccggagaatttttttctccccatttgttttgtttttactcaatgacaccatttttagttttatttcctgatagcaaaaggaaaaaaaacacccatccctcaaaaaggccaaggtcccgtccccctgttgtcggtgatttgtttgtctttctgataggttgaaaattgtgtaataaacttgatgacgctgtc

SEQ ID NO: 285059 - DNA, 1749 bp, Artificial Sequence
  derived and/or modified sequence
tccgaatcccgcagtggcatcttccttactttgtccatcctccggactcgcgatcttccttccggagccatgtcagaaggagtggacttgattgatatatatgctgacgaggagttcaaccaggacccagagttcaacaatacagatcagattgacctgtatgatgatgtgctgacagccacctcacagccctcagatgacagaagcagcagcactgaaccacctcctcctgttcgccaggagccatctcccaagcccaacaacaagacccctgcaattctgtatacctacagtggcctgcgtaatagacgagctgccgtttatgtgggcagcttctcctggtggaccacagaccagcagctgatccaggttattcgctctataggagtctatgatgtggtggagttgaaatttgcagagaatcgagcaaatggccagtccaaagggtatgctgaggtggtggtagcctctgaaaactctgtccacaaattgttggaactcctaccagggaaagttcttaatggagaaaaagtggacgtgaggccggccacccggcagaacctgtcacagtttgaggcacaggctcggaaacgaatacctccacgggcccattcccgagattctagtgattctgctgatggacgggccacaccctctgagaaccttgtaccctcatctgctcgtgtggataagccccccagtgtgctgccctacttcaatcgtcctccttcggcccttcccctgatgggtctgcccccaccaccaattccacccccaccacctctctcctcaagctttggggtccctcctcctcctcctggtatccactaccagcatctcatgcccccacctcctcgattacctcctcatcttgctgtacctccccctggggccatcccacctgcccttcacctcaatccagccttcttccccccaccaaacgctacagtggggcctccaccagatacttacatgaaggcctctgccccctataaccaccatggcagccgagattcgggccctccaccctctacagtgagtgaagccgaatttgaagatatcatgaagcgaaacagagcaatttccagcagtgccatttccaaagcagtatctggagccagtgcaggggattacagtgacgcaattgagacgctgctcacagccattgcggttatcaaacagtcccgggttgccaatgatgagcgttgccgtgtcctcatctcctctcttaaggactgtcttcatggcatcgaagccaagtcctacagtgtgggtgccagtgggagctcttccaggaaaagacatcgctcccgggaaaggtcacctagccggtcccgggagagcagcaggaggcaccgggatctgcttcataatgaagatcggcatgatgattatttccaagaaaggaaccgggagcatgagagacaccgggatagagaacgggaccggcaccactgagaaaggagtctggttggaagcaaatgtttttttaatggacttgcatctcctcaccttgatcaggactaaaggacggaggccgccccacccccttccctttcctccaaacccctaactccctccagacacccagggaataccctctgccccacaggattgaagactgcttggcagtcctcccaatcccacacctcctgtttgccaggggaaagaacctaaagacttcgtgtgattgggaggggtggcagacaggaagaaaacatgtccaggcccctggtctccatagagaat

SEQ ID NO: 285060 - DNA, 953 bp, Artificial Sequence
  derived and/or modified sequence
attcccggtaacgggggcgcgcggtcgggggcagtggcatcttccttactttgtccatcctccggactcgcgatcttccttccggagccatgtcagaaggagtggacttgattgatatatatgctgacgaggagttcaaccaggacccagagttcaacaatacagatcagattgacctgtatgatgatgtgctgacagccacctcacagccctcagatgacagaagcagcagcactgaaccacctcctcctgttcgccaggagccatctcccaagcccaacaacaagacccctgcaattctgtatacctacagtggcctgcgtaatagacgagctgccgtttatgtgggcagcttctcctggtggaccacagaccagcagctgatccaggttattcgctctataggagtctatgatgtggtggagttgaaatttgcagagaatcgagcaaatggccagtccaaagggtatgctgaggtggtggtagcctctgaaaactctgtccacaaattgttggaactcctaccagggaaagttcttaatggagaaaaagtggacgtgaggccggccacccggcagaacctgtcacagtttgaggcacaggctcggaaacgaatacctccacgggcccattcccgagattctagtgattctgctgatggacgggccacaccctctgagaaccttgtaccctcatctgctcgtgtggataagccccccagtgtgctgccctacttcaatcgtcctccttcggcccttcccctgatgggtctgcccccaccaccaattccacccccaccacctctctcctcaagctttggggtccctcctcctcctcctggtatccactaccagcatctcatgcccccacctcctcgattacctcctcatcttgctgtacctccccctggggccatcccacctgcccttcacctcaatccagccttcttcccc

SEQ ID NO: 285061 - DNA, 366 bp, Artificial Sequence
  derived and/or modified sequence
atgggcgtgcccgagatccccggcgagaagctggtgaccgagagaaacaagaagagactggagaaggagaagcacgagaagggcgcccagaagaccgactgccagaagaacctgggcaccgtgggcgccgtggccctggactgcaagggcaacgtggcctacgccaccagcaccggcggcatcgtgaacaagatggtgggcagagtgggcgacagcccctgcctgggcagaaccaagggctgcctgctgcccctgcccctgttcagcagaccccaggccttcctgaccctgtacagcctgcccctgagcgtgagctgctgcgtgcccttcctgctgctggtgcagctgcaggacgtgtgggagtag

SEQ ID NO: 285062 - DNA, 366 bp, Artificial Sequence
  derived and/or modified sequence
atgggtgtgcctgaaattcccggggaaaagttggtcactgaacgtaataaaaaaaggctggagaaggagaagcatgagaaaggggcccagaagaccgactgccagaagaatttgggaacagtgggggcagttgcccttgattgcaagggtaatgtcgcatatgccacaagcacagggggaattgtgaacaagatggtcgggcgggttggagactctccttgcctggggagaacaaaggggtgccttctgcccctaccccttttcagccgacctcaagctttcctcaccttatacagcctccccctgagcgtgtcttgctgtgtgccattcctccttttagtacagttacaggacgtctgggagtag

SEQ ID NO: 285063 - DNA, 366 bp, Artificial Sequence
  derived and/or modified sequence
atgggcgtgcctgagatccctggagagaagctggtgacagaaagaaacaagaagaggctggagaaggagaagcatgagaagggggcccagaagacagactgccagaagaacctgggcaccgtgggcgctgtggccctggactgcaagggaaatgtggcctatgccaccagcactggaggcatcgtgaacaagatggtgggccgggtgggggacagcccctgcctgggccgcaccaagggctgcctgctgcccctgcccctcttcagccggccccaggccttcctgaccctgtacagcctgcccctgtctgtgtcctgctgcgtgcccttcctgctgctggtgcagctgcaggatgtgtgggagtag

SEQ ID NO: 285064 - DNA, 366 bp, Artificial Sequence
  derived and/or modified sequence
atgggcgtgcccgagatccccggcgagaagctggtgaccgagcggaacaaaaagagactcgagaaggaaaaacacgaaaaaggagctcagaagacagattgccagaaaaacctcggaacggtgggcgctgtggccctcgactgcaagggcaatgttgcctacgcgaccagtacaggggggattgtcaataagatggtagggcgagtaggggatagtccctgtctggggcgcactaaaggatgtttgctacctctccctttattctcaagaccccaggccttcttgaccttgtattccctccctttatccgtgtcttgttgcgtgccttttctgctgttggtgcagctacaggacgtctgggagtag

SEQ ID NO: 285065 - DNA, 366 bp, Artificial Sequence
  derived and/or modified sequence
atgggagtccctgagatcccaggggaaaagctggtgaccgaacgaaacaagaagcgcttagagaaagagaagcacgagaaaggcgctcagaaaactgactgtcagaagaacctgggcacggtgggggcagtggcactggattgcaaaggaaacgttgcttatgctacgagtactggcggaatagttaacaaaatggttggcagggttggcgattccccttgcctgggacggaccaaaggctgtctgctgccgctgcccttgttttcaagacctcaggcattcctcacattgtattcgctgccattgtccgtcagttgttgcgttccttttctgcttctcgtgcaactacaggacgtgtgggaatag

SEQ ID NO: 285066 - DNA, 2049 bp, Artificial Sequence
  derived and/or modified sequence
tatgtgtttcctgtcctattccacaccctagagaatgaataccggccagctagtatctaaatttagaatggcagcaacgtgtcgggttttcggagtagagataaacaaaaccaggtgacatttccaagcctctcaaggaaaggggggaaaaaacctttctgggacttaattcagtgcacaaatgagatgaatgtgaacatcccacagttggcagacagtttatttgaaagaactactaatagtagttgggtggtggtcttcaaatctctcattacaactcatcatttgatggtgtatggaaatgagcgttttattcagtatttggcttcaagaaacacgttgtttaacttaagcaattttttggataaaagtggattgcaaggatatgacatgtctacatttattaggcggtatagtagatatttaaatgagaaagcagtttcatacagacaagttgcatttgatttcacaaaagtgaagagaggggctgatggagttatgagaacaatgaacacagaaaaactcctaaaaactgtaccaattattcagaatcagatggatgcacttcttgattttaatgttaatagcaatgaacttacaaatggggtaataaatgctgccttcatgctcctgttcaaagatgccattagactgtttgcagcatacaatgaaggaattattaatttgttggaaaaatattttgatatgaaaaagaaccaatgcaaagaaggtcttgacatctataagaagttcctaactaggatgacaagaatctcagagttcctcaaagttgcagagcaagttggaattgacagaggtgatataccagacctttcacaggcccctagcagtcttcttgatgctttggaacaacatttagcttccttggaaggaaagaaaatcaaagattctacagctgcaagcagggcaactacactttccaatgcagtgtcttccctggcaagcactggtctatctctgaccaaagtggatgaaagggaaaagcaggcagcattagaggaagaacaggcacgtttgaaagctttaaaggaacagcgcctaaaagaacttgcaaagaaacctcatacctctttaacaactgcagcctctcctgtatccacctcagcaggagggataatgactgcaccagccattgacatattttctacccctagttcttctaacagcacatcaaagctgcccaatgatctgcttgatttgcagcagccaacttttcacccatctgtacatcctatgtcaactgcttctcaggtagcaagtacatggggaggattcactccttctccagttgcacagccacacccttcagctggccttaatgttgactttgaatctgtgtttggaaataaatctacaaatgttattgtagattctgggggctttgatgaactaggtggacttctcaaaccaacagtggcctctcagaaccagaaccttcctgttgccaaactcccacctagcaagttagtatctgatgacttggattcatctttagccaaccttgtgggcaatcttggcatcggaaatggaaccactaagaatgatgtaaattggagtcaaccaggtgaaaagaagttaactgggggatctaactggcaaccaaaggttgcaccaacaaccgcttggaatgctgcaacaatggcaccccctgtaatggcctatcctgctactacaccaacaggcatgataggatatggaattcctccacaaatgggaagtgttcctgtaatgacgcaaccaaccttaatatacagccagcctgtcatgagacctccaaacccctttggccctgtatcaggagcacagatacagtttatgtaacttgatggaagaaaatggaattactccaaaaagacaagtgctcaagcagcaaaatccttacttccagcaaaatccaaactgctgtctcttaaatctcttaaactctcttcttccattagaatgctacaagtaactcagtgaaggcccatgaaggaaattgggactagtttataggagaacgtatcaatacagtttataaagccaaga

SEQ ID NO: 285067 - DNA, 1680 bp, Artificial Sequence
  derived and/or modified sequence
atggcccccaccctgcagcaggcctacagaagaagatggtggatggcctgcaccgccgtgctggagaacctgttcttcagcgccgtgctgctgggctggggcagcctgctgatcatcctgaagaacgagggcttctacagcagcacctgccccgccgagagcagcaccaacaccacccaggacgagcagagaagatggcccggctgcgaccagcaggacgagatgctgaacctgggcttcaccatcggcagcttcgtgctgagcgccaccaccctgcccctgggcatcctgatggacagattcggccccagacccgtgagactggtgggcagcgcctgcttcaccgccagctgcaccctgatggccctggccagcagagacgtggaggccctgagccccctgatcttcctggccctgagcctgaacggcttcggcggcatctgcctgaccttcaccagcctgaccctgcccaacatgttcggcaacctgagaagcaccctgatggccctgatgatcggcagctacgccagcagcgccatcaccttccccggcatcaagctgatctacgacgccggcgtggccttcgtggtgatcatgttcacctggagcggcctggcctgcctgatcttcctgaactgcaccctgaactggcccatcgaggccttccccgcccccgaggaggtgaactacaccaagaagatcaagctgagcggcctggccctggaccacaaggtgaccggcgacctgttctacacccacgtgaccaccatgggccagagactgagccagaaggcccccagcctggaggacggcagcgacgccttcatgagcccccaggacgtgagaggcaccagcgagaacctgcccgagagaagcgtgcccctgagaaagagcctgtgcagccccaccttcctgtggagcctgctgaccatgggcatgacccagctgagaatcatcttctacatggccgccgtgaacaagatgctggagtacctggtgaccggcggccaggagcacgagaccaacgagcagcagcagaaggtggccgagaccgtgggcttctacagcagcgtgttcggcgccatgcagctgctgtgcctgctgacctgccccctgatcggctacatcatggactggagaatcaaggactgcgtggacgcccccacccagggcaccgtgctgggcgacgccagagacggcgtggccaccaagagcatcagacccagatactgcaagatccagaagctgaccaacgccatcagcgccttcaccctgaccaacctgctgctggtgggcttcggcatcacctgcctgatcaacaacctgcacctgcagttcgtgaccttcgtgctgcacaccatcgtgagaggcttcttccacagcgcctgcggcagcctgtacgccgccgtgttccccagcaaccacttcggcaccctgaccggcctgcagagcctgatcagcgccgtgttcgccctgctgcagcagcccctgttcatggccatggtgggccccctgaagggcgagcccttctgggtgaacctgggcctgctgctgttcagcctgctgggcttcctgctgcccagctacctgttctactacagagccagactgcagcaggagtacgccgccaacggcatgggccccctgaaggtgctgagcggcagcgaggtgaccgcctag

SEQ ID NO: 285068 - DNA, 1680 bp, Artificial Sequence
  derived and/or modified sequence
atggcccctaccctgcagcaagcatatcgtcgccggtggtggatggcctgtacagcagtgcttgagaacctgttcttcagcgcggtgcttctgggctggggcagtctgctgatcatccttaaaaatgaaggcttttattcttctacctgtcccgcagaatccagcacgaacaccacccaggacgagcaacgcaggtggccggggtgcgaccagcaagacgagatgctgaatctaggatttactattgggagctttgttctgtcagccacgactttgccattaggaattctgatggacaggttcggtccacgacccgtgaggcttgtaggatctgcctgtttcacggccagctgcaccctgatggctctggcctccagggacgtggaggccctttctccactcattttcctggcactatccctgaacggtttcggcggtatatgcttgacttttacaagtctgaccttgcctaatatgtttgggaacctgaggtccaccctgatggcacttatgattggctcctacgcaagttccgccattacctttcctggtatcaaactcatatacgatgccggtgttgctttcgtcgtgatcatgtttacatggagcggcttggcctgcctaatttttctcaactgcacccttaattggcccatcgaagcatttcctgctccagaagaggttaattacacaaagaaaattaaactgtcggggctggcgctggatcacaaagtgaccggcgatctcttttacacccatgtgaccacgatggggcagcggctctctcagaaggcaccgtccctcgaggacggcagcgatgcctttatgagcccacaggacgtgaggggtacatccgaaaaccttcccgagcgcagcgtccctctgagaaagtccctgtgcagtcctaccttcctgtggtcactgttaaccatgggtatgacgcagctgcggatcatcttctacatggccgccgtaaacaagatgctggaatacctggtcacaggcggtcaggaacacgagacaaatgagcagcagcagaaggttgcagaaaccgtgggattctacagcagcgtcttcggggcaatgcagctgttatgtctccttacttgccctctcattggatacataatggattggagaatcaaagactgcgtggatgcccctacacagggtaccgtactgggcgacgcgcgcgacggagtcgccacgaaatccataaggccgcgctattgcaagattcagaaactgacgaacgcaatttctgcctttacacttaccaatcttcttttagtgggtttcggaattacgtgccttatcaacaacttacatctccaatttgtgacctttgtactgcacaccatagtaagaggttttttccatagcgcctgtggtagcctgtatgcagctgtttttcccagcaaccatttcggaaccttgacgggactgcagagccttatatcggccgtcttcgccctattgcaacagccactttttatggccatggtgggacctttgaagggcgaaccattctgggtgaatctggggctgctgctcttttcacttctgggttttttgctaccctcctacctgttctactatcgggcacgactgcagcaggagtatgccgctaacggcatggggccccttaaggtgttgagcgggtctgaggtcaccgcgtag

SEQ ID NO: 285069 - DNA, 1680 bp, Artificial Sequence
  derived and/or modified sequence
atggcccctacacttcagcaggcatatagaaggcgctggtggatggcctgcaccgctgtgctggaaaacctgtttttcagtgcagtcctgctgggttggggttcgttattgatcatccttaaaaacgaagggttctactcctccacctgtcccgcagaatcatcgacaaataccacacaagacgagcaacggaggtggccaggctgtgaccagcaggatgagatgctgaatttaggcttcacaattgggagtttcgtccttagtgccacgacgctgcccctggggatcctgatggaccgcttcgggcctagacctgtgagattagtagggtctgcctgttttaccgcgtcttgtacgctgatggctctcgcctcccgggacgtggaagctctcagccctctcatttttctggcgctcagcctgaacggttttggcgggatctgcctgacgttcacctcactgaccttgccgaacatgtttggtaacctgcgcagcacattaatggcgcttatgatcgggagctacgcttcatcggctatcaccttcccaggcattaaactcatttacgacgctggggtggcgttcgtggtcattatgttcacttggtctggactcgcatgtttgatctttttgaactgcacccttaactggccaattgaggcatttcctgctccggaagaggtgaattacaccaagaaaatcaaattatcagggttagctctagaccataaggtcactggtgaccttttctatacacatgttacgacaatgggtcagcgtctctctcagaaggcaccatctctggaggatggtagcgatgccttcatgtccccccaggacgtgcgggggacctctgaaaatttacccgaacgttctgtccccttgcggaaatcactttgctcgcctacttttctttggtccttgctaacaatggggatgacgcagttgcggatcatattttatatggccgctgtcaacaaaatgctggagtacctggtcactgggggccaagagcacgaaactaacgaacaacaacagaaagttgcggagaccgtggggttctattctagtgtcttcggagctatgcagctgttgtgtcttttgacatgcccgctgatcggctacatcatggattggcgtattaaagactgcgtggatgcccccacccagggaaccgtcttgggcgacgcaagggatggggtagccacaaagtcaatacggcccaggtattgcaagatccagaagctgacaaacgccatatccgccttcaccctcaccaatttgcttttagtcggcttcgggatcacatgcttgattaacaaccttcatctgcagttcgtgacatttgttttacatacaatagtaagagggttcttccattctgcttgtgggagtctctatgccgccgtcttcccttctaatcacttcggcacacttaccggccttcagtcactcataagtgccgtgtttgccctgttgcagcaacctctgtttatggcgatggtgggcccccttaagggtgaaccgttttgggtaaacctgggtcttctccttttctctctgctgggattccttctgcctagctatctgttttattaccgggcaagactccagcaagaatacgccgccaacggcatgggacctttaaaagtcttgtctggaagcgaagtcacagcttag

SEQ ID NO: 285070 - DNA, 1680 bp, Artificial Sequence
  derived and/or modified sequence
atggcccccaccctgcagcaggcctacagaagacgctggtggatggcctgcacagctgtgctggagaacctcttcttctctgctgtgctgctgggctggggcagcctgctgatcatcctgaagaatgaaggcttctacagcagcacctgcccagctgagagcagcaccaacaccacccaggatgagcagaggcgctggccaggctgtgaccagcaggatgagatgctgaacctgggcttcaccatcggcagctttgtgctgagcgccaccaccctgcccctgggcatcctgatggacagatttggccccaggcctgtgcggctggtgggcagcgcctgcttcaccgccagctgcaccctgatggccctggccagcagagatgtggaggccctgagccccctcatcttcctggccctgagcctgaatggatttggaggcatctgcctgaccttcaccagcctgaccctgcccaacatgtttggaaacctgcggagcaccctgatggccctgatgattggcagctatgccagcagcgccatcaccttccctggcatcaagctgatctatgatgctggggtggcctttgtggtgatcatgttcacctggagcggcctggcctgcctgatcttcctgaactgcaccctgaactggcccatcgaggccttccctgcccctgaggaggtgaactacaccaagaagatcaagctgagcggcctggccctggaccacaaggtgactggagacctcttctacacccacgtgaccaccatgggccagaggctgagccagaaggcccccagcctggaggatggcagtgatgccttcatgagcccccaggatgtgcggggcaccagcgagaacctgcctgagaggtctgtgcccctgaggaagagcctgtgcagccccaccttcctgtggagcctgctgaccatgggcatgacccagctgcgcatcatcttctacatggctgctgtgaacaagatgctggagtacctggtgactggaggccaggagcacgagaccaatgagcagcagcagaaggtggccgagaccgtgggcttctacagctctgtgtttggagccatgcagctgctgtgcctgctgacctgccccctgattggctacatcatggactggaggatcaaggactgtgtggatgcccccacccagggcaccgtgctgggagatgccagagatggagtggccaccaagagcatccggccccgctactgcaagatccagaagctgaccaatgccatcagcgccttcaccctgaccaacctgctgctggtgggcttcggcatcacctgcctgatcaacaacctgcacctgcagtttgtgacctttgtgctgcacaccatcgtgcggggcttcttccacagcgcctgtggcagcctgtatgctgctgtgttccccagcaaccacttcggcaccctgaccggcctgcagagcctcatctctgctgtgtttgccctgctgcagcagcccctcttcatggccatggtgggccccctgaagggggagcccttctgggtgaacctgggcctgctgctcttcagcctgctgggcttcctgctgcccagctacctgttctactaccgggcccggctgcagcaggagtatgctgccaacggcatgggccccctgaaggtgctgagcggcagcgaggtgacagcctag

SEQ ID NO: 285071 - DNA, 1680 bp, Artificial Sequence
  derived and/or modified sequence
atggcccccaccctgcagcaggcctaccggcggcggtggtggatggcgtgcacagctgtgcttgaaaatcttttcttctcagccgtgctcctgggctgggggagccttctgattatcctgaagaacgagggcttctactcctcgacatgtcccgccgaatctagcaccaatactactcaggatgagcagcgaaggtggccaggttgtgaccagcaagatgaaatgctgaatctcggctttactatcggaagctttgtccttagcgcgacaacgctgcctcttggaatcctgatggaccgattcggcccccggccagttcgtctggtgggctccgcgtgctttaccgcctcttgtaccctcatggccttggcttctagggacgtggaggcactgagtccactcatatttctggcactgtctctgaatggcttcggtggtatatgcctgaccttcactagcctgacgttacccaacatgtttgggaatctacgcagcacattgatggcactgatgatcggtagctatgctagctcagctataaccttcccggggattaagctcatatacgacgccggagttgcattcgttgtcatcatgttcacatggtccggattggcctgtttgatttttctgaactgtactctgaactggcctattgaggcttttcctgcaccagaagaggtcaattacacaaagaaaatcaagttgagcggcctggcactggaccataaagtaaccggggatttgttttacactcacgtgacgaccatgggtcagagactatctcagaaagcaccaagtcttgaggatgggagcgatgccttcatgagtccccaggacgttagagggacgtctgaaaacctgccagagcgctccgtgcctctgcgaaaaagcttgtgttcaccaacctttctgtggtctctgctgacaatgggcatgacccagctacggattatcttttatatggctgccgtgaataaaatgctggagtatttggttactgggggccaggaacatgagactaacgagcagcagcagaaagtggccgagaccgttggtttttacagcagcgtcttcggggccatgcagctgctgtgtctattaacgtgccctctcatcggctatattatggattggcggatcaaagactgtgttgacgctcctactcaaggcaccgtgctgggggatgcacgggacggcgtggctactaagagtattagacctcgatactgcaaaatccaaaagctgaccaatgctatctcggcattcacactgaccaaccttctcttagtcggctttgggatcacatgcctcatcaacaacctgcatctgcagtttgtcactttcgtgttgcacacaatagtgagaggcttttttcattccgcgtgcggcagcctctacgcagctgttttcccttctaaccattttggtacacttaccggcttacaaagcctaatatcagctgttttcgccctgctgcaacagccactttttatggctatggtgggcccgctgaagggcgagcctttttgggtcaatctgggactgctgctcttctcgttgctgggctttttgttgccttcctacctgttttattaccgtgcacggttgcaacaagaatatgctgcaaatggtatgggacctctcaaggttctgtctggctcagaggtgacagcctag

SEQ ID NO: 285072 - DNA, 1680 bp, Artificial Sequence
  derived and/or modified sequence
atggcccccaccctgcagcaggcctaccggcggcggtggtggatggcctgcactgccgtcctggaaaacctctttttctccgcggtgctcctcggttggggtagcctgctgatcatactgaagaatgaggggttttattcatctacctgtcccgctgagagctccactaataccacacaagacgaacagcggcggtggccaggttgcgaccagcaggacgaaatgttaaatcttggctttaccattggaagtttcgttttgagtgccaccacccttccactggggatcctgatggaccggtttggcccacggcccgttaggctggtggggtctgcatgttttacggcctcttgcacccttatggcgctggctagccgggacgtcgaggctctgtcccccctcattttccttgccttgtccctcaatggattcggcggcatctgtttgacatttacctccctcaccctccccaatatgtttggcaacttgcgctctactctaatggctttaatgatcggtagttacgcatcctcagccattacatttcccggcatcaaacttatctacgatgcaggggtcgcattcgtcgttatcatgtttacctggagcgggctcgcgtgtctgatcttcctgaactgtaccctcaattggccgatcgaggccttccctgcccctgaagaagtgaattacacaaagaaaattaagctttctggactcgcattggatcacaaggtgaccggggacctcttctacacacacgtgacaaccatggggcagcggctgagccaaaaagcgccttcgcttgaagatgggtcagacgcctttatgtcaccacaagacgtacgagggacatccgaaaatctgcccgaacgctccgtgccgctgagaaagagcctgtgttcgcctacctttctttggtcactgttaacaatgggcatgacccaactgagaattatcttttacatggcggctgtgaataagatgttagaatatttagtgaccggcggacaggagcatgagactaacgagcaacaacagaaagttgcggagaccgtgggattctactcctccgtgtttggtgcgatgcagctgctgtgcctgcttacctgtcctctgatcggttatattatggactggcgcatcaaggactgtgtagatgccccgacacagggcactgtcctgggtgacgcacgcgatggggtggctacaaagtcaatacggcctaggtactgtaagatccaaaaactcacgaatgcaatctctgcatttacactgacaaacctgctgttagtgggcttcgggataacatgcctcatcaataatttgcatctccaattcgtgacattcgtcctacacaccattgttaggggattcttccactccgcatgcggatccttgtatgctgccgtgtttcccagcaaccacttcggtacactgaccggactccagtcactgatatcagcggttttcgccctcttacaacagcccctgtttatggcaatggtcggccccttgaaaggtgagcctttctgggtcaacctggggctcctgctgttctcactgctgggctttctgctcccaagttacctcttttactatagggccaggctccagcaggaatacgcagcaaacgggatggggccccttaaggtactgtccggcagtgaggtgactgcttag

SEQ ID NO: 285073 - DNA, 1680 bp, Artificial Sequence
  derived and/or modified sequence
atggcccctactctccaacaggcttatagaaggagatggtggatggcatgcacagcagttctggaaaacctgttcttctctgccgtgctgcttggatggggctctctgcttataattcttaaaaacgaggggttttattccagcacatgtcccgctgagtcaagcactaacaccacacaggacgagcagcggcgttggcctgggtgcgaccagcaagatgagatgcttaacctcggtttcacaataggcagcttcgtgcttagtgccacgactctcccgttaggaatcctgatggacagattcggcccaagacccgtccgacttgtgggcagtgcatgcttcacagcttcatgtaccttaatggctctggcgtccagagacgtcgaagcgctctctccactgattttccttgccctgagcctgaacggcttcggcggaatctgtctgacatttacctctctgaccctacccaatatgtttggcaacctcagatccacactcatggcactcatgattggatcatatgcgagctccgctatcacttttcctggcataaaactgatctacgatgcaggagtagcctttgtggtcataatgtttacttggtccggacttgcgtgtttgatcttcctgaattgtacattgaattggcctattgaagccttccctgcgccagaggaggtgaactacaccaagaaaatcaaactgtccggactcgccttggatcacaaggtaactggtgatctgttctatacacacgttacgaccatgggacagaggttatcccagaaggctccttccctggaggatgggtctgatgccttcatgagcccccaggatgtccggggtacgtcagagaacctaccagagcgttcagtgcctcttcgtaagtcactttgctcccccacttttctgtggtcattgttgacaatggggatgactcagctgcggattattttctatatggcagccgtgaacaagatgctggagtatttagtgactggtgggcaagagcatgagacaaatgaacaacagcaaaaagttgcggagacggtgggtttttatagcagtgtttttggtgcaatgcagttgctgtgtttgctgacatgtccgctgattgggtatatcatggattggcgcataaaagattgcgtggatgctcctacccagggaaccgtccttggcgacgcacgagatggagtcgccacaaaaagcatacgacctcgatattgcaaaatacagaaactcactaacgcaattagcgccttcacacttacaaatctcctactggtggggttcgggataacctgccttattaataatctacacctgcagttcgtaacctttgtcctgcacacaattgtgagaggtttctttcacagcgcctgtggatctctgtacgcagcagtttttcccagcaatcatttcgggaccttgacgggactgcagtcgctgatctctgcggtgttcgcccttctccaacaaccgctgtttatggccatggtgggcccacttaaaggcgaaccattttgggtgaatttggggcttttgctcttcagccttctggggttccttctgcctagttatctgttttactatagagctagactccaacaggagtatgctgctaatggtatgggtcccttgaaggtgctgtccggcagcgaggtcactgcttag

SEQ ID NO: 285074 - DNA, 1680 bp, Artificial Sequence
  derived and/or modified sequence
atggcaccaactctgcagcaggcatacagacgtagatggtggatggcatgcacagcagtactggagaatctgttcttttccgccgtgctgctgggctggggcagtctgcttatcatcctgaaaaacgaaggattttactcctcaacgtgccctgcagagtcttcaaccaatacaacacaggacgagcagcgcagatggccgggatgcgaccaacaggatgaaatgttaaacctaggcttcacgataggatcctttgtgctcagtgcaaccacgctaccattgggaatcctcatggaccgctttgggcctcgacctgtcagacttgtcggatccgcctgttttacagcctcatgcacactgatggccctagcctcccgcgatgtggaggccctgagccccttaatcttcctggctctgagcctgaacggctttggtggaatttgtctgacctttacttccctgaccctacccaatatgttcggaaatctacggtccaccttaatggcccttatgattggatcatatgctagtagcgctataacttttcctgggattaaactgatctacgatgcgggagtggcattcgtggtgatcatgtttacctggagtggattagcttgccttatctttctcaattgcacgctgaactggccgattgaagccttcccagcccctgaggaggtcaattataccaagaagataaaactgtccggcctcgcactagaccacaaggtcaccggggatttgttctacacccacgttaccacaatgggacagaggttgtcccaaaaagctcctagcctggaagacgggagtgatgcattcatgtcccctcaagacgtgcgaggcaccagtgagaacttaccggaacgcagcgtacctctacgcaaatctctctgcagtcccacgtttctgtggtctctcttgactatggggatgacccagcttcggattatattctacatggccgctgtgaataaaatgcttgaatacttagtgactggcggacaggaacacgaaacaaatgaacagcaacagaaggttgcagagacagtgggcttttattcgtccgtcttcggagccatgcagttgctttgcctcttaacctgtccacttatcggctacatcatggactggagaattaaggactgcgtcgacgctcccacccagggtacagtcctcggggacgcacgggatggtgtggccaccaaatccattagaccacggtattgcaagatccagaagctgactaacgcgattagcgccttcacactgactaacctgttgctcgtgggcttcggcattacctgcctgatcaataatctccacctgcagtttgtgacatttgtcctccatacgatcgtgagggggttcttccatagcgcttgcggctccctctacgccgcagtctttcctagtaaccacttcggaacactcaccgggttacagagcttgatctccgccgtcttcgcattactgcagcagcccctattcatggccatggtcggccctctgaaaggtgagcccttttgggtgaacctcggtctgctactcttttcccttttgggattcctcctacctagttacttgttctactatcgagcacgcctgcagcaggaatacgccgcaaatggtatgggccctctgaaagtgctatcgggctctgaagtcacagcatag

SEQ ID NO: 285075 - DNA, 2598 bp, Artificial Sequence
  derived and/or modified sequence
gaggggaaaagaagggagcccccgcccccacctcggggcgcagctccggacgcgtgtaaatacaactatcaactccgcagatccacttcatccaagcccagcttcgcagacctctggcgcccggcgggttcccagttcccccgcttcttccgaggagacagcggaggcgaggccaccgggctgtcaggctgaagctccgtggccgccgggtcctgcacgcagagaagaccccagcgccggcgcggctcagggctgggcccacgggactccggacgcgccgcgaaagcgttgcgctcccggaggcgtccgcagctgctggctgctcatttgccggtgaccggaggctcggggccagcatggcccccacgctgcaacaggcgtaccggaggcgctggtggatggcctgcacggctgtgctggagaacctcttcttctctgctgtactcctgggctggggctccctgttgatcattctgaagaacgagggcttctattccagcacgtgcccagctgagagcagcaccaacaccacccaggatgagcagcgcaggtggccaggctgtgaccagcaggacgagatgctcaacctgggcttcaccattggttccttcgtgctcagcgccaccaccctgccactggggatcctcatggaccgctttggcccccgacccgtgcggctggttggcagtgcctgcttcactgcgtcctgcaccctcatggccctggcctcccgggacgtggaagctctgtctccgttgatattcctggcgctgtccctgaatggctttggtggcatctgcctaacgttcacttcactcacgctgcccaacatgtttgggaacctgcgctccacgttaatggccctcatgattggctcttacgcctcttctgccattacgttcccaggaatcaagctgatctacgatgccggtgtggccttcgtggtcatcatgttcacctggtctggcctggcctgccttatctttctgaactgcaccctcaactggcccatcgaagcctttcctgcccctgaggaagtcaattacacgaagaagatcaagctgagtgggctggccctggaccacaaggtgacaggtgacctcttctacacccatgtgaccaccatgggccagaggctcagccagaaggcccccagcctggaggacggttcggatgccttcatgtcaccccaggatgttcggggcacctcagaaaaccttcctgagaggtctgtccccttacgcaagagcctctgctcccccactttcctgtggagcctcctcaccatgggcatgacccagctgcggatcatcttctacatggctgctgtgaacaagatgctggagtaccttgtgactggtggccaggagcatgagacaaatgaacagcaacaaaaggtggcagagacagttgggttctactcctccgtcttcggggccatgcagctgttgtgccttctcacctgccccctcattggctacatcatggactggcggatcaaggactgcgtggacgccccaactcagggcactgtcctcggagatgccagggacggggttgctaccaaatccatcagaccacgctactgcaagatccaaaagctcaccaatgccatcagtgccttcaccctgaccaacctgctgcttgtgggttttggcatcacctgtctcatcaacaacttacacctccagtttgtgacctttgtcctgcacaccattgttcgaggtttcttccactcagcctgtgggagtctctatgctgcagtgttcccatccaaccactttgggacgctgacaggcctgcagtccctcatcagtgctgtgttcgccttgcttcagcagccacttttcatggcgatggtgggacccctgaaaggagagcccttctgggtgaatctgggcctcctgctattctcactcctgggattcctgttgccttcctacctcttctattaccgtgcccggctccagcaggagtacgccgccaatgggatgggcccactgaaggtgcttagcggctctgaggtgaccgcatagacttctcagaccaagggacctggatgacaggcaatcaaggcctgagcaaccaaaaggagtgccccatatggcttttctacctgtaacatgcacatagagccatggccgtagatttataaataccaagagaagttctatttttgtaaagactgcaaaaaggaggaaaaaaaaccttcaaaaacgccccctaagtcaacgctccattgactgaagacagtccctatcctagaggggttgagccttcttcctccttgggttggaggagaccagggtgcctcttatctccttctagcggtctgcctcctggtacctcttggggggatcggcaaacaggctacccctgaggtcccatgtgccatgagtgtgcacacatgcatgtgtctgtgtatgtgtgaatgtgagagagacacagccctcctttcagaaggaaaggggcctgaggtgccagctgtgtcctgggttaggggttgggggtcggccccttccagggccaggagggcaggttccctctctggtgctgctgcttgcaagtcttagaggaaataaaaagggaagtgagaga

SEQ ID NO: 285076 - DNA, 2358 bp, Artificial Sequence
  derived and/or modified sequence
gtcagcagccgccagacttcctgccgaagtccgagccccctcccggggctggaggggggcaagcgggttccgaggtgcaaagcctggtgccccgagccctgcggagctcggggccagcatggcccccacgctgcaacaggcgtaccggaggcgctggtggatggcctgcacggctgtgctggagaacctcttcttctctgctgtactcctgggctggggctccctgttgatcattctgaagaacgagggcttctattccagcacgtgcccagctgagagcagcaccaacaccacccaggatgagcagcgcaggtggccaggctgtgaccagcaggacgagatgctcaacctgggcttcaccattggttccttcgtgctcagcgccaccaccctgccactggggatcctcatggaccgctttggcccccgacccgtgcggctggttggcagtgcctgcttcactgcgtcctgcaccctcatggccctggcctcccgggacgtggaagctctgtctccgttgatattcctggcgctgtccctgaatggctttggtggcatctgcctaacgttcacttcactcacgctgcccaacatgtttgggaacctgcgctccacgttaatggccctcatgattggctcttacgcctcttctgccattacgttcccaggaatcaagctgatctacgatgccggtgtggccttcgtggtcatcatgttcacctggtctggcctggcctgccttatctttctgaactgcaccctcaactggcccatcgaagcctttcctgcccctgaggaagtcaattacacgaagaagatcaagctgagtgggctggccctggaccacaaggtgacaggtgacctcttctacacccatgtgaccaccatgggccagaggctcagccagaaggcccccagcctggaggacggttcggatgccttcatgtcaccccaggatgttcggggcacctcagaaaaccttcctgagaggtctgtccccttacgcaagagcctctgctcccccactttcctgtggagcctcctcaccatgggcatgacccagctgcggatcatcttctacatggctgctgtgaacaagatgctggagtaccttgtgactggtggccaggagcatgagacaaatgaacagcaacaaaaggtggcagagacagttgggttctactcctccgtcttcggggccatgcagctgttgtgccttctcacctgccccctcattggctacatcatggactggcggatcaaggactgcgtggacgccccaactcagggcactgtcctcggagatgccagggacggggttgctaccaaatccatcagaccacgctactgcaagatccaaaagctcaccaatgccatcagtgccttcaccctgaccaacctgctgcttgtgggttttggcatcacctgtctcatcaacaacttacacctccagtttgtgacctttgtcctgcacaccattgttcgaggtttcttccactcagcctgtgggagtctctatgctgcagtgttcccatccaaccactttgggacgctgacaggcctgcagtccctcatcagtgctgtgttcgccttgcttcagcagccacttttcatggcgatggtgggacccctgaaaggagagcccttctgggtgaatctgggcctcctgctattctcactcctgggattcctgttgccttcctacctcttctattaccgtgcccggctccagcaggagtacgccgccaatgggatgggcccactgaaggtgcttagcggctctgaggtgaccgcatagacttctcagaccaagggacctggatgacaggcaatcaaggcctgagcaaccaaaaggagtgccccatatggcttttctacctgtaacatgcacatagagccatggccgtagatttataaataccaagagaagttctatttttgtaaagactgcaaaaaggaggaaaaaaaaccttcaaaaacgccccctaagtcaacgctccattgactgaagacagtccctatcctagaggggttgagccttcttcctccttgggttggaggagaccagggtgcctcttatctccttctagcggtctgcctcctggtacctcttggggggatcggcaaacaggctacccctgaggtcccatgtgccatgagtgtgcacacatgcatgtgtctgtgtatgtgtgaatgtgagagagacacagccctcctttcagaaggaaaggggcctgaggtgccagctgtgtcctgggttaggggttgggggtcggccccttccagggccaggagggcaggttccctctctggtgctgctgcttgcaagtcttagaggaaataaaaagggaagtgaga

SEQ ID NO: 285077 - DNA, 471 bp, Artificial Sequence
  derived and/or modified sequence
atgtcagagagggaagttagtacggcccctgccggcaccgacatgcctgccgccaagaagcaaaaacttagttccgacgaaaatagcaaccccgatctctccggcgatgagaacgacgacgctgtatcgatcgagtcagggaccaataccgaaagacctgatacgcctaccaatactccgaacgcacccggcaggaaatcatggggaaaaggcaaatggaagagcaagaaatgtaagtatagcttcaagtgcgtgaattccctgaaagaagatcataatcaacccctcttcggggttcagttcaattggcatagtaaagagggggatccactggtttttgccaccgtgggctccaatagggtgactctctacgaatgccacagccagggcgagataagacttctacagagctatgtagacgctgacgctgacgaaaatttctatacatgtgcctggaagtgctatcagtag

SEQ ID NO: 285078 - DNA, 471 bp, Artificial Sequence
  derived and/or modified sequence
atgtctgagcgggaggtgtccacagccccagctggaacagacatgcctgctgccaagaagcagaagctgagcagtgatgagaacagcaacccagacctgtctggagatgaaaatgatgatgctgtgtccattgagagcggcaccaacacagagaggccagacacccccaccaacaccccaaatgcccctggcaggaagtcctggggcaagggcaagtggaagagcaagaagtgcaagtacagcttcaagtgtgtgaacagcctgaaggaggaccacaaccagcccctgtttggagtgcagttcaactggcacagcaaggagggggaccccctggtgtttgccaccgtgggcagcaacagagtgaccctgtatgagtgccacagccagggcgagatccggctgctgcagagctatgtggatgctgatgctgatgagaacttctacacctgtgcctggaagtgctaccagtag

SEQ ID NO: 285079 - DNA, 471 bp, Artificial Sequence
  derived and/or modified sequence
atgagcgagcgggaggtgagcaccgcccccgccggcaccgacatgccagcagccaagaagcagaagctgtcatccgacgaaaactctaatcctgacctgagtggcgacgaaaatgacgacgccgtgtccattgagtccggcacaaatacggaacgccctgatacccctacaaacacccccaacgctccagggcggaaatcttggggcaagggaaagtggaaaagcaagaagtgtaagtacagcttcaagtgtgtaaactccctcaaggaggatcacaatcagcctctcttcggggtgcaatttaattggcactccaaagagggggatccccttgtttttgctaccgtgggttctaatagagtgaccttgtacgagtgccattcgcagggtgagatacgtctgcttcagtcttacgtggacgccgacgctgatgaaaacttttatacttgtgcctggaaatgctatcagtag

SEQ ID NO: 285080 - DNA, 471 bp, Artificial Sequence
  derived and/or modified sequence
atgtcagaacgagaagtcagcaccgcgccagccggaacggacatgccagctgcgaaaaagcagaagctgtcctcagatgagaactccaatcctgacctgtccggcgatgaaaacgatgacgcggtatctatagaatcaggcaccaataccgagcggccagacacccctacgaacacaccgaacgctccaggcaggaaatcctggggtaagggcaagtggaagagcaagaaatgcaagtatagctttaaatgtgtcaactcactgaaagaggaccacaatcaacccctctttggggtccagtttaattggcattcgaaagagggcgatccactcgtgttcgcaaccgtggggagcaatcgcgtaactctgtatgaatgtcacagtcagggcgagatccgactgctccagagctatgtcgatgccgacgctgacgaaaacttttatacttgtgcctggaagtgttaccaatag

SEQ ID NO: 285081 - DNA, 471 bp, Artificial Sequence
  derived and/or modified sequence
atgagcgagagagaggtgagcaccgcccccgccggcaccgacatgcccgccgccaagaagcagaagctgagcagcgacgagaacagcaaccccgacctgagcggcgacgagaacgacgacgccgtgagcatcgagagcggcaccaacaccgagagacccgacacccccaccaacacccccaacgcccccggcagaaagagctggggcaagggcaagtggaagagcaagaagtgcaagtacagcttcaagtgcgtgaacagcctgaaggaggaccacaaccagcccctgttcggcgtgcagttcaactggcacagcaaggagggcgaccccctggtgttcgccaccgtgggcagcaacagagtgaccctgtacgagtgccacagccagggcgagatcagactgctgcagagctacgtggacgccgacgccgacgagaacttctacacctgcgcctggaagtgctaccagtag

SEQ ID NO: 285082 - protein, 509 aa, Artificial Sequence
  derived and/or modified sequence
PNSICRHLHLTDTSHGVRNKCLQLLGNLGSLEKSVTKDAEGLAARDVQKIIGDYFSDQDPRVRTAAIKAMLQLHERGLKLHQTIYNQACKLLSDDYEQVRSAAVQLIWVVSQLYPESIVPIPSSNEEIRLVDDAFGKICHMVSDGSWVVRVQAAKLLGSMEQVSSHFLEQTLDKKLMSDLRRKRTAHERAKELYSSGEFSSGRKWGDDAPKEEVDTGAVNLIESGACGAFVHGLEDEMYEVRIAAVEALCMLAQSSPSFAEKCLDFLVDMFNDEIEEVRLQSIHTMRKISNNITLREDQLDTVLAVLEDSSRDIREALHELLCCTNVSTKEGIHLALVELLKNLTKYPTDRDSIWKCLKFLGSRHPTLVLPLVPELLSTHPFFDTAEPDMDDPAYIAVLVLIFNAAKTCPTMPALFSDHTFRHYAYLRDSLSHLVPALRLPGRKLVSSAVSPSIIPQEDPSQQFLQQSLERVYSLQHLDPQGAQELLEFTIRVEVSPWWPGWSQTPELK

SEQ ID NO: 285083 - protein, 1705 aa, Artificial Sequence
  derived and/or modified sequence
MASGSRWRPTPPPLLLLLLLALAARADGLEFGGGPGQWARYARWAGAASSGELSFSLRTNATRALLLYLDDGGDCDFLELLLVDGRLRLRFTLSCAEPATLQLDTPVADDRWHMVLLTRDARRTALAVDGEARAAEVRSKRREMQVASDLFVGGIPPDVRLSALTLSTVKYEPPFRGLLANLKLGERPPALLGSQGLRGATADPLCAPARNPCANGGLCTVLAPGEVGCDCSHTGFGGKFCSEEEHPMEGPAHLTLNSEVGSLLFSEGGAGRGGAGDVHQPTKGKEEFVATFKGNEFFCYDLSHNPIQSSTDEITLAFRTLQRNGLMLHTGKSADYVNLSLKSGAVWLVINLGSGAFEALVEPVNGKFNDNAWHDVRVTRNLRQHAGIGHAMVTISVDGILTTTGYTQEDYTMLGSDDFFYIGGSPNTADLPGSPVSNNFMGCLKDVVYKNNDFKLELSRLAKEGDPKMKLQGDLSFRCEDVAALDPVTFESPEAFVALPRWSAKRTGSISLDFRTTEPNGLLLFSQGRRAGGGAGSHSSAQRADYFAMELLDGHLYLLLDMGSGGIKLRASSRKVNDGEWCHVDFQRDGRKGSISVNSRSTPFLATGDSEILDLESELYLGGLPEGGRVDLPLPPEVWTAALRAGYVGCVRDLFIDGRSRDLRGLAEAQGAVGVAPFCSRETLKQCASAPCRNGGVCREGWNRFICDCIGTGFLGRVCEREATVLSYDGSMYMKIMLPNAMHTEAEDVSLRFMSQRAYGLMMATTSRESADTLRLELDGGQMKLTVNLDCLRVGCAPSKGPETLFAGHKLNDNEWHTVRVVRRGKSLQLSVDNVTVEGQMAGAHMRLEFHNIETGIMTERRFISVVPSNFIGHLSGLVFNGQPYMDQCKDGDITYCELNARFGLRAIVADPVTFKSRSSYLALATLQAYASMHLFFQFKTTAPDGLLLFNSGNGNDFIVIELVKGYIHYVFDLGNGPSLMKGNSDKPVNDNQWHNVVVSRDPGNVHTLKIDSRTVTQHSNGARNLDLKGELYIGGLSKNMFSNLPKLVASRDGFQGCLASVDLNGRLPDLIADALHRIGQVERGCDGPSTTCTEESCANQGVCLQQWDGFTCDCTMTSYGGPVCNDPGTTYIFGKGGALITYTWPPNDRPSTRMDRLAVGFSTHQRSAVLVRVDSASGLGDYLQLHIDQGTVGVIFNVGTDDITIDEPNAIVSDGKYHVVRFTRSGGNATLQVDSWPVNERYPAGNFDNERLAIARQRIPYRLGRVVDEWLLDKGRQLTIFNSQAAIKIGGRDQGRPFQGQVSGLYYNGLKVLALAAESDPNVRTEGHLRLVGEGPSVLLSAETTATTLLADMATTIMETTTTMATTTTRRGRSPTLRDSTTQNTDDLLVASAECPSDDEDLEECEPSTGGELILPIITEDSLDPPPVATRSPFVPPPPTFYPFLTGVGATQDTLPPPAARRPPSGGPCQAERDDSDCEEPIEASGFASGEVFDSSLPPTDDEDFYTTFPLVTDRTTLLSPRKPAPRPNLRTDGATGAPGVLFAPSAPAPNLPAGKMNHRDPLQPLLENPPLGPGAPTSFEPRRPPPLRPGVTSAPGFPHLPTANPTGPGERGPPGAVEVIRESSSTTGMVVGIVAAAALCILILLYAMYKYRNRDEGSYQVDQSRNYISNSAQSNGAVVKEKAPAAPKTPSKAKKNKDKEYYV

SEQ ID NO: 285084 - DNA, 5118 bp, Artificial Sequence
  derived and/or modified sequence
atggcgagtggctctagatggagacctacaccccctcctctcctgctgcttctgctcctggccttagcagcccgggctgacggactggaattcggcggcggacccggacagtgggcaaggtatgcccggtgggcaggagcggcttcctcaggagagttatccttttcccttcgcacgaacgccacccgagctctgctgctgtatctggatgacgggggagattgtgatttccttgaactgttgttagtggatggcagactgaggcttagattcactcttagctgcgccgagcccgccaccttacaactagacactccagtggctgatgaccggtggcacatggtgctcctgacccgggacgctaggaggactgctttagcagtcgatggtgaggcacgagcagccgaggtacgctccaagcggagagagatgcaagtggccagtgacttgttcgttgggggcattcccccagatgtgcgattgtcagccctgaccctgagcaccgtcaagtatgagcccccctttcggggactgctggcaaacctaaagctcggcgaacggccacctgctctgcttggctctcaaggccttagaggggctaccgcggatcctctttgtgctcccgcacgtaatccatgcgcgaacggtggactgtgcacggtcttggcgcctggtgaggtgggctgcgactgttcacataccgggttcggaggcaaattctgcagtgaggaagagcacccgatggagggccctgctcacctgacactgaatagcgaagtgggctcccttctctttagcgagggtggcgcaggccgcggtggcgccggcgacgtgcaccagcctacaaagggaaaggaagagtttgtggccacttttaagggcaatgagttcttttgttatgacctgagccacaatcctatccaatccagcacggacgagatcactctggcattcagaaccctccagaggaatggactcatgctacacaccggcaaatctgctgattatgttaatctcagtttgaaatccggggcggtgtggctcgtgattaacctgggcagcggcgctttcgaggccctggtggaaccagtcaacggaaagttcaacgacaacgcctggcatgatgtaagggttacgcgcaacctgcgacaacacgccggaattggtcatgcaatggtgactatttcagtggacggcatcctcacaacgacagggtatactcaagaagactacactatgctgggcagcgatgactttttctacattggtggtagtccgaatactgcagatcttcccgggagcccagtcagcaacaatttcatggggtgcctgaaagatgtcgtgtacaaaaataacgacttcaaactggaactgtcccgtttggcgaaggagggtgatcctaagatgaagctgcaaggagacttatcatttcggtgtgaggacgtggctgcactcgatcccgtgacgttcgagagccccgaggccttcgtggctcttcctcgctggtctgctaagcgcacaggcagcatctctttggattttcgcacaactgagcccaatggcctcctgctgttttcgcaaggtcggagggctggcggtggagccggctcacattcaagtgcccaacgcgcagactatttcgccatggagctgctggatgggcacctctatctgttgttggatatgggctccggaggaattaaactacgtgcctccagcagaaaagtgaacgacggtgagtggtgtcatgtggactttcaaagggatggaagaaaagggtccatctccgtcaactcccgaagcacacctttcctggccactggcgattccgaaattctcgaccttgagtcagaactgtatctgggcgggctgccagagggaggtcgagtagatctgcctctccctcctgaggtctggaccgccgcgctgcgagcaggatatgtagggtgcgtgcgcgatctgttcatagatggccgaagtcgtgatctccgaggcctcgctgaggctcagggcgcagtcggagtagcaccgttctgtagcagggagactctaaaacagtgtgcaagcgcgccatgcagaaacggtggagtgtgtagagaaggatggaatcggttcatttgcgactgtatagggactggtttcctgggacgcgtatgtgaaagagaggctaccgtgctttcttatgatggctccatgtacatgaaaattatgctgcccaacgctatgcatactgaggccgaggatgtgtccctccggttcatgtctcagagagcgtacggcctgatgatggccaccacctctcgcgaatctgctgataccttgagactggagctggacggtggtcagatgaaactgacggtgaatctcgactgtctccgggtggggtgcgcccctagtaaaggtcctgagactctgtttgcaggccacaaactgaatgacaacgagtggcacacagtgagagtagtgaggaggggcaaatctttacagcttagtgtcgacaacgtaaccgttgaggggcagatggctggcgcccacatgcggttagaattccacaatatagagacaggcatcatgactgaaagaaggttcatttccgtcgtcccatctaatttcattgggcacctcagtggtctcgtcttcaacggccagccctacatggaccagtgcaaggacggggacattacctattgtgagctgaacgcaagattcggccttagagcaatagtggcagatccagtgaccttcaaaagcaggagctcttaccttgccttggcaactctgcaagcatacgcctctatgcatctattcttccagtttaaaacaaccgcccctgacggactcttgcttttcaactcgggcaatggtaatgacttcattgtcatcgagctggtcaaaggatacatccactatgtctttgacctaggcaatggaccctctctcatgaaagggaattcggataaaccagtcaatgataaccagtggcacaacgtggtggtatcgcgtgaccctggcaacgtgcataccctgaagattgattcacgaaccgtgacgcaacactctaatggggctcgtaatctggatctgaagggcgaactttacattggtggtctgtccaaaaacatgttcagcaatcttcctaaattggttgcctctcgcgacggcttccagggttgcctggcctccgtggacctgaatggcaggctgccagatctcattgcagacgccctccacagaatcggccaggtggaacgaggctgcgacggaccatcaacgacttgcacggaagagtcatgtgccaaccaaggggtgtgcctacagcaatgggatggttttacctgcgattgcaccatgacgtcctacggtggacccgtgtgtaatgacccagggacaacttatatctttggaaagggcggagctttgatcacatacacgtggcctccaaatgatcggcctagtaccaggatggatagactggctgtagggttctctacgcatcagcgttctgcagttcttgtgcgtgtcgattctgcatccgggctcggggactatttacagttgcacatcgaccaaggaacggtcggagtaatcttcaatgtcggaacagacgatatcacgatcgatgaaccaaacgccatcgtaagtgacggcaagtatcatgtcgtccgttttaccagatccggtggcaacgcaaccttgcaggtggattcctggcccgttaacgagaggtacccagccgggaattttgataatgagaggctggcaattgctagacaaagaatcccctataggctggggcgcgtcgtggacgaatggctcctggacaagggccgccagctgaccatctttaactcgcaggccgctataaagataggcggccgtgatcagggaaggcctttccaaggccaggtgtctgggctgtattataacggcctgaaggttctggcccttgctgctgagtctgatcccaatgtgcgcacagaaggacacttacggctggtcggcgagggcccgagcgtgcttctgagtgctgagaccacggccaccactcttctcgcagatatggctactactattatggagacgacaacgaccatggccaccacgaccacacggagggggcggtcccccaccctgagagactcaactacccagaatactgatgatcttctcgtggcatctgctgagtgcccttctgacgacgaggatctggaggagtgtgagccttcaactgggggcgagctaattttgcccatcattactgaggacagcctggatcccccgcctgtggctacacggtcgccctttgttccccctcctcctaccttctatccttttctcacaggggttggcgcaacccaggacaccctccccccgcccgcagcgaggcgcccaccatctggcggaccatgccaggccgaacgtgatgatagcgattgcgaggaacccatcgaagccagcggctttgcttccggggaagtattcgactcttcgctgccacccacagacgacgaggacttctacaccacatttcctctggttactgatcgtactaccctgttgtccccaaggaaacctgcacctaggccaaacctgagaaccgacggcgccactggggccccgggtgtgctattcgctcccagcgccccagccccaaatctgccagccgggaagatgaaccatcgcgaccccctacagcctctcctggagaatccccctctcggcccgggcgcccctaccagcttcgagcctaggcgccctcccccacttagaccaggggtgacctctgcaccagggttcccccatctacccactgcgaaccccaccgggcctggtgaacgcgggcccccaggtgccgtggaggtgattagagaatctagctccacaacgggcatggtggttggaattgtggccgcagcagcgctgtgcatactgatcttactctacgctatgtacaaataccgtaacagggatgaaggctcttatcaggtcgatcagagtcggaactacatatccaacagcgctcaaagtaacggggcagtggtgaaggagaaagccccagcagcccccaaaactccgagcaaggccaagaagaataaggataaggagtattatgtgtag

SEQ ID NO: 285085 - DNA, 5118 bp, Artificial Sequence
  derived and/or modified sequence
atggccagcggcagccgctggaggcccaccccaccacccctgctgctgctgctgctgctggccctggccgcccgggcagatggcctggagtttggaggcggccctggccagtgggcccgctatgcccgctgggccggggccgccagcagcggggagctgtccttcagcctgcggaccaatgccacccgggccctgctgctgtacctggatgatggaggagactgtgacttcctggagctgctgctggtggatggccgcctgcggctgcgcttcaccctgagctgtgccgagcccgccaccctgcagctggacacccctgtggctgatgaccgctggcacatggtgctgctgaccagagatgcccggaggacagccctggccgtggatggagaggcccgggctgctgaggtgcgcagcaagagaagagagatgcaggtggccagtgacctgtttgtgggcggcatccccccagatgtgcggctgagcgccctgaccctgagcacagtgaagtatgagccccccttccggggcctgctggccaacctgaagctgggggagcggcccccagccctgctgggcagccagggcctgcggggggccacagctgaccccctgtgtgccccagccaggaacccctgtgccaatggaggcctgtgcaccgtgctggcccctggagaggtgggctgtgactgcagccacacaggctttggaggcaagttctgcagcgaggaggagcaccccatggagggccctgcccacctgaccctgaacagcgaggtgggcagcctgctcttcagcgagggcggggccggccggggcggcgctggagatgtgcaccagcccaccaagggcaaggaggagtttgtggccaccttcaagggaaatgagttcttctgctatgacctgagccacaaccccatccagagcagcacagatgagatcaccctggccttccgcaccctgcagagaaatggcctgatgctgcacacaggcaagtctgctgactatgtgaacctgagcctgaagtctggagctgtgtggctggtgatcaacctgggcagcggggcctttgaggccctggtggagcctgtgaatggcaagttcaatgacaatgcctggcatgatgtgcgggtgaccaggaacctgcggcagcacgccggcatcggccacgccatggtgaccatctctgtggatggcatcctgaccaccaccggctacacccaggaggactacaccatgctgggcagtgatgacttcttctacatcggcggcagccccaacacagctgacctgcccggcagccctgtgagcaacaacttcatgggctgcctgaaggatgtggtgtacaagaacaatgacttcaagctggagctgagccggctggccaaggagggggaccccaagatgaagctgcagggcgacctgtccttccgctgtgaagatgtggccgccctggaccctgtgacctttgagagccctgaggcctttgtggccctgccccgctggagcgccaagaggacaggcagcatcagcctggacttccgcaccacagagcccaacggcctgctgctcttcagccagggcagaagagctgggggcggggccggcagccacagcagcgcccagagagctgactactttgccatggagctgctggatggccacctgtacctgctgctggacatgggcagcggcggcatcaagctgcgggccagcagcaggaaggtgaatgatggagagtggtgccacgtggacttccagagagatggcaggaagggcagcatctctgtgaacagccgcagcacccccttcctggccactggagacagcgagatcctggacctggagagcgagctgtacctgggcggcctgcctgagggcggccgggtggacctgcccctgcccccagaggtgtggacagctgccctgcgggccggctacgtgggctgtgtgcgggacctcttcattgatggccgcagccgggacctgcggggcctggccgaggcccagggcgctgtgggcgtggcccccttctgcagccgggagaccctgaagcagtgtgccagcgccccctgcagaaatggaggagtgtgccgggagggctggaaccgcttcatctgtgactgcatcggcaccggcttcctgggccgggtgtgtgagcgggaggccaccgtgctgtcctatgatggctccatgtacatgaagatcatgctgcccaatgccatgcacacagaagcagaagatgtgtccctgcgcttcatgagccagagggcctacggcctgatgatggccaccaccagccgggagagcgctgacaccctgcggctggagctggatggcggccagatgaagctgactgtgaacctggactgcctgcgggtgggctgtgcccccagcaagggccctgagaccctgtttgctggccacaagctgaatgacaatgagtggcacacagtgcgggtggtgagaagaggcaagagcctgcagctgtctgtggacaacgtgacagtggagggccagatggccggggcccacatgaggctggagttccacaacattgaaacaggcatcatgacagaaagacgcttcatctctgtggtgcccagcaacttcatcggccacctgagcggcctggtgttcaacggccagccctacatggaccagtgcaaggatggagacatcacctactgtgagctgaatgccaggtttggcctgcgggccatcgtggccgaccctgtgaccttcaagagccgcagcagctacctggccctggccaccctgcaggcctatgcctccatgcacctgttcttccagttcaagaccacagccccagatggcctgctgctcttcaacagcggaaatggaaatgacttcatcgtgattgagctggtgaagggctacatccactacgtgtttgacctgggcaatggccccagcctgatgaagggcaacagcgacaagcctgtgaatgacaaccagtggcacaacgtggtggtgtcccgggaccctggaaatgtgcacaccctgaagattgacagcaggacagtgacccagcacagcaatggagccaggaacctggacctgaagggggagctgtacatcggcggcctgagcaagaacatgttcagcaacctgcccaagctggtggccagcagagatggcttccagggctgcctggcctctgtggacctgaatggccgcctgcctgacctgattgctgatgccctgcacagaattggccaggtggagcggggctgtgatggccccagcaccacctgcacagaggagagctgtgccaaccagggcgtgtgcctgcagcagtgggatggcttcacctgtgactgcaccatgaccagctatggaggccctgtgtgcaatgaccccggcaccacctacatctttgggaagggcggggccctgatcacctacacctggcccccaaatgaccggcccagcaccaggatggaccggctggccgtgggcttcagcacccaccagaggtctgctgtgctggtgcgggtggacagcgccagcggcctgggggactacctgcagctgcacatcgaccagggcaccgtgggcgtcatcttcaacgtgggcacagatgacatcaccattgatgagcccaatgccatcgtgtctgatggcaagtaccacgtggtgcgcttcaccaggtctggaggaaatgccaccctgcaggtggacagctggcctgtgaatgaaagatacccagctggcaactttgacaatgaaaggctggccatcgcccggcagaggatcccctaccgcctgggccgggtggtggatgagtggctgctggacaagggccggcagctgaccatcttcaacagccaggccgccatcaagattggaggccgggaccagggccggcccttccagggccaggtgtctggcctgtactacaacggcctgaaggtgctggccctggccgctgagagtgaccccaacgtgaggacagagggccacctgcggctggtgggggagggccccagcgtgctgctgtctgctgagaccacagccaccaccctgctggccgacatggccaccaccatcatggagaccaccaccaccatggccaccaccaccacccggcggggccgcagccccaccctgcgggacagcaccacccagaacacagatgacctgctggtggccagcgcagaatgtcccagtgatgatgaggacctggaggagtgtgagcccagcactggaggagagctgatcctgcccatcatcacagaggacagcctggaccccccacctgtggccaccaggagcccctttgtgcccccaccacccaccttctaccccttcctgactggagtgggcgccacccaggacaccctgcccccacctgctgcccggcggccccccagcggcggcccctgccaggccgagagagatgacagcgactgtgaggagcccatcgaggccagcggctttgccagcggggaggtgtttgacagcagcctgcccccaacagatgatgaggacttctacaccaccttccccctggtgacagacaggaccaccctgctgagccccaggaagccagccccccggcccaacctgaggacagatggagccactggagcccctggggtgctgtttgcccccagcgccccagcccccaacctgcctgctgggaagatgaaccaccgggaccccctgcagcccctgctggagaacccccccctgggccctggggcccccaccagctttgagccccggcggcccccacccctgcggcctggggtgaccagcgcccctggcttcccccacctgcccacagccaaccccaccggccctggagagcggggccccccaggagctgtggaggtgatccgggagagcagcagcaccaccggcatggtggtgggcatcgtggccgctgctgccctgtgcatcctgatcctgctgtatgccatgtacaagtacagaaacagagatgagggcagctaccaggtggaccagagcaggaactacatcagcaacagcgcccagagcaatggagctgtggtgaaggagaaggccccagctgcccccaagacccccagcaaggccaagaagaacaaggacaaggagtactacgtgtag

SEQ ID NO: 285086 - DNA, 5118 bp, Artificial Sequence
  derived and/or modified sequence
atggccagcggcagccggtggcggcccacccccccccccctgctgctgttgctcttgttggctcttgcagctagggccgacggcctggagtttggaggtggccccggacagtgggctcgctacgcaagatgggcgggagcagcatcctcaggggaactgagcttctcattgaggaccaacgcgacaagggccctgttactatacctcgacgacggcggcgactgtgattttcttgaactcctcctggttgatggaagattgaggctgagattcaccctcagctgtgccgaacccgctacgctgcaacttgatacacccgtggcagacgatcgttggcatatggttctattgaccagggatgcgaggaggaccgctctggcagtggacggcgaggctagggccgctgaggtgcggtccaagcggagggagatgcaggtggcaagcgacctgtttgtgggtgggattccacccgatgtccgactgagcgcattaacattgagtaccgtcaagtacgagcccccattcagaggactcctcgctaacctgaagctcggggagcgccctcccgctcttctcggatcgcagggtctgagaggagccaccgcggatcctctgtgtgctcccgctcgaaacccatgcgccaacggaggcctatgtacagttttagctcccggagaagtcggctgtgactgtagtcacacaggttttgggggtaaattttgttctgaggaggaacacccaatggaggggcccgctcacctgaccctgaatagtgaggtcggatccctactattcagtgagggtggtgccggacgtggcggagccggtgatgttcaccagccaaccaagggtaaggaggaatttgtagccacctttaagggtaatgagttcttctgttacgatctttcccataatcctattcagtcttccactgacgagattacattggcttttagaacacttcagaggaacggtctgatgctgcacaccggcaaatccgccgactatgtaaacctctccctgaaatcaggggccgtctggctagtgataaatttaggcagcggggcttttgaggccctagtcgaacccgttaacggtaagttcaacgataatgcctggcatgacgtccgggtcacaagaaacttacgccaacacgcaggcattggacatgccatggttacaatatcagtggacggaatcctgacgactactgggtacacgcaggaagattacacgatgcttggaagcgacgattttttttacataggcggttcaccaaacacagcggatcttccagggagcccagtgagcaacaatttcatgggttgcttgaaggatgtcgtttataaaaacaatgatttcaagctggagctctctagactggctaaggagggggacccaaagatgaagcttcagggagacttgtcctttcgctgtgaagacgttgcagcgttagacccagtcacctttgagagccccgaggcctttgtcgctctgcctcggtggagcgctaagagaacgggcagcatttcattggatttcaggaccaccgagcccaatggactgcttttgttttctcaggggcgcagggccggaggtggtgccggatctcacagttcagcacaaagagccgactattttgccatggagctgctggacggacatttatacttgctcttggacatgggctccggaggcattaaactgagggcgtccagcaggaaagttaatgacggcgaatggtgtcatgttgattttcagagggacggacgaaagggctctatttcggtgaatagccgttcaaccccatttctggctactggagactctgagattttagatttggagtcagaactctatctgggaggattgccggagggaggccgcgtggacttgcctcttccccccgaagtctggaccgcggctctgcgggccggttacgttgggtgcgtgcgcgacctgttcatagatgggaggagcagagacctacgggggctggctgaagcgcaaggggccgtgggggtggcaccattttgcagtagagagactcttaagcagtgtgcatcagcaccatgccgaaacggtggcgtttgccgcgagggatggaataggtttatctgtgattgcatcggcaccggctttctggggcgtgtgtgcgagagagaggcgaccgtgttgtcttatgatggatctatgtatatgaagatcatgttacccaacgctatgcatactgaagccgaggacgtgagtcttaggttcatgagccaaagggcttacggcctgatgatggcaactacaagccgcgagtccgctgacactttacgtcttgagctggatggcggacagatgaaacttaccgttaatctagattgcctccgagtgggttgcgcgcctagcaagggacccgaaacactgtttgcaggacataagctcaatgataacgagtggcacactgtgcgtgtggtccggcgtgggaaatctctgcaactgagcgtagataatgtaaccgtggaaggtcagatggcaggcgcacacatgcgacttgagtttcataatatcgagacagggattatgactgaacggcggttcatctccgtggtcccatctaacttcattggccacctttcaggcctggtctttaatgggcagccgtatatggaccagtgcaaggatggggacattacctactgtgagctaaacgccaggtttggactgcgggccatcgtcgccgaccccgtgacctttaagagtcggtctagttacttggctctggcgacccttcaagcatacgcaagtatgcacctgtttttccagtttaaaaccactgcaccggacggcctgcttctttttaatagtgggaatgggaatgactttatcgtcatcgagttggttaagggttatatccattacgtgtttgatctcggcaacgggccctccctcatgaagggcaattccgacaaacccgtgaatgataaccagtggcataacgtggtggtctcccgcgacccgggcaacgtgcacacactgaaaattgatagccgaactgtgactcaacacagtaatggagctcggaatcttgacctcaagggagaactctatatcggaggtttgagcaaaaatatgttctctaatctgcccaaattggtagctagcagggacggcttccagggatgtctcgcctctgtggaccttaatggccggcttcccgacctgatcgcagatgctctccataggattgggcaggtcgagagaggctgcgatggcccatccacgacctgcactgaggagagctgtgcaaatcagggagtatgtctccagcagtgggacggttttacgtgcgactgtacgatgaccagctacgggggtcccgtgtgtaacgaccctgggacaacttatatcttcggcaaggggggagctctcattacgtacacttggccacccaacgacagacctagcacccgtatggacaggctggcagtaggatttagcacccaccagcggtctgccgtgctggtgcgggtggattcagcgagtggcctgggagattatctacaacttcacattgaccagggtacggtgggcgtgatcttcaacgtagggaccgacgacataaccatcgatgaacccaatgctatcgttagtgacggaaagtaccacgtagtgcgctttaccagatcagggggtaatgcaactctccaggtcgatagctggccagtaaatgaacggtatccagccggcaatttcgataatgagagacttgccatcgcacgccaacggatcccttatcgactgggaagagtggtggacgaatggctgctggacaagggaaggcagttgaccatttttaattcccaggctgcaatcaagatcggaggccgtgaccaggggcggccatttcagggccaagtaagcggactctattataatgggctcaaggtcctagcgcttgcagctgagtccgacccgaacgtcaggacagagggccacctgcgcctagtcggagaggggccgagcgtgttgttgtctgctgaaacaactgctacaactctgttggcagatatggcaaccacaattatggagacaacaaccacgatggcaacaacaacgaccaggcggggaagatctccaaccctccgcgattctacaactcagaacacagacgatctgctggttgcctctgctgaatgcccttcagacgacgaggacctagaggagtgcgaaccaagtacagggggtgagctaatactaccgatcattacagaagactcgctggatccgcctccagttgctacgaggagccctttcgttcctccacctccaaccttctaccctttcctcaccggcgttggggccacccaggacacccttccaccccccgccgcgaggcgaccccccagtggcgggccatgccaggccgaacgtgatgatagcgattgtgaggaaccaatcgaagctagtgggttcgcctccggcgaggtgttcgactccagtttacctcccactgatgatgaagacttttacaccacatttccgctggttactgacaggacaacactactttcccctaggaaaccagcccctaggcccaatcttcgaactgatggcgccacaggtgccccaggcgttttgtttgccccaagtgccccggcacctaatctgcccgccggcaaaatgaatcacagggacccattgcagcctctcctggaaaaccccccccttggacctggcgctcctacctccttcgagccccggaggcctccccctctgcggccaggggtgacttccgccccaggtttccctcacctcccaaccgctaaccccacaggacccggcgagaggggtccaccaggagctgtggaagtgattcgcgagtcgagttcaactaccgggatggtggtcggcattgtggccgccgccgctctgtgcatcttgatcttactgtatgccatgtataagtaccggaacagagatgaaggatcttatcaggtggatcagtcccgcaattacatctcgaattccgcacagtcaaacggtgccgtggtgaaggaaaaggccccagccgccccgaaaacaccctccaaggcgaaaaagaacaaggataaggaatattatgtatag

SEQ ID NO: 285087 - DNA, 6381 bp, Artificial Sequence
  derived and/or modified sequence
gcatccctccctgctcttctgtcggagcccgcggcgggggaggggcgccgccgccgccgcctgagggaagccggcatctgggcctctgcgcgcctcgccccgcggccgggcccatggcactgtgagcctgcaagggagccccgctcagcgcggggagcgcccggccccctcccgccccatgcgcccgcggctctgaagcctgagcgggggccgggggccgggcggggccggggccgccgtaggcatggcgtccgggagccggtggcggccgacaccgccgccgctgctgttgctgctgctgctggcgctggcggcgcgcgcggacggcctggagttcggcggcggccccgggcagtgggctcgctacgcgcgctgggcgggcgcggcgagcagcggcgagctcagcttcagcctgcgcaccaacgccacgcgcgcgctgctgctctacctggacgacggcggcgactgcgacttcctggagctgctgctggtggacggccgcctgcggctgcgcttcacgctttcgtgcgccgagccggccacgctgcagctggacacgccggtggccgacgaccgctggcacatggtgctgctgacccgcgacgcgcgccgcacggcgctggcggtggacggcgaggcccgcgccgccgaggtgcgctccaagcggcgcgagatgcaggtggccagcgacctgttcgtgggcggcatcccgcccgacgtgcgcctctcggcgcttacgctgagcaccgtcaagtacgagccgcccttccgcggcctcttggccaacctgaagctgggcgagcggccccccgcgctgctgggcagccagggcctgcgcggcgccaccgccgacccgctgtgcgcgcccgcgcgcaacccctgcgccaacggcggcctctgcaccgtgctggcccccggcgaggtgggctgcgactgcagccacacgggcttcggcggcaagttctgcagcgaagaggagcaccccatggaaggtccggctcacctgacgttaaacagcgaagtagggtccttactgttctccgaggggggggccgggagaggaggagccggcgatgtgcaccagccaacaaaaggcaaggaggagtttgtggcgaccttcaaaggcaatgagttcttctgctacgacctgtcacacaaccccatccagagcagcactgatgagatcacactggccttccgcaccctgcaacgcaacggcctgatgctgcatacaggcaagtcggccgactacgtcaacctgtccctcaagtctggggctgtctggctggtcatcaacctaggctcaggtgccttcgaggcccttgtggaacccgtcaatggcaagttcaacgacaacgcctggcacgacgtccgggtcacccgaaacctgcgccagcacgcagggattggacacgctatggtgaccatctcggtggacgggatcctgaccaccacaggctacacgcaggaggattacaccatgctgggctctgatgacttcttctacattgggggcagccccaacacagctgacctgccgggctcgcccgtcagcaacaacttcatgggctgcctcaaggacgtggtctataagaacaatgacttcaaattggaactatcccgcctggcaaaggaaggggaccccaagatgaagctgcagggggacttgtcattccgctgtgaggatgtggctgccctggaccctgtgacctttgagagtcccgaggcctttgtggcgctgccccgctggagcgctaagcgcactggctccatctccctagacttccgcaccaccgagcccaatgggctgctgctcttcagccagggccggcgggctgggggtggagctggcagccacagctctgctcagcgggccgactactttgccatggagctattggacggccacctctatcttctgctggacatgggatctgggggcatcaagctgcgggcatccagccgcaaggtcaatgatggcgagtggtgtcacgtggacttccagagggatgggcgaaaaggctccatctcagtgaatagtcgcagcacgccgttcttggccactggagacagcgagattctggacctggagagtgagctgtacctgggcggtctccctgaggggggccgggtggacctgcccctgcccccagaggtgtggacagcagcactccgggcaggctacgtgggctgtgtgcgggacctcttcatagatgggcgtagccgagacctccggggcctggctgaggctcagggggctgtgggcgttgcccccttttgctcccgggagacgctgaagcagtgtgcatctgccccctgtcgcaatgggggcgtctgtcgagaaggctggaaccgcttcatctgtgactgcatcgggaccggctttcttgggcgggtctgtgagagagaggccacggtcctgagctacgatggctccatgtacatgaagatcatgctgcctaacgccatgcacacggaggcagaggatgtgtccctgcgtttcatgtcccagcgggcctacggactcatgatggccaccacttccagggagtctgccgacaccctacgcctggagctggatggggggcagatgaagctcactgtcaacctcgactgcctgcgcgtcggctgcgcacccagtaaaggccccgaaacgctgtttgcggggcacaagctcaatgacaatgagtggcacacggtgagggtggtccggcgtggcaagagcctgcagctgtctgtggacaacgtgactgtggagggacagatggcaggagcccatatgcggctggagttccacaacattgagacgggcatcatgacggagcggcggtttatctccgtggtgccctccaacttcatcgggcatctgagtgggctcgtgttcaatggccagccctacatggaccagtgcaaggatggtgacatcacctactgtgagctcaatgctcgctttggcctgcgtgccatcgtggccgatcccgtcaccttcaagagtcgcagcagctacctggcactcgccacgctccaagcctatgcttccatgcacctcttcttccagttcaagaccacggcccctgatgggcttcttctgttcaactcgggcaacggcaatgacttcattgtcatcgagctggtcaaggggtacatccactacgtgtttgacctggggaatggcccgtccttgatgaaggggaactcagacaaaccagtcaatgacaaccagtggcacaacgtggtggtgtccagggacccaggcaacgtgcacacgctcaagattgactcccgcactgtcacgcagcactccaatggcgcccgaaacctcgatctcaaaggggagttgtacattggcggtctgagcaagaatatgttcagcaacctgcccaagctggtggcctcccgggatggctttcagggctgcctggcctcagtggacctcaacggacgtctcccagacctcatcgccgacgccctgcaccgcattgggcaggtggagaggggctgtgatggccccagcaccacctgcactgaagagtcctgtgccaaccagggcgtctgcttgcagcagtgggatggcttcacctgcgactgcaccatgacttcctatggaggccctgtctgcaatgatcccgggaccacatacatctttgggaaggggggagcgctcatcacctacacgtggccccccaatgacaggcccagcacgaggatggatcgcctggccgtgggcttcagcacccaccagcggagcgctgtgctggtgcgggtggacagcgcctccggccttggagactacctgcagctgcacatcgaccagggcaccgtgggggtgatctttaacgtgggcacggacgacattaccatcgacgagcccaacgccatagtaagcgacggcaaataccacgtggtgcgcttcactcgaagcggcggcaacgccaccctgcaggtggacagctggccggtcaacgagcggtacccggcaggaaactttgataacgagcgcctggcgattgctagacagagaatcccctaccggcttggtcgagtagtagatgagtggctgctcgacaaaggccgccagctgaccatcttcaacagccaggctgccatcaagatcgggggccgggatcagggccgccccttccagggccaggtgtccggcctctactacaatgggctcaaggtgctggcgctggccgccgagagcgaccccaatgtgcggactgagggtcacctgcgcctggtgggggaggggccgtccgtgctgctcagtgcggagaccacggccaccaccctgctggctgacatggccaccaccatcatggagactaccaccaccatggccactaccaccacgcgccggggccgctcccccacactgagggacagcaccacccagaacacagatgacctgctggtggcctctgctgagtgtccaagcgatgatgaggacctggaggagtgtgagcccagtactggaggagagttaatattgcccattatcacggaggactccttagacccccctcccgtggccacccgatcccccttcgtgcccccgccccctaccttctaccccttcctcacgggagtgggcgccacccaagacacgctgcccccgcccgccgcgcgccgcccgccctctgggggcccgtgccaggccgagcgggacgacagcgactgcgaggagcccatcgaggcctcgggcttcgcctccggggaggtctttgactccagcctcccccccacggacgacgaggacttttacaccacctttcccctggtcacggaccgcaccaccctcctgtcaccccgcaaacccgctccccggcccaacctcaggacagatggggccacgggcgcccctggggtgctgtttgccccctccgccccggcccccaacctgccggcgggcaaaatgaaccaccgagacccgcttcagcccttgctggagaacccgcccttggggcccggggcccccacgtcctttgagccgcggaggccccctcccctgcgccccggcgtgacctcagcccccggcttcccccatctgcccacagccaaccccacagggcctggggagcggggcccgccgggcgcagtggaggtgatccgggagtccagcagcaccacgggcatggtggtgggcattgtggcggcggcggcgctctgcatcctcatcctcctctacgccatgtataagtaccgcaatcgtgatgagggctcctaccaggtggaccagagccgaaactacatcagtaactcggcccagagcaatggggcggtggtgaaagagaaggccccggctgcccccaagacgcccagcaaggccaagaagaacaaagacaaggagtattatgtctgagcccccggcactgcgccccactgccagctgcccctcctgggagggcccgggaggagggtgccaccctctccctgccaggggcctggggaccctctccctggctgcctcaggcttctcttacgaagaggaaacgcaaaaaaagaaaaggaaaaaccccgtgctcgcccccttcctcctgccgtccactgcgcggcctcgtcagtcccggggctgactgtccctctcagctctgcgcctgccaggcagggcacgtgctcacagccctgggttgatttatttttttaagggggtagttttattttggtggggttgggtgggaaggaaggctgggggttttgtaaagtgtccactgctcgtcctgttaattttcctcaatttttcttcttcttccttctgtccctcctgccttccttctcttcccaagccctccaatccccatcccaggcttgctgtgtctcactgtccccaccctccttccctacttctttttttgtgtgtctggtttctcccttcctttcctccctttgggtttccagagtcggtgggagaagggcgggagggtgggcccgagtggcccagtgggtgggtggggtggggtggggcaagtgccccaactcccctcaccaggagaggcacctgcttggtgccgcccagggaaggggctcaggcctgacggaaggcctgttctgtgtgtgccgccgggcgacgtgcattgatggggaagctgctggaggagcaggggtggggggtgggagggaggggaaaggcaaatgcagatatatattacagacaaatactctagattccacgagcagcagcctgtggcacccgctgggcgcgggcagcagggaagagggagcaaggcattgtccacagactgctggggtcacttctttgcccacgggctccctgctcccccagttttttttctctctttgttaacaaatgtgtctgagtcttggaaaacaccccaaccccggaaatgtgtgggaaaaagaaaacaaaaactttccaaattc

SEQ ID NO: 285088 - DNA, 5117 bp, Artificial Sequence
  derived and/or modified sequence
atggcttccggatctcggtggagacctactccaccgcctctactgctgttgctcctgctggctttggccgcaagggcggacggactggaatttggtggcggtcccggtcagtgggcccgatacgcacggtgggcgggagcggcttcaagcggtgaactgtctttcagtctccggacaaacgcgacccgggctcttctcctctacctggatgatggaggtgattgtgacttcctggagctccttctggtggatggacggctgcggctcagatttacacttagctgcgccgagcctgctaccctgcagcttgatacaccggtggcagatgaccgctggcacatggtgctgcttacacgggacgcaaggagaacagctcttgccgtggacggggaggctcgcgctgccgaggtacgttccaagagacgggagatgcaggtggcatctgacctctttgttgggggaattccacccgatgtgcgcctcagtgccttgactctatcaaccgtgaaatatgagcccccttttcgcggactgctggctaacctgaagctcggcgaaagaccacctgctcttctggggagccaaggattgcggggagccactgccgaccccttgtgcgcaccggctagaaacccgtgcgcgaacggcggattgtgtaccgtgttggcacctggcgaggtgggctgtgattgctcacatacaggatttgggggtaagttttgctcggaagaagaacatcccatggagggcccagcccatctaactctgaatagcgaggttggctcccttttatttagtgaaggtggggctggtcggggtggcgcaggggacgtgcaccaaccgacaaaaggaaaggaggaattcgtggcaacattcaaaggcaacgagttcttctgctatgacctgagccacaaccctatccagagctccaccgacgagatcacgttagctttcaggaccctgcagcgaaacggcttgatgttgcatacaggtaaaagtgcagattatgtgaacctatctctgaaaagcggcgctgtatggctggtcatcaacctgggctctggcgctttcgaagccctggtggaacccgtgaatggtaaattcaacgacaacgcatggcacgacgtacgtgtgacacggaatctcagacagcacgccggtatcggacatgcgatggtaactattagcgtggacggcattctcactaccacagggtacacccaggaggactacaccatgctgggaagtgatgattttttttacattggcggtagtccgaacacagcagacctgcctggctccccggtgagcaacaatttcatggggtgcttgaaagacgtagtttacaagaacaatgattttaagctggaattgtcccgcctagccaaggagggtgatccaaagatgaaactacagggagatctcagtttccgctgtgaggatgtcgccgctttagatcccgtcacattcgaaagcccggaggctttcgtggctcttcctaggtggagtgccaagcggacggggtcaattagcctcgacttcagaacgacagagccaaatgggctgctcctttttagtcagggacgcagagcagggggaggtgccggtagccattctagcgcgcagcgtgcagactatttcgctatggaactgctcgatggacacctctatcttttgttggacatgggttccggtggtataaaattacgcgctagcagccgcaaggtgaatgatggagagtggtgccacgtagacttccagcgggatggtcgcaaaggcagtatatcggtcaatagtcggtccaccccattccttgctaccggagacagcgaaattctggacctggaatcggagttgtatctgggcggactacccgaaggcggacgcgtcgacctgcccctaccaccagaggtgtggactgccgctctgagagccggatacgtgggatgcgtgagggacctcttcatcgacggccgttctcgggacctgcgcggtctagcagaagcccagggagcagtaggtgtggctcccttctgttctagggagaccctgaaacaatgtgcttccgcaccttgccgcaacggtggagtatgtcgcgagggctggaatagatttatttgtgactgtattggaaccgggttccttggcagggtgtgtgagagagaggctacagtgttgagctacgacggatccatgtacatgaagattatgctgccgaacgcaatgcatactgaagctgaggatgttagcctcaggttcatgagtcagcgtgcatacgggctcatgatggcgacgaccagtagagaatccgccgacacccttagacttgaattggacggcggacagatgaaactcaccgttaacctggattgcttaagagtcggctgcgcccctagcaagggcccagaaactctttttgctggccacaaattgaatgacaacgagtggcacacggtgagggttgtccggagaggaaaatccttacaattaagtgtggataacgtcactgtggagggccaaatggcaggggctcacatgcggctcgagttccataatattgagaccggcatcatgactgagcggaggttcatcagcgtggtcccgtcaaatttcattgggcatctgagcggccttgtcttcaacggccagccctacatggatcagtgcaaggacggggacatcacttactgtgagttgaacgcgagatttggactcagggctattgtggcggatcctgttacgttcaaatctagatctagctacctggccttggccaccctgcaagcatacgcttccatgcacctcttctttcagttcaaaacgacagcccctgatggactccttttatttaattctggcaacggtaacgacttcatcgtgattgaactcgtaaagggatatatacactacgttttcgacctggggaacggtcctagtctgatgaagggcaactctgacaaacctgtgaatgacaatcagtggcataatgtcgtcgtgagccgagacccaggtaatgtccacactcttaaaatagattccagaactgtaacacaacacagtaatggcgctcgcaatctcgacctcaagggtgagctgtacatcgggggacttagcaagaatatgttctcaaacctccctaagcttgtggcttcccgcgatggcttccagggctgtctggccagtgtggatctgaacggtaggctgcccgacctaatagctgatgctttgcatagaatcgggcaggtggaacggggttgtgatggaccatctaccacatgcacagaggaatcctgtgccaatcagggggtgtgtctgcaacagtgggacggttttacctgcgactgcaccatgaccagctacgggggaccagtatgcaatgatccagggacaacatacatcttcggcaagggaggcgctctaatcacctacacatggcccccaaatgaccgtcctagcacccgcatggacaggctggccgtgggtttctccacgcaccagagatcggccgtgctggtccgggtggacagtgcctccggcctgggcgattaccttcaacttcacatcgatcagggcaccgtgggtgtgatcttcaacgtgggcaccgacgatattaccattgacgagccaaatgccatagtttcagacggtaaataccatgtcgttaggttcacccgatccggtgggaacgccacacttcaggtggactcttggcccgtcaatgagcgttaccccgctggaaatttcgataatgagaggctcgctatcgcgaggcagaggattccatacaggctgggaagagttgttgacgaatggctgctggacaagggcagacagctgacaatttttaactcccaagccgctatcaaaatcggcggtcgggaccagggcagaccattccaggggcaagtgtccgggctttattataatggactgaaagtgctcgcgctcgctgccgaatctgaccctaatgtccggaccgagggacacctgcggttggttggagagggaccaagtgtgcttttgagcgccgaaacaactgcaaccacattgctggcagacatggcgactactattatggaaactaccactacaatggcaacaacgaccactcgaaggggaagaagcccaacacttagagactccaccacgcagaatacggatgatctgctggtcgcttctgcggaatgcccttctgacgacgaagacctggaggagtgcgagccgagcactgggggagagctgatattacctatcataacagaggacagcctggatccccctccagtcgccactcggagtccattcgtgcctccaccaccgaccttctatcctttcctaacaggcgttggagcgacccaggatacacttccccctcctgctgccaggcgccctccaagcgggggaccatgtcaggccgagcgggatgatagtgactgtgaagagcctatcgaagccagcggattcgctagtggagaagtgtttgacagcagtcttccgcctacagacgatgaagacttttacactacgtttccactggtgaccgacagaaccacactgctctctccaagaaagccagcacccagacccaatctcaggaccgatggcgctaccggagcccctggcgtactgttcgccccatcagcccctgctcctaatctccctgccggtaagatgaaccatagggatcccctacaacccctcttggagaatccacccctgggcccaggtgctcctacgtcattcgaaccccgtcgcccaccacccctgaggccaggggtgacatccgccccaggttttccgcaccttcctaccgctaacccaacaggccctggggagcggggaccacccggagcagtggaagtgatcagagagagttcctctactacagggatggtcgtgggcattgttgcagcagcagcgttgtgcatcttgatcctgctatacgcaatgtacaagtaccgtaaccgtgacgaggggagttaccaggtggaccaatcccgcaactatatctctaattcggcccagagtaacggagctgtggtgaaggagaaggcgccagcagcaccaaagacgccgagtaaagcgaaaaaaaataaggacaaagaatactatgtata

SEQ ID NO: 285089 - DNA, 5118 bp, Artificial Sequence
  derived and/or modified sequence
atggccagcggcagcagatggagacccacccccccccccctgctgctgctgctgctgctggccctggccgccagagccgacggcctggagttcggcggcggccccggccagtgggccagatacgccagatgggccggcgccgccagcagcggcgagctgagcttcagcctgagaaccaacgccaccagagccctgctgctgtacctggacgacggcggcgactgcgacttcctggagctgctgctggtggacggcagactgagactgagattcaccctgagctgcgccgagcccgccaccctgcagctggacacccccgtggccgacgacagatggcacatggtgctgctgaccagagacgccagaagaaccgccctggccgtggacggcgaggccagagccgccgaggtgagaagcaagagaagagagatgcaggtggccagcgacctgttcgtgggcggcatcccccccgacgtgagactgagcgccctgaccctgagcaccgtgaagtacgagccccccttcagaggcctgctggccaacctgaagctgggcgagagaccccccgccctgctgggcagccagggcctgagaggcgccaccgccgaccccctgtgcgcccccgccagaaacccctgcgccaacggcggcctgtgcaccgtgctggcccccggcgaggtgggctgcgactgcagccacaccggcttcggcggcaagttctgcagcgaggaggagcaccccatggagggccccgcccacctgaccctgaacagcgaggtgggcagcctgctgttcagcgagggcggcgccggcagaggcggcgccggcgacgtgcaccagcccaccaagggcaaggaggagttcgtggccaccttcaagggcaacgagttcttctgctacgacctgagccacaaccccatccagagcagcaccgacgagatcaccctggccttcagaaccctgcagagaaacggcctgatgctgcacaccggcaagagcgccgactacgtgaacctgagcctgaagagcggcgccgtgtggctggtgatcaacctgggcagcggcgccttcgaggccctggtggagcccgtgaacggcaagttcaacgacaacgcctggcacgacgtgagagtgaccagaaacctgagacagcacgccggcatcggccacgccatggtgaccatcagcgtggacggcatcctgaccaccaccggctacacccaggaggactacaccatgctgggcagcgacgacttcttctacatcggcggcagccccaacaccgccgacctgcccggcagccccgtgagcaacaacttcatgggctgcctgaaggacgtggtgtacaagaacaacgacttcaagctggagctgagcagactggccaaggagggcgaccccaagatgaagctgcagggcgacctgagcttcagatgcgaggacgtggccgccctggaccccgtgaccttcgagagccccgaggccttcgtggccctgcccagatggagcgccaagagaaccggcagcatcagcctggacttcagaaccaccgagcccaacggcctgctgctgttcagccagggcagaagagccggcggcggcgccggcagccacagcagcgcccagagagccgactacttcgccatggagctgctggacggccacctgtacctgctgctggacatgggcagcggcggcatcaagctgagagccagcagcagaaaggtgaacgacggcgagtggtgccacgtggacttccagagagacggcagaaagggcagcatcagcgtgaacagcagaagcacccccttcctggccaccggcgacagcgagatcctggacctggagagcgagctgtacctgggcggcctgcccgagggcggcagagtggacctgcccctgccccccgaggtgtggaccgccgccctgagagccggctacgtgggctgcgtgagagacctgttcatcgacggcagaagcagagacctgagaggcctggccgaggcccagggcgccgtgggcgtggcccccttctgcagcagagagaccctgaagcagtgcgccagcgccccctgcagaaacggcggcgtgtgcagagagggctggaacagattcatctgcgactgcatcggcaccggcttcctgggcagagtgtgcgagagagaggccaccgtgctgagctacgacggcagcatgtacatgaagatcatgctgcccaacgccatgcacaccgaggccgaggacgtgagcctgagattcatgagccagagagcctacggcctgatgatggccaccaccagcagagagagcgccgacaccctgagactggagctggacggcggccagatgaagctgaccgtgaacctggactgcctgagagtgggctgcgcccccagcaagggccccgagaccctgttcgccggccacaagctgaacgacaacgagtggcacaccgtgagagtggtgagaagaggcaagagcctgcagctgagcgtggacaacgtgaccgtggagggccagatggccggcgcccacatgagactggagttccacaacatcgagaccggcatcatgaccgagagaagattcatcagcgtggtgcccagcaacttcatcggccacctgagcggcctggtgttcaacggccagccctacatggaccagtgcaaggacggcgacatcacctactgcgagctgaacgccagattcggcctgagagccatcgtggccgaccccgtgaccttcaagagcagaagcagctacctggccctggccaccctgcaggcctacgccagcatgcacctgttcttccagttcaagaccaccgcccccgacggcctgctgctgttcaacagcggcaacggcaacgacttcatcgtgatcgagctggtgaagggctacatccactacgtgttcgacctgggcaacggccccagcctgatgaagggcaacagcgacaagcccgtgaacgacaaccagtggcacaacgtggtggtgagcagagaccccggcaacgtgcacaccctgaagatcgacagcagaaccgtgacccagcacagcaacggcgccagaaacctggacctgaagggcgagctgtacatcggcggcctgagcaagaacatgttcagcaacctgcccaagctggtggccagcagagacggcttccagggctgcctggccagcgtggacctgaacggcagactgcccgacctgatcgccgacgccctgcacagaatcggccaggtggagagaggctgcgacggccccagcaccacctgcaccgaggagagctgcgccaaccagggcgtgtgcctgcagcagtgggacggcttcacctgcgactgcaccatgaccagctacggcggccccgtgtgcaacgaccccggcaccacctacatcttcggcaagggcggcgccctgatcacctacacctggccccccaacgacagacccagcaccagaatggacagactggccgtgggcttcagcacccaccagagaagcgccgtgctggtgagagtggacagcgccagcggcctgggcgactacctgcagctgcacatcgaccagggcaccgtgggcgtgatcttcaacgtgggcaccgacgacatcaccatcgacgagcccaacgccatcgtgagcgacggcaagtaccacgtggtgagattcaccagaagcggcggcaacgccaccctgcaggtggacagctggcccgtgaacgagagataccccgccggcaacttcgacaacgagagactggccatcgccagacagagaatcccctacagactgggcagagtggtggacgagtggctgctggacaagggcagacagctgaccatcttcaacagccaggccgccatcaagatcggcggcagagaccagggcagacccttccagggccaggtgagcggcctgtactacaacggcctgaaggtgctggccctggccgccgagagcgaccccaacgtgagaaccgagggccacctgagactggtgggcgagggccccagcgtgctgctgagcgccgagaccaccgccaccaccctgctggccgacatggccaccaccatcatggagaccaccaccaccatggccaccaccaccaccagaagaggcagaagccccaccctgagagacagcaccacccagaacaccgacgacctgctggtggccagcgccgagtgccccagcgacgacgaggacctggaggagtgcgagcccagcaccggcggcgagctgatcctgcccatcatcaccgaggacagcctggaccccccccccgtggccaccagaagccccttcgtgccccccccccccaccttctaccccttcctgaccggcgtgggcgccacccaggacaccctgcccccccccgccgccagaagaccccccagcggcggcccctgccaggccgagagagacgacagcgactgcgaggagcccatcgaggccagcggcttcgccagcggcgaggtgttcgacagcagcctgccccccaccgacgacgaggacttctacaccaccttccccctggtgaccgacagaaccaccctgctgagccccagaaagcccgcccccagacccaacctgagaaccgacggcgccaccggcgcccccggcgtgctgttcgcccccagcgcccccgcccccaacctgcccgccggcaagatgaaccacagagaccccctgcagcccctgctggagaacccccccctgggccccggcgcccccaccagcttcgagcccagaagacccccccccctgagacccggcgtgaccagcgcccccggcttcccccacctgcccaccgccaaccccaccggccccggcgagagaggcccccccggcgccgtggaggtgatcagagagagcagcagcaccaccggcatggtggtgggcatcgtggccgccgccgccctgtgcatcctgatcctgctgtacgccatgtacaagtacagaaacagagacgagggcagctaccaggtggaccagagcagaaactacatcagcaacagcgcccagagcaacggcgccgtggtgaaggagaaggcccccgccgcccccaagacccccagcaaggccaagaagaacaaggacaaggagtactacgtgtag

SEQ ID NO: 285090 - protein, 185 aa, Artificial Sequence
  derived and/or modified sequence
MDHRSRLRGTGLNRIPGTQSRAPRVPLPFHVQQEAREGEDWEREPPRQRPPIYEPPESEELPDNVMVSKPAPYWEGTAVIDGEFKELKLTDYRGKYLVFFFYPLDFTFVCPTEIIAFGDRLEEFRSINTEVVACSVDSQFTHLAWINTPRRQGGLGPIRIPLLSDLTHQISKDYGVYLEDSGHTL

SEQ ID NO: 285091 - DNA, 558 bp, Artificial Sequence
  derived and/or modified sequence
atggatcatcggagccgactccgaggaaccggactgaatcggatacctggtactcaatcgcgggctccgcgagtccctctgcccttccatgtccagcaagaagccagagaaggagaggactgggagcgggaaccgccacggcagagacctccaatctacgaacctccggagagcgaagaacttcccgataatgtgatggtatccaagccagccccttattgggagggcacagccgtgatcgacggtgagttcaaagagctaaagctgaccgactatagaggcaagtacctggtgttttttttctacccactggattttacattcgtctgtccaactgaaatcatcgccttcggcgacaggctggaagagttccggagcataaataccgaagtggtcgcctgtagcgtggattcacagtttacccaccttgcatggataaacaccccccgacggcaagggggtcttggccctattagaattcccctcctgagcgatctgacacaccaaatcagcaaggattacggagtctacctggaagactcagggcataccctgtag

SEQ ID NO: 285092 - DNA, 486 bp, Artificial Sequence
  derived and/or modified sequence
taatgtccgaccgagataattgcatttggcgacagactggaggaattccgcagtatcaataccgaggtggtagcatgcagcgtggactcccagttcacacaccttgcatggatcaacacacctaggagacagggaggactaggacctattagaatcccgctcctgtcagacctcacacaccagatctccaaggactatggagtttacttggaagactcgggccacaccctgaggggcctcttcatcatagatgacaaagggatcttgagacaaattacactgaatgatctccccgttggaagatccgtcgacgagacactgcgcctggtgcaggccttccagtataccgacaaacatggggaggtatgccccgctgggtggaaaccgggtagcgagaccatcaagccagaagacaccatgaaagcctggtggcccagggagagttacaatcctagaagcagttggaaagcagaagtgtttcgctag

SEQ ID NO: 285093 - DNA, 558 bp, Artificial Sequence
  derived and/or modified sequence
atggaccaccgcagtagactgaggggcacaggcctgaaccgtatcccaggaacacagagcagggccccaagggtgcctctcccatttcacgtccagcaggaagctagagagggtgaggactgggaaagggagcctcctagacagagaccacctatctacgagccacccgaatctgaggaactgccagataacgtgatggtatcgaaacccgcgccttactgggaaggtacagccgtcattgacggtgaatttaaggaattgaagctcacagactaccgggggaagtatctcgtattttttttctaccctctagactttacatttgtgtgccccactgaaatcatagcttttggggataggctggaagaattccgctcaattaataccgaggtggtggcttgcagtgttgatagccaatttacccacctcgcttggattaacacacctcgccgacaaggaggactggggcctatccgtattcccctactaagtgatctgacccaccagatcagcaaagattacggcgtgtatttggaggatagtggacacactttgtag

SEQ ID NO: 285094 - DNA, 486 bp, Artificial Sequence
  derived and/or modified sequence
tgatgtccaactgagattattgctttcggagatcggctggaggaatttaggtcaatcaataccgaagtggtggcctgctctgtcgatagccaatttactcacctggcttggattaataccccgcgccggcagggtgggctcggccctattcgaatcccccttttatctgatttaacacatcaaatctccaaggattacggcgtctatcttgaggatagtgggcacactctccgcggtcttttcattatcgacgacaagggaattcttcggcaaattacactgaatgacttgccagttgggaggagcgtggatgaaacattgaggctggtccaggcatttcagtataccgacaaacacggagaagtatgccctgccggttggaaacctggatcggaaacgatcaagcccgaagatactatgaaagcatggtggcccagagaatcttacaaccctcgtagtagttggaaagcagaagtgtttagatag

SEQ ID NO: 285095 - DNA, 554 bp, Artificial Sequence
  derived and/or modified sequence
gtgtccaactgaaattatcgcttttggcgacagacttgaagaattcagatctataaatactgaagtggtagcatgctctgttgattcacagtttacccatttggcctggattaatacccctcgaagacaaggaggacttgggccaataaggattccacttctttcagatttgacccatcagatctcaaaggactatggtgtatacctagaggactcaggccacactcttagaggtctcttcattattgatgacaaaggaatcctaagacaaattactctgaatgatcttcctgtgggtagatcagtggatgagacactacgtttggttcaagcattccagtacactgacaaacacggagaagtctgccctgctggctggaaacctggtagtgaaacaatcaaacctgaagataccatgaaagcctggtggccaagagagagctataatcccagatccagctggaaagctgaagtatttcgataaactgaattgagaaatacttcttcaagttatgatgcttgaaagttctcaataaagttcacggtttcattac

SEQ ID NO: 285096 - DNA, 558 bp, Artificial Sequence
  derived and/or modified sequence
atggatcacagaagccgtctgcgcggtaccggcctgaatcgaatccccggcactcagagccgtgcaccccgagttccactgcctttccatgtccagcaggaagccagagagggagaagactgggagagggaacctccaagacagcgccctccaatatacgagccccctgagagcgaagaattaccggataatgtgatggtgagtaaacctgccccctactgggaagggactgccgtcattgatggggagtttaaagaactaaagttgacagactaccgcggtaagtatttagtcttcttcttttatcctctcgactttacctttgtctgtccgaccgaaatcatagcctttggagatcgtttagaagagtttagatcaatcaacactgaagttgtggcctgcagtgttgactcacagttcacgcatctcgcttggatcaatacaccaaggcgacagggaggtcttggacctatcagaatccccctgctgagcgaccttacccatcagatcagtaaggattatggggtgtacttagaggactcgggacatactttatag

SEQ ID NO: 285097 - DNA, 486 bp, Artificial Sequence
  derived and/or modified sequence
taatgtccgaccgaaatcatcgccttcggagacagattagaagagtttagaagcatcaacacagaagtcgttgcgtgttccgtggattctcagtttactcacctagcttggatcaacacaccaagacgccagggaggcttaggccctattcgcattcccctgctgtctgacctgacacatcaaatctctaaggactacggtgtatacctcgaggacagtgggcataccctgcgaggactattcattatcgacgataaaggaatacttagacagattacgctgaatgacctgcccgtcggcagatccgtcgacgagactcttcgactggtacaagccttccagtataccgataagcacggagaagtttgtcccgcagggtggaagccaggttccgaaactattaagcctgaggacactatgaaagcttggtggccaagggaatcctacaacccaagatcctcctggaaagcagaagtttttaggtag

SEQ ID NO: 285098 - DNA, 558 bp, Artificial Sequence
  derived and/or modified sequence
atggaccacagaagcagactgagaggcaccggcctgaacagaatccccggcacccagagcagagcccccagagtgcccctgcccttccacgtgcagcaggaggccagagagggcgaggactgggagagagagccccccagacagagaccccccatctacgagccccccgagagcgaggagctgcccgacaacgtgatggtgagcaagcccgccccctactgggagggcaccgccgtgatcgacggcgagttcaaggagctgaagctgaccgactacagaggcaagtacctggtgttcttcttctaccccctggacttcaccttcgtgtgccccaccgagatcatcgccttcggcgacagactggaggagttcagaagcatcaacaccgaggtggtggcctgcagcgtggacagccagttcacccacctggcctggatcaacacccccagaagacagggcggcctgggccccatcagaatccccctgctgagcgacctgacccaccagatcagcaaggactacggcgtgtacctggaggacagcggccacaccctgtag

SEQ ID NO: 285099 - DNA, 486 bp, Artificial Sequence
  derived and/or modified sequence
tgatgccccaccgagatcatcgccttcggcgacagactggaggagttcagaagcatcaacaccgaggtggtggcctgcagcgtggacagccagttcacccacctggcctggatcaacacccccagaagacagggcggcctgggccccatcagaatccccctgctgagcgacctgacccaccagatcagcaaggactacggcgtgtacctggaggacagcggccacaccctgagaggcctgttcatcatcgacgacaagggcatcctgagacagatcaccctgaacgacctgcccgtgggcagaagcgtggacgagaccctgagactggtgcaggccttccagtacaccgacaagcacggcgaggtgtgccccgccggctggaagcccggcagcgagaccatcaagcccgaggacaccatgaaggcctggtggcccagagagagctacaaccccagaagcagctggaaggccgaggtgttcagatag

SEQ ID NO: 285100 - DNA, 558 bp, Artificial Sequence
  derived and/or modified sequence
atggaccacaggtccagactacgaggtacgggactcaaccgtattcccggaactcagtctcgtgccccccgggtaccactcccctttcacgtgcagcaggaggctagggaaggggaggattgggaacgagagcccccgcggcagaggcccccaatctatgaacctccagaatctgaggagcttccagataacgtgatggtgtcaaaaccagccccctactgggagggcacagccgtgatagatggagagtttaaggagttaaaactcacggactaccgtgggaaatacttggtattttttttctatccacttgatttcacatttgtgtgccctactgagataatcgccttcggagaccggctagaagagttcagatccataaatacagaggtggtggcctgttctgtcgacagccagtttacccacctagcctggatcaatacacccaggcggcagggtggtcttgggcccatccgcatccccctactcagcgatctgacccaccaaattagtaaggactatggggtgtacttagaggacagtggacatacattgtag

SEQ ID NO: 285101 - DNA, 486 bp, Artificial Sequence
  derived and/or modified sequence
tgatgtcccacagagataatagccttcggcgataggctcgaggaattccgatccatcaacaccgaggtggttgcgtgtagtgtcgattctcagtttactcacctggcctggataaatacgccccgaaggcagggtggacttggccctatccgtatccccctactgtccgacttgacacaccagatcagcaaggattacggagtgtacctggaggactctggccacacccttcgtggcctgttcattatcgacgataaaggcatcctcaggcagattacactcaacgatctccctgtcggccgctctgttgacgagacccttaggttggtacaggccttccagtacacagataagcacggcgaggtgtgtcctgccggctggaagccagggagtgaaactatcaagcccgaggacaccatgaaagcgtggtggcctcgcgaaagctataaccccaggtcatcctggaaggctgaggtctttcggtag

SEQ ID NO: 285102 - DNA, 558 bp, Artificial Sequence
  derived and/or modified sequence
atggaccacaggagccggctgcggggcaccggcctgaaccgcatccctggcacccagagccgggccccccgggtgcccctgcccttccacgtgcagcaggaggcccgggagggggaggactgggagcgggagcccccccggcagaggcctcccatctatgagcccccagagagcgaggagctgcctgacaacgtgatggtgtccaagccagccccctactgggagggcacagctgtgattgatggagagttcaaggagctgaagctgacagactaccggggcaagtacctggtgttcttcttctaccccctggacttcacctttgtgtgccccacagagatcatcgcctttggagaccggctggaggagttccgcagcatcaacacagaggtggtggcctgcagcgtggacagccagttcacccacctggcctggatcaacaccccccggcggcagggcggcctgggccccatccgcatccccctgctgagtgacctgacccaccagatcagcaaggactatggagtgtacctggaggacagcggccacaccctgtag

SEQ ID NO: 285103 - DNA, 486 bp, Artificial Sequence
  derived and/or modified sequence
tgatgccccacagagatcatcgcctttggagaccggctggaggagttccgcagcatcaacacagaggtggtggcctgcagcgtggacagccagttcacccacctggcctggatcaacaccccccggcggcagggcggcctgggccccatccgcatccccctgctgagtgacctgacccaccagatcagcaaggactatggagtgtacctggaggacagcggccacaccctgcggggcctcttcatcattgatgacaagggcatcctgcggcagatcaccctgaatgacctgcctgtgggccgctctgtggatgagaccctgcggctggtgcaggccttccagtacacagacaagcatggagaggtgtgcccagctggctggaagccaggcagcgagaccatcaagccagaggacaccatgaaggcctggtggccccgggagagctacaaccccaggagctcctggaaggccgaggtgttcagatag

SEQ ID NO: 285104 - DNA, 815 bp, Artificial Sequence
  derived and/or modified sequence
agggagctccaacagaactgagggacgaacagtaggtgcctgagagctggccgatctggtcactctctccagtgggccacaggggcccacttggtgggcagtctctgctgccagctagggcatctcagctcagcccagagcaaagacgtgtagggacataacgctttcctcaagcttcctttcccaggtccaaacttagaggcccagttttgggcctagaattcactgaggtttgtggctgtttgtccaacagtcaccatggatcaccgaagccgactacggggcacaggcctgaaccgaatccctgggactcagtcccgagccccccgagtcccactccccttccacgtgcaacaggaggccagggaaggagaagactgggagcgagagccacctcgtcagaggcctcctatctatgagccaccagaaagtgaagagctgccagataatgttatggtttccaagccagcgccctactgggaaggaacagctgtgatcgatggagaatttaaggagctgaagttaactgattatcgtgggaaatacttggttttcttcttctacccacttgatttcacatttgtgtgtccaactgaaattatcgcttttggcgacagacttgaagaattcagatctataaatactgaagtggtagcatgctctgttgattcacagtttacccatttggcctggattaatacccctcgaagacaaggaggacttgggccaataaggattccacttctttcagatttgacccatcagatctcaaaggactatggtgtatacctagaggactcaggccacactcttag

SEQ ID NO: 285105 - DNA, 558 bp, Artificial Sequence
  derived and/or modified sequence
atggaccaccggagccggctgcggggcaccggcctgaaccggatccctggcacacagtctagggccccaagagtgcctctgccattccacgtgcagcaggaggcccgcgaaggcgaggattgggaaagagagccaccacgccaacggccgcctatttatgagcccccagagagcgaggaactccctgataacgttatggtctcgaagccagccccgtactgggagggaaccgcagtgattgacggcgaatttaaagagctcaagctgacagactacagggggaagtatctggtcttttttttttatccacttgacttcactttcgtctgccccactgaaatcatagccttcggcgaccggctggaagagttccgctctatcaacacagaggtggtcgcatgctccgtcgactcccagttcacacacctggcttggattaacactcccagaagacagggcggcctcggaccaatccggatccctctgttgtctgacctgacacatcaaatttctaaggactacggtgtatacctcgaggactctggccacacactttag

SEQ ID NO: 285106 - DNA, 486 bp, Artificial Sequence
  derived and/or modified sequence
tgatgccccaccgagatcatcgccttcggcgaccggctggaggagttccgttccatcaatacagaggtcgtggcttgcagtgtggactcccaatttacacacctggcatggattaatacgccacggcgccagggcggcctcggtcccatccgaatccctcttctgtccgatctgacccaccagatatccaaagactacggggtgtacctggaagactcgggccacaccctacgcggtctgtttatcatcgacgacaaggggattttgcgccagattactctgaatgatcttcctgtgggtagatccgttgacgaaacgctgaggctagtccaggcttttcagtataccgacaaacacggcgaggtgtgtcccgctggctggaaaccgggttcagagacaatcaaaccagaagataccatgaaggcttggtggccacgagagagctacaatcctcggtcttcctggaaggcagaggtgtttcgatag

SEQ ID NO: 285107 - RNA, 558 nt, Artificial Sequence
  derived and/or modified sequence
auggaccaccgcaguagacugaggggcacaggccugaaccguaucccaggaacacagagcagggccccaagggugccucucccauuucacguccagcaggaagcuagagagggugaggacugggaaagggagccuccuagacagagaccaccuaucuacgagccacccgaaucugaggaacugccagauaacgugaugguaucgaaacccgcgccuuacugggaagguacagccgucauugacggugaauuuaaggaauugaagcucacagacuaccgggggaaguaucucguauuuuuuuucuacccucuagacuuuacauuugugugccccacugaaaucauagcuuuuggggauaggcuggaagaauuccgcucaauuaauaccgaggugguggcuugcaguguugauagccaauuuacccaccucgcuuggauuaacacaccucgccgacaaggaggacuggggccuauccguauuccccuacuaagugaucugacccaccagaucagcaaagauuacggcguguauuuggaggauaguggacacacuuuguag

SEQ ID NO: 285108 - RNA, 486 nt, Artificial Sequence
  derived and/or modified sequence
ugauguccaacugagauuauugcuuucggagaucggcuggaggaauuuaggucaaucaauaccgaagugguggccugcucugucgauagccaauuuacucaccuggcuuggauuaauaccccgcgccggcagggugggcucggcccuauucgaaucccccuuuuaucugauuuaacacaucaaaucuccaaggauuacggcgucuaucuugaggauagugggcacacucuccgcggucuuuucauuaucgacgacaagggaauucuucggcaaauuacacugaaugacuugccaguugggaggagcguggaugaaacauugaggcugguccaggcauuucaguauaccgacaaacacggagaaguaugcccugccgguuggaaaccuggaucggaaacgaucaagcccgaagauacuaugaaagcaugguggcccagagaaucuuacaacccucguaguaguuggaaagcagaaguguuuagauag

SEQ ID NO: 285109 - RNA, 558 nt, Artificial Sequence
  derived and/or modified sequence
auggaucacagaagccgucugcgcgguaccggccugaaucgaauccccggcacucagagccgugcaccccgaguuccacugccuuuccauguccagcaggaagccagagagggagaagacugggagagggaaccuccaagacagcgcccuccaauauacgagcccccugagagcgaagaauuaccggauaaugugauggugaguaaaccugcccccuacugggaagggacugccgucauugauggggaguuuaaagaacuaaaguugacagacuaccgcgguaaguauuuagucuucuucuuuuauccucucgacuuuaccuuugucuguccgaccgaaaucauagccuuuggagaucguuuagaagaguuuagaucaaucaacacugaaguuguggccugcaguguugacucacaguucacgcaucucgcuuggaucaauacaccaaggcgacagggaggucuuggaccuaucagaaucccccugcugagcgaccuuacccaucagaucaguaaggauuaugggguguacuuagaggacucgggacauacuuuauag

SEQ ID NO: 285110 - RNA, 486 nt, Artificial Sequence
  derived and/or modified sequence
uaauguccgaccgaaaucaucgccuucggagacagauuagaagaguuuagaagcaucaacacagaagucguugcguguuccguggauucucaguuuacucaccuagcuuggaucaacacaccaagacgccagggaggcuuaggcccuauucgcauuccccugcugucugaccugacacaucaaaucucuaaggacuacgguguauaccucgaggacagugggcauacccugcgaggacuauucauuaucgacgauaaaggaauacuuagacagauuacgcugaaugaccugcccgucggcagauccgucgacgagacucuucgacugguacaagccuuccaguauaccgauaagcacggagaaguuugucccgcaggguggaagccagguuccgaaacuauuaagccugaggacacuaugaaagcuugguggccaagggaauccuacaacccaagauccuccuggaaagcagaaguuuuuagguag

SEQ ID NO: 285111 - protein, 696 aa, Artificial Sequence
  derived and/or modified sequence
MKAPIPHLILLYATFTQSLKVVTKRGSADGCTDWSIDIKKYQVLVGEPVRIKCALFYGYIRTNYSLAQSAGLSLMWYKSSGPGDFEEPIAFDGSRMSKEEDSIWFRPTLLQDSGLYACVIRNSTYCMKVSISLTVGENDTGLCYNSKMKYFEKAELSKSKEISCRDIEDFLLPTREPEILWYKECRTKTWRPSIVFKRDTLLIREVREDDIGNYTCELKYGGFVVRRTTELTVTAPLTDKPPKLLYPMESKLTIQETQLGDSANLTCRAFFGYSGDVSPLIYWMKGEKFIEDLDENRVWESDIRILKEHLGEQEVSISLIVDSVEEGDLGNYSCYVENGNGRRHASVLLHKRELMYTVELAGGLGAILLLLVCLVTIYKCYKIEIMLFYRNHFGAEELDGDNKDYDAYLSYTKVDPDQWNQETGEEERFALEILPDMLEKHYGYKLFIPDRDLIPTGTYIEDVARCVDQSKRLIIVMTPNYVVRRGWSIFELETRLRNMLVTGEIKVILIECSELRGIMNYQEVEALKHTIKLLTVIKWHGPKCNKLNSKFWKRLQYEMPFKRIEPITHEQALDVSEQGPFGELQTVSAISMAAATSTALATAHPDLRSTFHNTYHSQMRQKHYYRSYEYDVPPTGTLPLTSIGNQHTYCNIPMTLINGQRPQTKSSREQNPDEAHTNSAILPLLPRETSISSVIW

SEQ ID NO: 285112 - DNA, 2091 bp, Artificial Sequence
  derived and/or modified sequence
atgaaggctcccattccacaccttattctgctgtacgcgacctttacacagtctttgaaggtagtcacgaagaggggcagcgcagacggctgtaccgactggagcattgatataaaaaagtaccaggtcctggtgggcgagccggtccggataaagtgcgccctgttttacggatacatccgaacgaactatagcctggctcagagcgccggtctgagtctcatgtggtacaagtcctcaggacccggagactttgaggaaccgatcgctttcgacggatcacgaatgtcaaaagaggaagattctatttggttcagacccacacttctccaggactccgggctgtatgcctgtgtcattcgtaattctacttattgcatgaaggtatccatctctttgactgtgggcgagaacgacacaggactttgttacaacagtaagatgaagtactttgagaaggctgaactgagcaaatccaaagagatctcgtgccgggacatcgaggactttttgctgccaacgagagaaccagaaatcctctggtacaaagaatgccgcaccaaaacttggcgtccctccatcgtattcaagcgcgatacactgttgatccgtgaggtgcgcgaggacgacataggcaactacacatgcgagcttaaatatggcggcttcgtggtacgtcggacaactgaactaacagtgaccgccccattgacagacaaaccgcccaagttgctgtaccctatggagtccaaactcacaattcaggagacccagcttggggattcagcaaatctgacttgtcgggcattctttgggtattccggagacgtcagtcctttgatctactggatgaagggagagaagttcatcgaggatctcgatgagaaccgcgtatgggaatcggatataaggatcctgaaggagcacttgggcgagcaggaggtgtccatttctctaattgtggactctgtggaggaaggtgacttagggaactattcatgttatgtcgaaaatggcaatgggcgccgccatgcctctgtcctgctccataagcgcgaattaatgtacaccgtggagttggccggcggtctgggggcaatccttctgctactagtgtgtctggtcactatttacaagtgctacaagatcgagattatgcttttttacaggaaccactttggggccgaggaacttgacggggataataaggattacgacgcctacctctcgtacaccaaggttgacccggatcagtggaatcaggagactggcgaggaagaaaggttcgcactcgagattcttcccgatatgcttgagaagcactatggatataaactgttcattcctgatagagatctcattccaactggcacatacattgaggacgtggctaggtgtgtggaccagtctaagcgactaatcattgtgatgaccccaaactacgttgtgcgcagaggttggtcaatttttgaactcgaaacacgtcttagaaacatgttggtgactggagagatcaaggtgatcctcattgaatgtagcgaattacgcgggattatgaattatcaagaagtcgaagctctaaagcacacaatcaaactcttaaccgtcatcaagtggcacggccccaagtgcaacaagttaaattctaaattctggaaaaggttacagtacgaaatgcccttcaaaaggattgagccaattacccacgaacaagctctagatgtgagcgagcaaggccccttcggagaactgcagaccgtttcagctatctcaatggccgccgcaacgtctaccgcgctggcaaccgcccatcccgacctgaggtcaactttccataatacttatcattcacagatgaggcagaagcattattaccgctcatacgagtacgatgtgccacctacgggcaccctgcccctaacatctattggcaatcagcacacgtactgcaacatacctatgacactgatcaacggccagaggcctcagacaaaatcaagcagagagcaaaaccctgatgaagctcacactaattctgctatcctgccattgctgcctagagagacatccatctcctcggtgatttggtag

SEQ ID NO: 285113 - DNA, 2091 bp, Artificial Sequence
  derived and/or modified sequence
atgaaggctcccattccacacttgatcctgttgtacgccacattcactcagagtcttaaggtagtgaccaaacgaggcagtgcggatggatgcactgattggtccatagacatcaaaaagtaccaggtcttagtgggcgaacccgttcggattaaatgcgctttattctatggctacatccggacaaactactccctggcccagagtgctgggctgtctctgatgtggtacaaaagtagtggaccaggcgattttgaggaaccaatcgctttcgacgggtctagaatgtctaaggaggaagactctatttggtttcggccaaccctcctgcaagattcgggactttatgcctgcgtcatcaggaatagtacctactgcatgaaagtgtctatttcccttaccgtgggagagaacgatacgggcctgtgttacaactccaagatgaagtacttcgagaaagcagagttgtctaagagcaaagaaattagctgccgggacattgaggattttctgctgcccacacgggagcctgagattttgtggtacaaagaatgtaggaccaagacatggaggccatccattgtgtttaaacgcgacaccctcttgattagagaagtccgggaggacgatattggaaattatacctgcgagctcaagtacggcgggttcgtggtccgtaggactacagagctcaccgtgactgcacctctgaccgataagccacccaagctgctctacccaatggagagcaagctgactattcaggagacgcagctgggagactccgcgaatcttacttgccgcgccttttttgggtacagcggggatgtgtcgcctctaatctactggatgaaaggagagaaatttatcgaagacctggacgagaaccgcgtgtgggagagcgacattcgaattctgaaggaacacctaggagagcaagaggtgtccatcagtctgatagtagactctgttgaagagggggacctgggaaactacagctgctacgtggaaaacggcaatgggaggcgacatgctagcgttcttctccacaagcgagagctgatgtacaccgtggagttggccggtggcctgggcgccattctactgctattagtgtgtctggttaccatctacaagtgctacaaaatcgagatcatgctcttctaccggaatcactttggagctgaggagctcgacggcgacaataaagattatgatgcttatctcagctacaccaaagttgacccagaccaatggaaccaggagactggcgaagaagagaggttcgcacttgaaatccttccggacatgcttgagaagcattacggatataagctgttcattccagatcgggatcttatacccaccggcacttatattgaggacgtcgcgcgatgtgtcgatcagtctaagcggctgatcattgtgatgacacccaattatgtcgtgcgcagggggtggtctatctttgagctggagaccagattgcgcaatatgctggttacaggagagattaaggtgatcctgatagaatgctctgagcttcgcggcatcatgaactatcaggaagtggaagcccttaagcataccatcaaactgctgaccgttatcaagtggcacggcccgaaatgtaacaaattaaactcaaagttctggaagcggctccagtatgaaatgccctttaaacgtattgaacccatcacacatgagcaagctctggatgtgtcagagcagggaccctttggcgagttgcagaccgtgagcgcaatctctatggccgccgcgacaagtactgctctggccacagctcatcctgatcttcgttcaacttttcataacacctatcacagccagatgcggcagaaacactactacagatcatatgaatacgacgtgccaccgacaggcactctccccctgacctccatcggtaaccagcatacatattgtaacatccccatgactcttatcaacggacaacgcccacaaacaaaatcctcaagggaacagaacccagacgaggcgcacacaaactctgcaatcctgcccctcctgccaagagagacctcgatttcatctgtgatctggtag

SEQ ID NO: 285114 - DNA, 2091 bp, Artificial Sequence
  derived and/or modified sequence
atgaaagctccgattccacacttgattctcttatacgctacttttactcagagtttgaaggttgtgaccaaaagaggctccgccgatggatgcactgactggtctatcgatatcaagaaatatcaagttttggtgggagagcctgttcgaatcaaatgtgcactcttttatggttatatcagaacaaattactcccttgcccaaagtgctggactcagtttgatgtggtacaaaagttctggtcctggagactttgaagagccaatagcctttgacggaagtagaatgagcaaagaagaagactccatttggttccggccaacattgctacaggacagtggtctctacgcctgtgtcatcagaaactccacttactgtatgaaagtatccatctcactgacagtgggtgaaaatgacactggactctgctataattccaagatgaagtattttgaaaaagctgaacttagcaaaagcaaggaaatttcatgccgtgacatagaggattttctactgccaaccagagaacctgaaatcctttggtacaaggaatgcaggacaaaaacatggaggccaagtattgtattcaaaagagatactctgcttataagagaagtcagagaagatgacattggaaattatacctgtgaattaaaatatggaggctttgttgtgagaagaactactgaattaactgttacagcccctctgactgataagccacccaagcttttgtatcctatggaaagtaaactgacaattcaggagacccagctgggtgactctgctaatctaacctgcagagctttctttgggtacagcggagatgtcagtcctttaatttactggatgaaaggagaaaaatttattgaagatctggatgaaaatcgagtttgggaaagtgacattagaattcttaaggagcatcttggggaacaggaagtttccatctcattaattgtggactctgtggaagaaggtgacttgggaaattactcctgttatgttgaaaatggaaatggacgtcgacacgccagcgttctccttcataaacgagagctaatgtacacagtggaacttgctggaggccttggtgctatactcttgctgcttgtatgtttggtgaccatctacaagtgttacaagatagaaatcatgctcttctacaggaatcattttggagctgaagagctcgatggagacaataaagattatgatgcatacttatcatacaccaaagtggatcctgaccagtggaatcaagagactggggaagaagaacgttttgcccttgaaatcctacctgatatgcttgaaaagcattatggatataagttgtttataccagatagagatttaatcccaactggaacatacattgaagatgtggcaagatgtgtagatcaaagcaagcggctgattattgtcatgaccccaaattacgtagttagaaggggctggagcatctttgagctggaaaccagacttcgaaatatgcttgtgactggagaaattaaagtgattctaattgaatgcagtgaactgagaggaattatgaactaccaggaggtggaggccctgaagcacaccatcaagctcctgacggtcattaaatggcatggaccaaaatgcaacaagttgaactccaagttctggaaacgtttacagtatgaaatgccttttaagaggatagaacccattacacatgagcaggctttagatgtcagtgagcaagggccttttggggagctgcagactgtctcggccatttccatggccgcggccacctccacagctctagccactgcccatccagatctccgttctacctttcacaacacgtaccattcacaaatgcgtcagaaacactactaccgaagctatgagtacgacgtacctcctaccggcaccctgcctcttacctccataggcaatcagcatacctactgtaacatccctatgacactcatcaacgggcagcggccacagacaaaatcgagcagggagcagaatccagatgaggcccacacaaacagtgccatcctgccgctgttgccaagggagaccagtatatccagtgtgatatggtga

SEQ ID NO: 285115 - DNA, 3667 bp, Artificial Sequence
  derived and/or modified sequence
gagacaccttcccaaacagcaggggttgtgtgctttcacatagcagtactgtacaaggaaaaccccgtcggatctgttattgcgggatacttgtgaaatatacataggattctttcttatggctgcatcccggatctggaaattttacttggggaccaggaggatttgaaaggctgcatgtactcagaagatttgcaagcaacactccaattcttgtcatagagctcgcagacttctcacttatcggcttttttccttccttattttttaagaattattcttattttcccctctctttttctgctctctcctctctcagtctctccttttctatctgcctcttcatttttctcctagtctgtttttttttttcctgctctgcacctggattgtatcttcagcaaacaatcgggcactttgagaactaactggagacagtcttgtagggaagatctgtatggaattatctgcttttatggtgaacttggcatttgtgaatgggaatcttgttcacaatattaattgctagcaaaaacaagaaaaagaacacaggagtaaaacgtggatttttctgaatacgcattgtgatgaccagcaattaccttaccgactaatatccagaggagaataatttggaagactgttgtggggaacggcctttaagagctggaagatgaaagctccgattccacacttgattctcttatacgctacttttactcagagtttgaaggttgtgaccaaaagaggctccgccgatggatgcactgactggtctatcgatatcaagaaatatcaagttttggtgggagagcctgttcgaatcaaatgtgcactcttttatggttatatcagaacaaattactcccttgcccaaagtgctggactcagtttgatgtggtacaaaagttctggtcctggagactttgaagagccaatagcctttgacggaagtagaatgagcaaagaagaagactccatttggttccggccaacattgctacaggacagtggtctctacgcctgtgtcatcagaaactccacttactgtatgaaagtatccatctcactgacagtgggtgaaaatgacactggactctgctataattccaagatgaagtattttgaaaaagctgaacttagcaaaagcaaggaaatttcatgccgtgacatagaggattttctactgccaaccagagaacctgaaatcctttggtacaaggaatgcaggacaaaaacatggaggccaagtattgtattcaaaagagatactctgcttataagagaagtcagagaagatgacattggaaattatacctgtgaattaaaatatggaggctttgttgtgagaagaactactgaattaactgttacagcccctctgactgataagccacccaagcttttgtatcctatggaaagtaaactgacaattcaggagacccagctgggtgactctgctaatctaacctgcagagctttctttgggtacagcggagatgtcagtcctttaatttactggatgaaaggagaaaaatttattgaagatctggatgaaaatcgagtttgggaaagtgacattagaattcttaaggagcatcttggggaacaggaagtttccatctcattaattgtggactctgtggaagaaggtgacttgggaaattactcctgttatgttgaaaatggaaatggacgtcgacacgccagcgttctccttcataaacgagagctaatgtacacagtggaacttgctggaggccttggtgctatactcttgctgcttgtatgtttggtgaccatctacaagtgttacaagatagaaatcatgctcttctacaggaatcattttggagctgaagagctcgatggagacaataaagattatgatgcatacttatcatacaccaaagtggatcctgaccagtggaatcaagagactggggaagaagaacgttttgcccttgaaatcctacctgatatgcttgaaaagcattatggatataagttgtttataccagatagagatttaatcccaactggaacatacattgaagatgtggcaagatgtgtagatcaaagcaagcggctgattattgtcatgaccccaaattacgtagttagaaggggctggagcatctttgagctggaaaccagacttcgaaatatgcttgtgactggagaaattaaagtgattctaattgaatgcagtgaactgagaggaattatgaactaccaggaggtggaggccctgaagcacaccatcaagctcctgacggtcattaaatggcatggaccaaaatgcaacaagttgaactccaagttctggaaacgtttacagtatgaaatgccttttaagaggatagaacccattacacatgagcaggctttagatgtcagtgagcaagggccttttggggagctgcagactgtctcggccatttccatggccgcggccacctccacagctctagccactgcccatccagatctccgttctacctttcacaacacgtaccattcacaaatgcgtcagaaacactactaccgaagctatgagtacgacgtacctcctaccggcaccctgcctcttacctccataggcaatcagcatacctactgtaacatccctatgacactcatcaacgggcagcggccacagacaaaatcgagcagggagcagaatccagatgaggcccacacaaacagtgccatcctgccgctgttgccaagggagaccagtatatccagtgtgatatggtgacagaaaagcaagggacatcccgtccctgggaggttgagtggaatctgcagtccagtgcctggaactaaatcctcgactgctgctgttaaaaaacatgcattagaatctctagaacacgaggaaaaacagggtcttgtacatatgttttttggaatttctttgtagcatcagtgtcctcctgttttaccatgtcttttaccattacattttttgactttgttttatatgtcgttggaatttgtaaatttacattttttttaaagaagagactgatgtgtagatagaaaaccctttttttgcttcattagtttagttttagaatgggtttttattttatttccttttttaaaattttactttgcttttaacatttccttggggtgcttggacaaatctatccgatgggacaaggagcaccggattctttctcgggttctgcctagcatcaactgggccacgtcggccttcagagaacagtgcaacaaatgccagcattgccattcgggggaaaaaaaaaaaaaaaaaaaaaagatgagaagaacacttgttcataggagggccccaccagtcagagccctgaatctcttccttgtcccacctcattccccacctctacctttctaatggcggcatgatgtgtaaactctgtgcaggggtgggggcgggtctaactgtcttaacattcaagtcactgctcttcagaatacactctagacccaaaggtgtgctaatcacttcacagtgaccactacagagtactaagaagagaagatcaagggcatgaaattggggaagagtgttatttccgttttttaaatgagttgatgtacccttatatatatatacatatatatataaatataaatatatataaaaacaacaaaacaaaacaaaaaaagaaaa

SEQ ID NO: 285116 - DNA, 2091 bp, Artificial Sequence
  derived and/or modified sequence
atgaaggcccccatcccccacctgatcctgctgtatgccaccttcacccagagcctgaaggtggtgaccaagaggggcagcgcagatggctgcacagactggagcattgacatcaagaagtaccaggtgctggtgggggagcctgtgcgcatcaagtgtgccctcttctacggctacatccgcaccaactacagcctggcccagagcgctggcctgagcctgatgtggtacaagagcagcggccctggggactttgaggagcccatcgcctttgatggcagcaggatgagcaaggaggaggacagcatctggttccggcccaccctgctgcaggacagcggcctgtatgcctgcgtcatccggaacagcacctactgcatgaaggtgtccatcagcctgactgtgggagaaaatgacaccggcctgtgctacaacagcaagatgaagtactttgagaaggccgagctgagcaagagcaaggagatcagctgccgggacatcgaggacttcctgctgcccacccgggagcctgagatcctgtggtacaaggagtgcaggaccaagacctggaggcccagcatcgtgttcaagagggacaccctgctgatccgggaggtgcgggaggatgacatcggcaactacacctgtgagctgaagtatggaggctttgtggtgcggaggaccacagagctgactgtgacagcccccctgacagacaagccacccaagctgctgtaccccatggagagcaagctgaccatccaggagacccagctgggggacagcgccaacctgacctgccgggccttcttcggctacagcggagatgtgagccccctcatctactggatgaagggggagaagttcatcgaggacctggatgaaaatagagtgtgggagagtgacatccgcatcctgaaggagcacctgggggagcaggaggtgtccatcagcctcatcgtggacagcgtggaggagggggacctgggcaactacagctgctacgtggagaatggaaatggaagaagacatgcctctgtgctgctgcacaagcgggagctgatgtacacagtggagctggccggcggcctgggcgccatcctgctgctgctggtgtgcctggtgaccatctacaagtgctacaagattgagatcatgctgttctacagaaaccactttggagctgaggagctggatggagacaacaaggactatgatgcctacctgagctacaccaaggtggaccctgaccagtggaaccaggagactggagaggaggagagatttgccctggagatcctgcctgacatgctggagaagcactacggctacaagctgttcatcccagaccgggacctgatccccaccggcacctacattgaagatgtggcccgctgtgtggaccagagcaagaggctcatcatcgtgatgacccccaactacgtggtgcggcggggctggagcatctttgagctggagacccggctgaggaacatgctggtgactggagagatcaaggtgatcctgattgaatgttctgagctgcggggcatcatgaactaccaggaggtggaggccctgaagcacaccatcaagctgctgaccgtcatcaagtggcacggccccaagtgcaacaagctgaacagcaagttctggaagaggctgcagtatgagatgcccttcaagagaattgagcccatcacccatgagcaggccctggatgtgtctgagcagggcccctttggagagctgcagacagtgtctgccatctccatggccgccgccaccagcacagccctggccacagcccacccagacctgcggagcaccttccacaacacctaccacagccagatgaggcagaagcactactaccgctcctatgaatatgatgtgcccccaacaggcaccctgcccctgaccagcatcggcaaccagcacacctactgcaacatccccatgaccctcatcaatggccagaggccccagaccaagagcagccgggagcagaacccagatgaggcccacaccaacagcgccatcctgcccctgctgccccgggagaccagcatcagcagcgtcatctggtag

SEQ ID NO: 285117 - DNA, 2091 bp, Artificial Sequence
  derived and/or modified sequence
atgaaggcccccatcccccacctgatcctgctgtacgccaccttcacacagagcctcaaggtggttactaaaagaggatctgccgacgggtgtacggactggagcatcgatatcaaaaagtatcaagtactcgtgggagagccagtgcggatcaagtgcgcgctcttctacggctatataaggacaaattattcccttgcgcagtccgccggtttgagcttgatgtggtataaaagttctggacctggtgacttcgaggaacctatcgctttcgacggcagccgaatgtcaaaagaagaggactccatatggtttaggcctacactcctgcaggatagcggtttatatgcctgcgtcatccgtaatagtacctactgtatgaaagtgagcataagcctcaccgtgggcgagaatgacactggtctgtgctacaattctaagatgaagtacttcgagaaagctgagctgtccaagagcaaggaaatcagctgccgcgacatagaagacttccttctgcctactcgggaaccagaaattctgtggtacaaagaatgtcgcaccaaaacatggcggcccagcatcgtctttaaacgcgacactctccttatccgggaagtccgagaagacgacattgggaattacacttgtgagttgaagtatggtggattcgtcgtgcgccgcacaaccgagctcaccgtgacggcgcctctgacagataaacctccaaaacttctttaccccatggaaagcaagctaactatccaggagacacagttgggcgactctgccaatcttacttgtcgggctttctttgggtacagcggggatgtatcgcccttgatttactggatgaagggcgaaaagttcattgaagatctggacgaaaatagagtgtgggagtccgacatcaggatcctgaaagagcacttgggagaacaagaggtttctatatctttgatcgtggattctgtcgaagaaggggatctgggtaactacagttgttacgtcgaaaacggcaacggacgaaggcatgcctcagttctcctccacaaacgggaactgatgtacacggtcgaactggcagggggccttggggccatcctgcttctactggtctgcctcgttacaatctataagtgctataagattgagatcatgctgttctaccgcaatcatttcggtgcggaggagttggatggcgataataaggattacgacgcctacctttcttataccaaggtagaccctgatcagtggaaccaggaaaccggcgaggaagagagatttgcacttgaaatcctccctgacatgctggagaagcattatggctataagcttttcattcccgacagagacttgataccaaccggcacctacattgaggacgtggcccgctgtgtggatcagtccaagagactgataatcgttatgacgcctaattacgttgttcggcgcggctggagcatcttcgagttggaaacaaggctcagaaatatgctggtgacaggcgagatcaaagtgatactcattgagtgctcagagttgcgcggtattatgaattaccaagaagtggaggctctgaaacatactataaaactgcttactgtcataaagtggcacggccctaaatgcaataagctcaactcaaagttttggaagaggcttcagtatgagatgcctttcaagagaattgagcccatcacccacgagcaggctctggatgtgagcgaacagggtccattcggcgagcttcagaccgtctctgccatttcgatggcagccgcaacctccactgccctggccacagcccacccagatctaaggagtacttttcacaacacgtaccatagtcagatgaggcagaagcattattatcggtcctacgaatacgatgttccgcctacgggaacgctgcctcttaccagcatcggcaaccaacatacctactgtaacataccaatgacactgattaatggacagcgtccccagactaagtcatccagagagcaaaatcccgatgaggcccatacgaatagcgccattctgcctctgctgcctagagagactagcatttcatccgtgatttggtag

SEQ ID NO: 285118 - DNA, 2091 bp, Artificial Sequence
  derived and/or modified sequence
atgaaggcccccatcccccacctgatcctgctgtacgccaccttcacccagtcactgaaggtcgtgaccaagcgaggttccgctgatggctgtacagattggagcatagacatcaagaagtatcaggtgctcgtaggagagccagtgaggataaagtgcgctctgttttatggttacatcagaaccaattacagcctcgctcagtccgccggtctgtctttaatgtggtataagtcctcgggtcccggcgacttcgaggaaccaatcgcctttgacgggagtcgtatgagcaaggaggaagattccatctggttcaggcccacccttcttcaagactctgggctttatgcctgcgtcattaggaacagtacttactgcatgaaagtatcaatttcactgactgtgggcgaaaatgacacaggcctgtgttataacagtaaaatgaaatattttgagaaggccgaactttctaaatccaaggagatatcgtgtagagacatcgaggactttctgctgcccacacgggagcctgaaatcctgtggtataaggagtgtcgtacaaagacttggagaccaagtatcgtgtttaaaagagacaccctgttaattcgagaggtgcgcgaggacgacataggaaattacacctgcgagctcaagtacggcgggtttgttgttcggcgtacgacagagctcaccgtgactgcccctctaaccgataagccacccaagctgttgtaccctatggagagcaagctgacaattcaagaaacccagctcggggactcagctaacctgacctgtagggcttttttcggctactcaggcgatgtgagtcctctgatctactggatgaaaggcgagaaattcatagaagatctggatgagaacagggtgtgggagtccgatattcgtattctgaaagagcatctgggagagcaggaggtgtctatcagtctgatcgtggattccgtggaggaaggggaccttgggaactactcctgttatgtagaaaacgggaatggtcgtcggcacgctagcgtgctcttgcataaaagagaactgatgtatactgttgagctcgccgggggactgggagcaatcctcctgctcctggtttgtctcgtgacaatttataaatgctataaaatcgagataatgttgttctatcgaaatcattttggagcggaggagcttgacggggataataaggattacgatgcatacctttcatacacgaaggtagaccctgaccaatggaaccaggaaacaggagaagaagaacggttcgccctggagatccttcccgacatgctggagaagcactacggatacaagctgttcatccccgaccgagatctcatcccaaccggaacgtatatagaggacgttgccagatgcgtggatcaaagtaagcggctcattattgtaatgacaccgaactacgttgttcgccgtggttggagcatattcgagctggaaactcggcttcgcaatatgctggtgaccggagagattaaagtgatcttgattgaatgctcggagctgcgggggattatgaattatcaagaggtggaagctcttaagcatacaatcaagctcctcacagttatcaagtggcatggccccaaatgcaacaagctgaactccaaattctggaagcgactgcagtacgaaatgccatttaagaggattgagccaattacacacgagcaggccctcgatgtgagtgagcagggcccctttggcgagctgcagacagtttcagccatttcaatggcagccgctacatctaccgccctggccacggcacatccagatctgcgatctacatttcacaatacatatcatagccagatgcggcagaaacactattaccgcagttatgagtatgacgtgccgcccactggcactctgcccttaactagcatcggcaatcaacacacctattgcaacatcccgatgactcttatcaatggacagaggccacagaccaagtcatcgagagaacaaaatccagacgaagcccacacgaactccgcaattctgccattgctgcccagagagacctccattagttctgtgatttggtag

SEQ ID NO: 285119 - DNA, 2091 bp, Artificial Sequence
  derived and/or modified sequence
atgaaggcccctatccctcacttgatcctgttgtatgctactttcacgcagtctctcaaggtcgtcacaaagagaggatcagcggacggctgtacagactggtctatagacattaagaaatatcaggtgctggtcggtgagccagtgagaataaagtgcgcactgttctatgggtacattagaactaattatagcttagcacagagcgcagggttgtctctgatgtggtataagtcctcaggcccaggagacttcgaagagcctattgcgtttgatggttctagaatgagcaaggaagaggacagcatttggtttcgaccaactctcctgcaagactcaggcctgtacgcttgcgttattaggaacagcacttactgcatgaaagtatctatcagcttgactgtgggtgagaacgatactggcttgtgctacaactccaagatgaagtactttgagaaagcggaactgagcaaatctaaagagattagttgcagagatatcgaggactttctgttgcccacccgggaaccggaaattctgtggtataaagagtgccggactaaaacatggcggccatccatcgtgtttaaaagagatacactgctgattcgtgaagtgcgggaggacgacataggaaactacacttgcgagctcaaatacgggggtttcgtggtgcgccgtaccaccgaactgactgtcacagctcctttgaccgacaaaccccctaaactactatatcccatggagagcaaattaacgatccaggagactcagttgggggattccgctaatctcacatgtcgagcgttcttcggttatagcggggacgtcagcccccttatttactggatgaaaggtgaaaaattcatcgaggacctcgatgagaaccgcgtctgggagagcgatatacgaatactgaaggagcacctgggcgagcaggaagtctccatctctttgatcgtcgatagcgtggaagaaggtgatctgggaaactatagttgttatgtcgaaaacggcaatgggcgtaggcacgcctcagtgctcctccacaagagggagttaatgtataccgtggaacttgccggtggcctgggcgctatccttctcctccttgtgtgtctagtaacgatctacaagtgttacaagatcgaaataatgcttttctaccgaaatcacttcggagctgaagagttagacggagacaacaaggattatgatgcctatctctcttacactaaggtcgaccctgaccagtggaatcaggaaaccggagaagaggagcgctttgccctggagatcttgcctgacatgctcgagaagcattacggctataagctgttcatccctgatagagatttaattccaaccgggacttacatcgaagacgtggcaaggtgcgttgaccaatccaagcgactgattattgtgatgacacccaactatgtggtcaggcgaggatggtctatcttcgaactcgagacgaggctgcgaaacatgcttgtgacaggagagattaaagtgatcctgatcgagtgctcagagttgagagggatcatgaactatcaggaggtcgaggcactgaaacacactataaaactgcttactgtgatcaagtggcatgggcctaagtgcaacaaactgaactctaagttttggaagcggcttcaatatgagatgccattcaagcggatcgaaccaatcacccatgagcaggccctggacgtatcagaacagggtccgtttggggagttgcaaacagttagcgccattagtatggccgctgccactagcactgcattggctaccgcccacccagatttgaggtctaccttccacaatacataccactcccagatgcggcagaagcactactacagaagttacgagtacgacgtgccacctaccggtactctgcccctcacatctataggcaatcagcacacgtattgtaacatccctatgacattaataaacggacagcggcctcagactaaaagctctcgagaacagaatcctgacgaagcccacacaaactctgccatcctccctctcctgccgagggaaactagtatatcttccgtcatctggtag

SEQ ID NO: 285120 - DNA, 2091 bp, Artificial Sequence
  derived and/or modified sequence
atgaaagcccctattcctcacctaattctgttgtatgctacctttactcagagcctcaaggtggttaccaagagaggcagcgcagatggttgcacagattggagtatcgatatcaaaaaataccaggtactagtcggcgaacctgtccggatcaagtgtgctctgttctatggatacatccgcaccaactatagcctggctcagagtgccggactgagcctgatgtggtacaagtcctccggcccaggggactttgaggagccgattgcatttgatggcagccgcatgtctaaggaggaggattctatttggttcagaccaactttgctacaggactccggtctgtacgcctgcgtaatcagaaacagtacttattgcatgaaggtatcgataagcttgaccgtcggggagaacgacaccggcctctgctataactccaaaatgaagtatttcgagaaggctgagctaagtaaatccaaggaaatatcctgtcgcgatatagaagatttcttgctcccgacccgggagccagagattttgtggtataaggagtgccgcaccaagacatggagaccgagcatcgttttcaagcgtgataccctattgattcgggaggtgcgcgaggacgatatcggaaactatacctgcgaactgaagtacggagggtttgtcgtgaggagaaccacagaactcaccgtgacagcacccctgaccgacaagcctccaaagctactgtacccgatggagtcaaagcttacaatacaggagactcaattaggcgattctgctaacctgacctgtcgcgcatttttcggatatagcggagatgtgtcacccctcatatactggatgaagggtgagaagtttatcgaggacttggatgagaatagagtgtgggaaagcgatattaggatcctgaaggaacacttgggggagcaggaagtatcaattagtctgatcgtggactcagtcgaggagggagacttaggcaactattcgtgctacgtagagaacgggaatggtaggcggcacgccagcgtcctgctgcacaagagggaactaatgtacaccgtggaactcgcaggaggactgggtgctatcttactcttactcgtctgcctcgtgaccatttacaagtgctacaagatcgaaatcatgttgttttatagaaaccatttcggggctgaggaacttgatggggacaataaggattacgatgcctacctgtcctacaccaaagtggaccccgatcagtggaatcaggagaccggggaagaagaacgttttgcccttgagatcctgcccgatatgctggaaaaacattacggctacaaactcttcattccagatcgggatctcattccaacaggtacctacatagaagatgttgccagatgtgtcgatcagtcgaagagactgattattgtcatgactccgaactatgttgtccgacgcggttggtcaatcttcgagctcgaaaccagactcagaaatatgctcgttacgggcgagatcaaggtgatattgattgaatgttcggaattaagaggtattatgaactatcaggaagtggaggcactgaagcatacaatcaagctgttgaccgtaatcaaatggcatggaccgaagtgtaacaagttgaactctaagttttggaagcgcttacaatatgaaatgccttttaagcgcatcgagcctattacccacgaacaggccctcgacgtctccgagcagggcccattcggcgaactgcagaccgttagcgccattagtatggccgcagcaaccagtacggctctcgcaaccgcccaccccgacctgcgcagcaccttccataacacataccactcacaaatgagacagaagcactattaccgatcctatgagtacgatgtccctcctaccgggaccctccctcttaccagtatcggtaatcagcatacatattgtaacatcccaatgacactgataaatggtcagcgccctcagacgaagtcatctcgggagcaaaaccccgatgaggcccataccaattccgctatactgccactcctgcccagagaaactagtataagcagtgtgatttggtag

SEQ ID NO: 285121 - DNA, 2091 bp, Artificial Sequence
  derived and/or modified sequence
atgaaggcccccatcccccacctgatcctgctgtacgccaccttcacccagagcctgaaggtggtgaccaagagaggcagcgccgacggctgcaccgactggagcatcgacatcaagaagtaccaggtgctggtgggcgagcccgtgagaatcaagtgcgccctgttctacggctacatcagaaccaactacagcctggcccagagcgccggcctgagcctgatgtggtacaagagcagcggccccggcgacttcgaggagcccatcgccttcgacggcagcagaatgagcaaggaggaggacagcatctggttcagacccaccctgctgcaggacagcggcctgtacgcctgcgtgatcagaaacagcacctactgcatgaaggtgagcatcagcctgaccgtgggcgagaacgacaccggcctgtgctacaacagcaagatgaagtacttcgagaaggccgagctgagcaagagcaaggagatcagctgcagagacatcgaggacttcctgctgcccaccagagagcccgagatcctgtggtacaaggagtgcagaaccaagacctggagacccagcatcgtgttcaagagagacaccctgctgatcagagaggtgagagaggacgacatcggcaactacacctgcgagctgaagtacggcggcttcgtggtgagaagaaccaccgagctgaccgtgaccgcccccctgaccgacaagccccccaagctgctgtaccccatggagagcaagctgaccatccaggagacccagctgggcgacagcgccaacctgacctgcagagccttcttcggctacagcggcgacgtgagccccctgatctactggatgaagggcgagaagttcatcgaggacctggacgagaacagagtgtgggagagcgacatcagaatcctgaaggagcacctgggcgagcaggaggtgagcatcagcctgatcgtggacagcgtggaggagggcgacctgggcaactacagctgctacgtggagaacggcaacggcagaagacacgccagcgtgctgctgcacaagagagagctgatgtacaccgtggagctggccggcggcctgggcgccatcctgctgctgctggtgtgcctggtgaccatctacaagtgctacaagatcgagatcatgctgttctacagaaaccacttcggcgccgaggagctggacggcgacaacaaggactacgacgcctacctgagctacaccaaggtggaccccgaccagtggaaccaggagaccggcgaggaggagagattcgccctggagatcctgcccgacatgctggagaagcactacggctacaagctgttcatccccgacagagacctgatccccaccggcacctacatcgaggacgtggccagatgcgtggaccagagcaagagactgatcatcgtgatgacccccaactacgtggtgagaagaggctggagcatcttcgagctggagaccagactgagaaacatgctggtgaccggcgagatcaaggtgatcctgatcgagtgcagcgagctgagaggcatcatgaactaccaggaggtggaggccctgaagcacaccatcaagctgctgaccgtgatcaagtggcacggccccaagtgcaacaagctgaacagcaagttctggaagagactgcagtacgagatgcccttcaagagaatcgagcccatcacccacgagcaggccctggacgtgagcgagcagggccccttcggcgagctgcagaccgtgagcgccatcagcatggccgccgccaccagcaccgccctggccaccgcccaccccgacctgagaagcaccttccacaacacctaccacagccagatgagacagaagcactactacagaagctacgagtacgacgtgccccccaccggcaccctgcccctgaccagcatcggcaaccagcacacctactgcaacatccccatgaccctgatcaacggccagagaccccagaccaagagcagcagagagcagaaccccgacgaggcccacaccaacagcgccatcctgcccctgctgcccagagagaccagcatcagcagcgtgatctggtag

SEQ ID NO: 285122 - protein, 379 aa, Artificial Sequence
  derived and/or modified sequence
MEERKLLHSFLAKSQDGLPPRRMKDSYIEVLLPLGSEPELREKYLTVQNTVRFGRILEDLDSLGVLICYMHNKIHSAKMSPLSIVTALVDKIDMCKKSLSPEQDIKFSGHVSWVGKTSMEVKMQMFQLHGDEFCPVLDATFVMVARDSENKGPAFVNPLIPESPEEEELFRQGELNKGRRIAFSSTSLLKMAPSAEERTTIHEMFLSTLDPKTISFRSRVLPSNAVWMENSKLKSLEICHPQERNIFNRIFGGFLMRKAYELAWATACSFGGSRPFVVAVDDIMFQKPVEVGSLLFLSSQVCFTQNNYIQVRVHSEVASLQEKQHTTTNVFHFTFMSEKEVPLVFPKTYGESMLYLDGQRHFNSMSGPATLRKDYLVEP

SEQ ID NO: 285123 - DNA, 1140 bp, Artificial Sequence
  derived and/or modified sequence
atggaggaaagaaaactgctgcatagcttcctggctaaatcccaggacggccttccgcccaggcgcatgaaagattcctatattgaggttctgctgcctcttgggtctgaacccgagctgcgagagaaatacctgacggtgcagaacaccgtgcggtttggtcgaatcctggaagacttagattccttaggggtgcttatctgttacatgcacaataaaatccactccgccaagatgtcacccctttccatcgtcactgcactggtggataaaattgacatgtgtaaaaagagcctctcccctgagcaagatattaagtttagtggacatgtaagttgggtgggaaagaccagtatggaggtgaagatgcagatgtttcagcttcacggggatgagttctgccccgttctcgacgccacatttgtgatggtggcacgagattcagagaataaaggacctgcctttgtcaaccccctgatccctgaaagcccagaggaggaggaacttttccgacagggggagctgaataagggaaggcgcattgctttctctagtacctccctgttaaagatggccccttccgcggaggagagaaccaccattcacgaaatgttcctctcaaccctggatccaaaaacaatttcttttaggtctcgcgtacttccttccaatgctgtctggatggagaactccaagcttaagtccctagaaatttgccatccccaggaacgcaacatcttcaatcggattttcggtgggttcctgatgaggaaagcctatgaattggcatgggccactgcttgttctttcggagggtcacggccctttgtggtggccgtggacgatatcatgtttcagaagcctgtggaagttggatcacttttgttcctgtcctctcaggtctgttttactcagaataactatatccaggttagggtgcactctgaagtggcttctctgcaagaaaagcaacataccacaaccaatgttttccactttacatttatgagcgagaaagaggtgcccctcgtgtttccaaagacctacggggagagtatgctctatctcgacggccagaggcactttaattctatgagtggcccggcaacgttgcggaaggactacctggtggaaccatag

SEQ ID NO: 285124 - DNA, 1140 bp, Artificial Sequence
  derived and/or modified sequence
atggaggagaggaagctgctgcacagcttcctggccaagagccaggacggcctgccccccaggaggatgaaggacagctacatcgaggtgctgctgcccctgggcagcgagcctgagctgcgggagaagtacctgactgtgcagaacacagtgcgcttcggccgcatcctggaggacctggacagcctgggcgtgctgatctgctacatgcacaacaagatccacagcgccaagatgagccccctgagcatcgtgacagccctggtggacaagattgacatgtgcaagaagagcctgagccctgagcaggacatcaagttcagcggccacgtgtcctgggtgggcaagacctccatggaggtgaagatgcagatgttccagctgcatggagatgagttctgccctgtgctggatgccacctttgtgatggtggcccgggacagtgaaaataaaggacctgcctttgtgaaccccctcatccctgagagccctgaggaggaggagctgttccggcagggcgagctgaacaagggcagaagaattgccttcagcagcaccagcctgctgaagatggcccccagcgctgaggagaggaccaccatccacgagatgttcctgagcaccctggaccccaagaccatctccttccgcagccgggtgctgcccagcaatgctgtgtggatggagaacagcaagctgaagagcctggagatctgccacccccaggagaggaacatcttcaaccgcatctttggaggcttcctgatgaggaaggcctatgagctggcctgggccacagcctgcagctttggaggcagccggccctttgtggtggccgtggatgacatcatgttccagaagcctgtggaggtgggcagcctgctcttcctgagcagccaggtgtgcttcacccagaacaactacatccaggtgcgggtgcacagcgaggtggccagcctgcaggagaagcagcacaccaccaccaacgtgttccacttcaccttcatgtctgagaaggaggtgcccctggtgttccccaagacctatggagagagcatgctgtacctggatggccagaggcacttcaacagcatgagcggccctgccaccctgaggaaggactacctggtggagccctag

SEQ ID NO: 285125 - DNA, 1140 bp, Artificial Sequence
  derived and/or modified sequence
atggaggagcggaagctgctgcacagcttcctggccaagagccaggatggtttgccccccaggcgaatgaaggacagctacattgaagtgctcctaccactgggaagtgagcccgaactgcgcgaaaagtacttgacggtacagaataccgttcgcttcggtcgcatacttgaagatctggacagcctgggtgtgctcatctgctacatgcataataagatccactcagcaaagatgtctcctctgtcaatagtgaccgcattggtcgataagatcgacatgtgcaagaaatctttgagccccgagcaggacatcaaattttcaggccacgtatcttgggtaggaaaaactagtatggaggttaagatgcagatgtttcagctccatggtgacgaattttgccctgtactggacgcgactttcgtgatggtggctcgagactcggagaataagggtccggcgtttgttaaccccttaataccggagagtcccgaagaggaggaactcttcagacaaggagagctgaacaagggcagacgcatcgccttctcatccacgagcctcctcaaaatggctccttccgccgaagaaagaacaacaatacatgagatgtttctaagcaccctggatcctaaaacaatctcctttcggtccagagtgctgccatctaacgccgtttggatggaaaatagcaaattgaagtcacttgagatctgtcaccctcaggagcggaatatctttaaccggattttcgggggttttctgatgcggaaggcatatgaacttgcgtgggccacagcatgtagtttcggggggagtaggcccttcgttgtcgctgtcgatgatattatgtttcaaaagcccgtggaagttggcagtcttctcttccttagttcacaggtttgttttacccagaataactacatccaagttcgagtgcattctgaggtcgcatccttacaggaaaaacagcacaccacaactaacgtattccattttacattcatgtccgaaaaagaagtgcccttggtgttcccaaagacttatggcgagagtatgctgtatctggatggccagcggcactttaatagcatgtccgggccagctaccctccgaaaggactacctagtggagccatag

SEQ ID NO: 285126 - DNA, 1140 bp, Artificial Sequence
  derived and/or modified sequence
atggaggagcggaaattactgcattctttcttggctaaatctcaggacggccttccaccacgccgtatgaaggacagctatatcgaggtgctgctgccactgggttccgagcctgaacttcgagagaagtaccttaccgtgcagaacacagtacggtttgggcgtatactcgaggatctagactccctcggcgtgctgatttgctacatgcacaataaaattcatagtgccaagatgtctcctctgtcaatcgtgactgcgctagtcgataaaatcgacatgtgtaagaagtccctctctcccgagcaggatataaaattttcaggccatgtctcgtgggttggtaaaacgagcatggaagtaaaaatgcagatgtttcagttgcacggggacgaattctgcccagtactggatgctacttttgtgatggtcgcccgagacagcgagaataagggcccagcctttgtcaacccattgataccggaaagcccagaggaagaggagctgtttcgccaaggggaactgaataaggggcgacgcattgctttttccagtacctccctactcaaaatggccccatccgctgaagaaaggacgactatccacgagatgtttctatccacactcgatccaaagaccattagtttccggagccgtgtgctgccaagtaacgccgtctggatggagaactcaaaactgaaaagcctagaaatttgccacccgcaggagagaaatatttttaatcgtattttcggcggatttttgatgaggaaggcctacgaactggcttgggctaccgcgtgttccttcggagggtccaggccgtttgtcgtggcagtggatgacatcatgtttcaaaagcctgttgaagttggaagcctcttattcctgtccagccaggtgtgttttacccagaacaactacattcaggttcgcgtgcactcagaggtggccagtctgcaggaaaagcagcacaccaccacaaatgtgttccattttactttcatgagtgaaaaggaggtcccgctggttttcccgaaaacttacggcgaatctatgctctaccttgatgggcagagacactttaatagcatgagcggccctgccactctcaggaaagactatctagtcgagccctag

SEQ ID NO: 285127 - DNA, 1140 bp, Artificial Sequence
  derived and/or modified sequence
atggaggagagaaagctgctgcacagcttcctggccaagagccaggacggcctgccccccagaagaatgaaggacagctacatcgaggtgctgctgcccctgggcagcgagcccgagctgagagagaagtacctgaccgtgcagaacaccgtgagattcggcagaatcctggaggacctggacagcctgggcgtgctgatctgctacatgcacaacaagatccacagcgccaagatgagccccctgagcatcgtgaccgccctggtggacaagatcgacatgtgcaagaagagcctgagccccgagcaggacatcaagttcagcggccacgtgagctgggtgggcaagaccagcatggaggtgaagatgcagatgttccagctgcacggcgacgagttctgccccgtgctggacgccaccttcgtgatggtggccagagacagcgagaacaagggccccgccttcgtgaaccccctgatccccgagagccccgaggaggaggagctgttcagacagggcgagctgaacaagggcagaagaatcgccttcagcagcaccagcctgctgaagatggcccccagcgccgaggagagaaccaccatccacgagatgttcctgagcaccctggaccccaagaccatcagcttcagaagcagagtgctgcccagcaacgccgtgtggatggagaacagcaagctgaagagcctggagatctgccacccccaggagagaaacatcttcaacagaatcttcggcggcttcctgatgagaaaggcctacgagctggcctgggccaccgcctgcagcttcggcggcagcagacccttcgtggtggccgtggacgacatcatgttccagaagcccgtggaggtgggcagcctgctgttcctgagcagccaggtgtgcttcacccagaacaactacatccaggtgagagtgcacagcgaggtggccagcctgcaggagaagcagcacaccaccaccaacgtgttccacttcaccttcatgagcgagaaggaggtgcccctggtgttccccaagacctacggcgagagcatgctgtacctggacggccagagacacttcaacagcatgagcggccccgccaccctgagaaaggactacctggtggagccctag

SEQ ID NO: 285128 - protein, 712 aa, Artificial Sequence
  derived and/or modified sequence
MAQSSPQLDIQVLHDLRQRFPEIPEGVVSQCMLQNNNNLEACCRALSQESSKYLYMEYHSPDDNRMNRNRLLHINLGIHSPSSYHPGDGAQLNGGRTLVHSSSDGHIDPQHAAGKQLICLVQEPHSAPAVVAATPNYNPFFMNEQNRSAATPPSQPPQQPSSMQTGMNPSAMQGPSPPPPPPSYMHIPRYSTNPITVTVSQNLPSGQTVPRALQILPQIPSNLYGSPGSIYIRQTSQSSSGRQTPQSTPWQSSPQGPVPHYSQRPLPVYPHQQNYQPSQYSPKQQQIPQSAYHSPPPSQCPSPFSSPQHQVQPSQLGHIFMPPSPSTTPPHPYQQGPPSYQKQGSHSVAYLPYTASSLSKGSMKKIEITVEPSQRPGTAINRSPSPISNQPSPWNQHSLYTATTPPSSSPSRGISSQPKPPFSVNPVYITYTQPTGPSCTPSPSPRVIPNPTTVFKITVGRATTENLLNLVDQEERSAAPEPIQPISVIPGSGGEKGSHKYQRSSSSGSDDYAYTQALLLHQRARMERLAKQLKLEKEELERLKSEVNGMEHDLMQRRLRRVSCTTAIPTPEEMTRLRSMNRQLQINVDCTLKEVDLLQSRGNFDPKAMNNFYDNIEPGPVVPPKPSKKDSSDPCTIERKARRISVTSKVQADIHDTQAAAADEHRTGSTQSPRTQPRDEDYEGAPWNCDSCTFLNHPALNRCEQCEMPRYT

SEQ ID NO: 285129 - DNA, 2139 bp, Artificial Sequence
  derived and/or modified sequence
atggcccagagcagcccccagctggacatccaggtgctgcacgacctgagacagagattccccgagatccccgagggcgtggtgagccagtgcatgctgcagaacaacaacaacctggaggcctgctgcagagccctgagccaggagagcagcaagtacctgtacatggagtaccacagccccgacgacaacagaatgaacagaaacagactgctgcacatcaacctgggcatccacagccccagcagctaccaccccggcgacggcgcccagctgaacggcggcagaaccctggtgcacagcagcagcgacggccacatcgacccccagcacgccgccggcaagcagctgatctgcctggtgcaggagccccacagcgcccccgccgtggtggccgccacccccaactacaaccccttcttcatgaacgagcagaacagaagcgccgccaccccccccagccagcccccccagcagcccagcagcatgcagaccggcatgaaccccagcgccatgcagggccccagcccccccccccccccccccagctacatgcacatccccagatacagcaccaaccccatcaccgtgaccgtgagccagaacctgcccagcggccagaccgtgcccagagccctgcagatcctgccccagatccccagcaacctgtacggcagccccggcagcatctacatcagacagaccagccagagcagcagcggcagacagaccccccagagcaccccctggcagagcagcccccagggccccgtgccccactacagccagagacccctgcccgtgtacccccaccagcagaactaccagcccagccagtacagccccaagcagcagcagatcccccagagcgcctaccacagccccccccccagccagtgccccagccccttcagcagcccccagcaccaggtgcagcccagccagctgggccacatcttcatgccccccagccccagcaccacccccccccacccctaccagcagggcccccccagctaccagaagcagggcagccacagcgtggcctacctgccctacaccgccagcagcctgagcaagggcagcatgaagaagatcgagatcaccgtggagcccagccagagacccggcaccgccatcaacagaagccccagccccatcagcaaccagcccagcccctggaaccagcacagcctgtacaccgccaccaccccccccagcagcagccccagcagaggcatcagcagccagcccaagccccccttcagcgtgaaccccgtgtacatcacctacacccagcccaccggccccagctgcacccccagccccagccccagagtgatccccaaccccaccaccgtgttcaagatcaccgtgggcagagccaccaccgagaacctgctgaacctggtggaccaggaggagagaagcgccgcccccgagcccatccagcccatcagcgtgatccccggcagcggcggcgagaagggcagccacaagtaccagagaagcagcagcagcggcagcgacgactacgcctacacccaggccctgctgctgcaccagagagccagaatggagagactggccaagcagctgaagctggagaaggaggagctggagagactgaagagcgaggtgaacggcatggagcacgacctgatgcagagaagactgagaagagtgagctgcaccaccgccatccccacccccgaggagatgaccagactgagaagcatgaacagacagctgcagatcaacgtggactgcaccctgaaggaggtggacctgctgcagagcagaggcaacttcgaccccaaggccatgaacaacttctacgacaacatcgagcccggccccgtggtgccccccaagcccagcaagaaggacagcagcgacccctgcaccatcgagagaaaggccagaagaatcagcgtgaccagcaaggtgcaggccgacatccacgacacccaggccgccgccgccgacgagcacagaaccggcagcacccagagccccagaacccagcccagagacgaggactacgagggcgccccctggaactgcgacagctgcaccttcctgaaccaccccgccctgaacagatgcgagcagtgcgagatgcccagatacacctag

SEQ ID NO: 285130 - DNA, 2139 bp, Artificial Sequence
  derived and/or modified sequence
atggcccagagctctcctcaacttgacattcaggtcctgcacgatctgaggcagaggtttccggagattcccgaaggcgtggtttcacagtgtatgcttcagaacaataataacctggaggcttgctgtcgagccctaagtcaagagagctcaaaatacctctacatggagtatcattccccagatgataaccggatgaatcgcaatcgccttttgcacattaacctggggatccactcgccatcgtcctaccatcctggcgatggggctcagttgaacggaggccgcactctcgtgcactcgtcttccgacgggcacattgacccacagcatgccgccggcaagcaacttatctgcctcgtacaggagcctcactcggcccccgcagtggttgcagccacccccaactacaacccctttttcatgaatgaacaaaacagatcagccgccaccccaccatcccagccccctcagcagcccagcagcatgcagacaggcatgaatccgagcgccatgcaggggccctcccctcctcccccaccgccctcctacatgcacatcccgaggtatagcacaaacccaattacggtcaccgtatcacaaaacctgccctctggccagacagtcccgcgcgctctgcagattctaccgcaaatcccatctaatctctatggatctccaggctcaatttacatacgccaaactagccaatcttcgtctggccgtcaaaccccacaaagcacaccgtggcagtcgtctccccagggtccggttccccactacagccagcgcccgctgcccgtgtacccgcatcagcagaactaccaaccctcacagtactctcccaaacaacagcaaataccccagtccgcctaccactcaccgccgccctctcagtgcccctctcccttttctagccctcagcaccaggttcagccgagccaactaggacacatattcatgccaccttcgccctcaaccacgccccctcatccctaccagcagggtccaccaagttatcagaagcagggatcccatagtgttgcctacctcccttacacagcctcatctctcagcaagggatccatgaagaaaatcgagatcactgtcgagccgagccagcggccggggacagccattaaccggtccccttcacctatttcaaaccagccatcaccgtggaaccagcacagtctctacactgccacgactcccccctcaagctcgccatcccgtggcattagctcacagcctaagcccccattcagtgtgaacccagtgtatatcacctatactcagccaacaggaccgtcttgtaccccatctcccagccctcgcgttatccctaatccgactacagtgttcaaaataaccgtaggcagggccacaaccgagaacctgctgaatctcgtggaccaagaagaaagatccgctgcccctgaacccatacagcccatctcggtgattccaggctccgggggggagaagggcagtcacaaataccagcgtagctctagttcagggtcagatgactacgcttacactcaggccttgctgcttcatcagagagcaaggatggagaggcttgccaagcagctgaagctcgaaaaggaagagctcgaacggttgaaatcggaagtcaatggaatggagcatgatctgatgcaacggcgactccggagagtgtcttgtaccacggcgatcccaacacccgaggagatgacccgactcaggtccatgaacaggcagctgcagatcaatgtcgactgcacactgaaggaggttgatttgcttcagtcgcgcggaaactttgaccccaaagccatgaacaacttctatgataacatcgaacctgggccggtggtgccaccaaagccctccaagaaggatagctcagatccttgcaccattgaaagaaaagcacgaagaatttctgtcacatctaaagttcaggctgatatacacgatacacaggctgccgctgcagacgagcacagaactggaagcacacagagcccccgtactcagccccgagatgaggattatgagggggcaccttggaactgtgattcttgtacttttcttaaccaccccgccctgaaccgttgtgaacagtgtgaaatgccgcggtatacctag

SEQ ID NO: 285131 - DNA, 2139 bp, Artificial Sequence
  derived and/or modified sequence
atggcccaatctagtccacagctggacatacaagtcctccacgatttgcggcagagatttcccgaaatcccagagggtgttgtttctcagtgtatgctgcaaaataacaataacctcgaggcatgttgccgggctctttcacaggaaagctccaaatacctgtacatggaataccactccccagatgacaacagaatgaatcggaataggctgcttcacatcaaccttggaatccactctcctagctcttaccatcctggcgacggggcccagttgaacggaggtcgtacccttgtgcactccagttctgatggccatattgaccctcagcacgcagccggcaagcagctgatttgtctagttcaggagccacattcggctcccgcggtcgtggccgctacacccaattataacccgttcttcatgaacgagcagaacagatccgccgccaccccccccagccagcctccccagcagcccagttccatgcaaacaggaatgaacccttcagccatgcagggtccctctccaccaccgcctccccccagctatatgcacatacctcgctattctaccaatccaattacagtcaccgtgtctcaaaacctcccctccgggcagactgttccaagggccctgcagatactgccccagataccaagtaacctatacgggtccccaggaagtatatatatcaggcagacttctcaaagctcttcagggcggcagaccccccaaagtaccccttggcagtcctcaccccagggtccggtccctcattattcccagaggcctctgcccgtctaccctcaccaacagaattaccagccatcccagtacagtccaaagcaacagcagatcccccagagtgcctaccattcgcctcctccgtcccagtgcccttcccctttcagcagccctcaacaccaggtgcagccatcccagctcgggcatatcttcatgcctccttcacccagtaccacccccccacacccataccagcaaggccctccaagttaccagaaacagggcagtcactctgtggcctacttgccctacactgcatccagcctgtcgaagggctccatgaagaagatcgagatcaccgtggagccatctcagcgtcctggcaccgccataaataggtctccctctccaatcagcaatcaaccgtccccatggaatcagcactctctgtacaccgcaaccactccaccctctagcagtccgtcaaggggaatctcctctcagcctaaaccaccgttctccgttaaccccgtgtacataacctacacccagccgaccggaccctcctgtaccccatctccaagcccacgcgtgatccccaatcctaccacagtctttaagataacagttggcagagcgacgaccgaaaacctgcttaacttggtcgaccaggaagagagaagcgcggccccagagccaatacagcccatctccgtgatccctgggtcaggcggagaaaaaggcagtcataaatatcagcgatcatctagtagcggcagcgatgactacgcctatacacaggctctcttgctgcaccagagggcccgcatggagagacttgccaagcagttgaagcttgagaaagaggaactggaacgactgaagtccgaggttaacgggatggaacatgacttaatgcagagacgtctgcgccgcgttagctgcacaacagctattcccaccccggaggagatgaccagattaagaagcatgaaccggcagctgcagattaacgtagattgcacgttaaaggaagtggatttgctgcaaagcagaggcaattttgacccaaaggccatgaataacttctacgacaatattgaacccgggccagtggttccccccaaacctagtaagaaggactcctccgacccttgcactattgagcgcaaagcgagaaggatatctgtgacgagtaaggtacaggcagacattcacgacacacaggccgcagccgctgacgagcataggaccgggtccacacaatcgcctaggacccagccgcgggatgaggattacgagggagctccatggaattgtgactcatgtacatttctgaaccaccctgcactgaaccgctgcgagcagtgcgaaatgccccggtatacgtag

SEQ ID NO: 285132 - DNA, 2139 bp, Artificial Sequence
  derived and/or modified sequence
atggcacagtctagccctcagcttgatatccaggtgctgcatgatctcaggcaaaggtttcccgaaattcccgaaggcgtggtttctcaatgcatgcttcagaacaacaataatttggaggcctgttgccgtgctctatcccaggaatctagcaagtatttatatatggagtaccacagtcccgacgacaaccgcatgaatcgcaatcggctcctccacatcaacttgggtatccactcaccatcgtcttaccaccctggggacggcgcgcagttgaatggtggaagaactctcgtgcattctagtagcgacggccacattgatcctcagcatgccgctggaaagcagttgatctgtttagtgcaggaaccacacagcgctccagccgtcgtggctgcaactcccaattacaatccatttttcatgaacgagcaaaatagatcagccgcgacgccgccaagtcagcccccccagcagcctagttctatgcagacaggtatgaatccttctgccatgcagggtcccagccctcccccccccccaccatcttatatgcacattccacgttacagcaccaatccgataaccgtgaccgtctcacagaacctgcccagcgggcagacagtgccacgcgctctccagatcctcccgcagatccccagcaacctgtatggctctcctgggtccatctacatccgacaaacctcgcagtcatcatcagggcgccagaccccacaaagtaccccttggcagagcagcccccaaggtcccgtgccccattattcccagcggccacttcccgtgtaccctcaccagcagaattaccagccgtctcagtatagccccaaacaacagcagattccccaaagcgcttatcacagtccacccccttcacagtgtccaagccctttttcaagtccacagcatcaggtgcaaccctcccagctggggcatatttttatgccaccctccccctcaaccacgcccccccatccctatcaacagggaccaccttcataccagaagcagggaagtcattcagtggcatatctgccatacaccgcctcctctttatccaaaggttcaatgaaaaaaatagagattactgtagagccatctcagcgacctgggactgctatcaaccggtctccatcccccatcagtaaccaaccctctccatggaatcagcattctctctatacggctactacaccaccgagcagtagtccgagtcggggcatctccagccagccaaaaccacctttcagtgtgaacccagtctatatcacctatactcagcccacaggtccctcttgtacaccctctcctagcccacgagtcatccccaacccaacaacagtcttcaagattacagttggccgggcgacaactgagaacctccttaatttggttgatcaggaggaaaggtctgccgccccagaacctatccagcctatcagcgtgatccctgggagcgggggcgaaaaagggtctcacaaataccagcgtagcagcagctcaggctctgacgattacgcatatacccaggcactactgctgcaccaaagggcccgtatggagcgcttggcgaaacagcttaagcttgagaaggaagagttggaaaggctgaaatctgaggtcaacggcatggagcacgatctgatgcagcgtcgtttacgccgagtctcttgtaccacggcaattcctactcccgaagagatgacacggctgaggagtatgaaccggcaacttcagattaatgtcgattgtaccttgaaggaggttgatctcctgcagagccgcggaaattttgatccgaaggcaatgaataacttttatgataacatcgagccaggccccgtcgtgccgcccaagccgtccaaaaaagactcatccgatccttgcacaatcgaacgaaaggctcgtagaatttccgtgacgagtaaggtccaggccgacatccatgacacccaggctgcagcagcagatgaacacagaactggaagcacgcaatctccacggactcagccacgtgatgaggattacgagggcgccccatggaactgcgattcttgcacctttctgaaccatcctgcactaaaccgttgtgagcaatgcgaaatgccaaggtacacttag

SEQ ID NO: 285133 - DNA, 2139 bp, Artificial Sequence
  derived and/or modified sequence
atggcccagagcagcccccagctggacatccaggtgctgcatgacctgcggcagcgcttccctgagatccctgagggcgtggtgtcccagtgcatgctgcagaacaacaacaacctggaggcctgctgccgggccctgagccaggagagcagcaagtacctgtacatggagtaccacagcccagatgacaacaggatgaacagaaaccggctgctgcacatcaacctgggcatccacagccccagcagctaccaccctggagatggagcccagctgaatggaggccgcaccctggtgcacagcagcagtgatggccacatcgacccccagcacgccgccggcaagcagctgatctgcctggtgcaggagccccacagcgccccagctgtggtggccgccacccccaactacaaccccttcttcatgaatgagcagaacagatctgctgccaccccacccagccagcccccccagcagcccagctccatgcagacaggcatgaaccccagcgccatgcagggccccagccccccacctcctcctccttcctacatgcacatcccccgctacagcaccaaccccatcaccgtgacagtgtcccagaacctgcccagcggccagacagtgccccgggccctgcagatcctgccccagatccccagcaacctgtatggcagccctggcagcatctacatccggcagaccagccagagcagcagcggccggcagaccccccagagcaccccctggcagagcagcccccagggccctgtgccccactacagccagaggcccctgcctgtgtacccccaccagcagaactaccagcccagccagtacagccccaagcagcagcagatcccccagagcgcctaccacagccccccacccagccagtgccccagccccttcagcagcccccagcaccaggtgcagcccagccagctgggccacatcttcatgccacccagccccagcaccaccccaccccacccctaccagcagggccccccatcctaccagaagcagggcagccacagcgtggcctacctgccctacacagccagcagcctgagcaagggctccatgaagaagattgagatcaccgtggagcccagccagaggcctggaacagccatcaacagaagccccagccccatcagcaaccagcccagcccctggaaccagcacagcctgtacacagccaccaccccacccagcagcagccccagccggggcatcagcagccagcccaagccacccttctctgtgaaccctgtgtacatcacctacacccagcccaccggccccagctgcacccccagccccagccccagggtcatccccaaccccaccaccgtcttcaagatcaccgtgggccgggccaccacagagaacctgctgaacctggtggaccaggaggagaggtctgctgcccctgagcccatccagcccatcagcgtcatccctggcagcggcggggagaagggcagccacaagtaccagaggagcagcagcagcggcagtgatgattatgcctacacccaggccctgctgctgcaccagagggccaggatggagcggctggccaagcagctgaagctggagaaggaggagctggagcggctgaagtctgaggtgaatggcatggagcatgacctgatgcagaggcggctgcggcgggtgtcctgcaccacagccatccccaccccagaggagatgacccggctgcgctccatgaaccggcagctgcagatcaacgtggactgcaccctgaaggaggtggacctgctgcagagccggggcaactttgaccccaaggccatgaacaacttctatgacaacatcgagcccggccctgtggtgccccccaagcccagcaagaaggacagcagtgacccctgcaccattgaaaggaaggcccggcgcatctctgtgaccagcaaggtgcaggccgacatccatgacacccaggccgctgctgctgatgagcacaggacaggcagcacccagagccccaggacccagcccagagatgaggactatgagggcgccccctggaactgtgacagctgcaccttcctgaaccacccagccctgaacagatgtgagcagtgtgagatgccccgctacacctag

SEQ ID NO: 285134 - DNA, 2139 bp, Artificial Sequence
  derived and/or modified sequence
atggcccagagcagcccccagctggacatccaggtgctgcacgacctccggcagcggtttccagagatccccgaaggcgtggtctctcaatgcatgctccagaataataacaatctggaagcatgctgtagagctctctcccaggagtcatccaagtatctctatatggagtatcactctcctgatgacaacaggatgaatcggaatcgcctgctgcatatcaacctaggaattcatagtccaagttcataccaccctggggatggtgcacagctgaacggtggacggactctcgtgcactcctcaagcgacggacacattgaccctcagcacgcggcgggtaagcaactcatatgcctggtgcaggaacctcatagtgctccggcggtcgttgccgccacgcccaactacaatccgtttttcatgaatgagcagaatcgcagcgctgccacacctccctcacaacccccacagcaaccatcgagtatgcagacagggatgaacccctccgccatgcaggggccgagtcctccacctccaccacctagctatatgcacataccccggtactccaccaacccgattaccgtgaccgtgagccagaacctccctagcggacagaccgtgccacgagctctgcagatcttgccgcaaatcccttctaacctgtatgggtctccaggtagtatctatatacggcagacttcacagtcctcctcaggacgccagaccccgcaaagcacaccttggcagtctagccctcagggccccgtgccacattactcacagcgaccactccctgtgtacccacatcagcagaattatcagcctagccaatactcgcctaaacagcagcaaatcccccagtctgcctatcattcgccgccccccagccagtgtcctagccctttttcctccccacagcatcaagtccaacccagccagctcgggcatatcttcatgcctccttctccctctacaactccacctcacccataccagcagggccctccgtcttatcagaaacagggctctcacagcgtggcctatctcccttatacggcctcttctctgtccaaaggaagcatgaaaaaaatagagataacagtcgaaccatctcagagacccggtacggccatcaatcggagtccctcacccatcagtaaccagccaagcccttggaatcaacacagcctgtatacagctaccacacccccctcatcatcgccaagccgcggcatttcctcacagccaaaacccccattttccgtcaaccccgtatacataacctatactcagcccaccggtccttcctgtacacctagcccctctcctagagtcattcccaacccaaccactgtatttaagatcactgttggaagagctaccacagagaacctgttgaacttagtggaccaggaggaaaggtccgccgcccccgaaccaatccagccaatctctgtgattcctgggagcggaggggaaaaggggagtcataaatatcagagatcgtcaagttctgggagcgatgactatgcatatacccaggcccttctccttcaccagagagcgcggatggaaaggctggcaaaacagctcaaactggaaaaggaagagctcgagaggctgaagagcgaagtaaacggaatggaacacgatctgatgcaaagaaggctgaggagggtgagctgcactacagccatcccaactcctgaagagatgacacgcctgaggtccatgaaccgccagttgcagatcaacgtggattgtacactgaaggaagtagatctgctccagagcagggggaacttcgatcctaaagcaatgaataatttttacgataatatcgaacccggacccgtggttccacctaagccttctaaaaaagactcatctgatccctgcaccatcgaaaggaaagctcggcgcatcagcgtgacatcaaaagtgcaggcggatatccatgatacacaggcggctgccgccgacgaacaccggaccggatctactcagtctccacggacccagcccagagatgaagactatgagggtgccccctggaattgcgactcttgcacctttctaaatcacccagcccttaatcgctgtgaacaatgtgaaatgccacgttatacctag

SEQ ID NO: 285135 - DNA, 2139 bp, Artificial Sequence
  derived and/or modified sequence
atggcccagagcagcccccagctggacatccaggtgctgcacgacctacgccagaggtttccggagatcccagagggcgtggtgagccagtgcatgctgcaaaataacaacaatttggaggcgtgctgccgagcgctgtcccaagaaagttccaaatacctttatatggagtatcactctcccgacgacaatagaatgaatcggaacagactcctgcacattaacctcggtatacattctcccagtagctatcaccctggggacggagctcagcttaacgggggcagaaccctggtccatagctcctcggatggccatattgacccacagcacgcagcaggcaagcagttaatttgcctggttcaagaaccccactctgcgccagcagtggtcgcagccacccccaactataatcctttcttcatgaacgaacagaaccgatccgctgctacacctccaagtcaacccccacagcaaccctcatccatgcaaaccggaatgaatccatccgctatgcaggggccaagtcctccaccacctcccccttcctacatgcatataccacggtattctacaaatcccataactgtcacagttagccaaaacctaccatccgggcagactgtaccaagggcgcttcagatcctgccacaaatcccttccaacttgtatgggtctccaggctccatctatattcggcagacttcacagtcttcttctggccgacaaaccccccagagcacaccctggcagagctccccgcaaggtcctgttccacattatagccaacgcccattacccgtgtacccacatcagcagaattaccagccatcacagtacagccccaagcagcagcaaataccccagagcgcctatcatagtcctcctcctagccagtgcccatccccctttagttccccacagcatcaggttcagccctcccagctcgggcatatatttatgcccccctctcctagtaccactcctcctcacccataccagcaggggcccccctcttaccagaaacagggaagtcacagcgtcgcctatctgccctacactgcaagttctctgtctaaaggatccatgaagaagatcgagatcaccgtggagccttcccaacgccccgggacagcgatcaatcgatccccaagtccaatctctaaccagccatcgccttggaatcagcactctctttacacagccaccacacctcccagttcctctccatctcgtggcatctcttctcagcctaaaccacctttcagcgtaaacccggtgtacattacttatacacagcctacaggacccagttgcacccccagtcctagcccccgggtgataccaaatcctactactgtgttcaagatcacggtggggagagccacaaccgaaaacttgttaaacctggtcgaccaagaggaacggagcgcagcgccagaacctatccagcctattagtgttatccctggatctggtggggaaaaggggtctcacaaataccagcggagcagcagcagtggctcagacgactacgcttacacgcaagctctcctgttgcatcagagagcccgcatggaaagattagctaagcagctcaaactggagaaggaggaattagagcgccttaaaagcgaagtcaacggaatggaacatgatcttatgcaaaggaggcttaggcgggttagctgtacaaccgccatccctactcctgaggaaatgactcgcttgcgcagcatgaacagacagctccagatcaacgtagattgcacactcaaagaggtagatctattacagagcagggggaattttgatccaaaggcaatgaataacttttacgacaacatagagccaggccccgtcgtcccccctaagccctccaaaaaagactcctccgatccctgcactatagagcggaaggcgcggcgaatcagcgtaaccagtaaggtgcaggcagacatacacgacactcaggcagcagcagcagacgagcacaggaccgggtcgacacaatctccacgcacacagccacgggacgaggactatgagggggctccatggaactgcgatagctgcacttttttgaaccatcctgcactgaaccggtgtgagcagtgcgaaatgccacgatatacctag

SEQ ID NO: 285136 - DNA, 2139 bp, Artificial Sequence
  derived and/or modified sequence
atggcccagagcagcccccagctggacatccaggtgctgcacgacctgaggcagcgcttccctgagattcccgaaggtgtggtctcccagtgtatgctgcagaacaacaataacctcgaggcctgctgcagagcactttctcaagagagctcgaaatatctctacatggaatatcatagcccagacgacaaccgcatgaaccggaacaggctgctacatatcaatcttggtatacactcaccatctagttatcatcccggcgacggggcgcagttgaatggcgggaggaccctggttcatagcagcagcgatggccacatcgatccacagcatgccgcagggaagcaattgatctgcttggtccaagagccccattctgctcctgccgtggtggcagccactccaaattacaaccctttctttatgaacgagcagaaccgaagcgccgctactccaccctcccagccaccacagcagcccagctccatgcagaccggtatgaatcccagtgcgatgcaagggccctccccaccccccccccctccttcttacatgcacatccctcgatactccacaaaccctataacggtgacggtgtctcagaatcttccatcaggtcagaccgttcccagagcccttcaaatattaccacagatccctagtaatctgtacggatctcctggatccatatatatcaggcagacgagtcagtcatcctcaggaagacagacaccacagagtactccatggcaatcctctccgcagggacccgtgcctcattattcacagaggcctctcccagtgtacccccatcagcaaaactatcaacccagccagtactcccctaaacaacagcaaatcccgcaatctgcttaccacagcccacctccctcacagtgcccctccccattctcatctccacagcaccaggtgcaacccagtcagctgggacacatttttatgcccccctcgccctcaacgacaccaccccacccataccagcaaggcccccccagctaccagaagcaggggtcccactctgtggcctacttaccatacactgcttcttcactgtccaaaggctccatgaagaaaatcgaaatcacagtggagccttctcaaagaccaggtaccgccatcaaccggtctccctctcctatttccaaccaaccatcaccatggaatcagcactctctgtacaccgcaaccactcctccttccagttccccgtctcgaggcatctcatcccagccaaagccccctttctctgtgaacccagtgtacattacatatacccaaccaacagggccatcatgcacacccagcccttctccccgcgtaatacctaacccgaccaccgtgttcaaaataacagttggccgggcaactacagagaacctgttgaacctggttgatcaggaagagagatccgctgcccccgaaccaattcaacctatttcagtcattccaggatccggtggtgaaaagggctcccacaaatatcaacgctctagcagctctggatctgatgattacgcctacacgcaggctcttctgctccaccagcgggcacggatggagagactggctaaacagctcaagttggagaaggaagaactggaacgactcaagtcagaggtgaatgggatggagcacgatttgatgcagaggcgtttaagaagagtgtcctgcaccacagctatccctaccccagaagaaatgaccagactgcggtctatgaacagacagcttcagatcaatgtggattgcaccttaaaggaggtcgacctcttgcagagccggggcaacttcgaccccaaggccatgaataatttctatgacaacatcgaacccgggcctgtggtgccacctaaaccctccaaaaaagattctagcgacccatgcacgattgagcggaaggcacggcggatctctgtgacgtccaaggtccaggctgacattcacgacacacaggcagccgccgcggacgaacaccgaacggggtctacccaatctccaagaacccagccaagggatgaggattacgagggagctccctggaattgtgacagttgtacttttctgaaccaccctgccctcaatcgttgtgaacaatgtgaaatgccgcgctacacctag

SEQ ID NO: 285137 - DNA, 2139 bp, Artificial Sequence
  derived and/or modified sequence
atggcccagtcgtccccccagctcgacatccaggtgctccatgacctgcggcagagatttcctgagatccccgaaggagtggtgtctcagtgcatgttgcagaataataataatttggaggcttgctgccgcgctctctctcaggagtcctctaagtacctctacatggagtaccactcacctgatgacaataggatgaatagaaaccgcctcctgcacataaacctagggattcactcccccagtagttatcatccgggtgatggggctcaactaaatgggggtagaacactggtacacagctccagtgacgggcatattgacccccaacacgctgcaggcaagcagctcatttgtttggtgcaagaaccccattccgcaccggcagtagttgctgcgacacccaactacaacccattctttatgaacgagcagaatcgcagtgctgccacccccccaagccagccaccccagcagccgagtagtatgcagactggcatgaaccccagtgccatgcagggaccttcaccacctccacccccaccctcttatatgcatattcctcggtatagtaccaatccgataactgtgactgtgtctcagaatctcccatctgggcagacagtccctagagctttgcagatcctgccccagataccatcgaatctgtatggttcgcccggtagcatctatattcggcagactagtcaatcttcatcggggcgacaaaccccacagagcaccccatggcagagttcccctcaagggccagtgccgcactactcgcagaggccattgcctgtgtacccccatcagcagaactaccagccatcacagtacagtccaaaacagcagcagatacctcagtcagcgtatcattctccccctccttcccaatgtccttcgcctttcagctccccacagcaccaggtgcaaccctctcagcttgggcacattttcatgccaccaagcccgtcaacaaccccaccccacccctaccagcagggtcccccatcatatcagaaacagggttctcatagtgtggcctacctcccatacacagcatcaagcctatctaagggatccatgaagaaaattgagattaccgtggagccctctcagcgaccaggcaccgcaattaatagaagtcccagcccgatctctaaccagccatctccatggaaccaacactctctgtacacagccaccacacccccatcttcctctcccagtagaggaatcagcagccagccaaaacccccattttccgtcaatccagtttacattacctacacgcaaccaacgggaccttcgtgtacgccctcccctagccccagggtgattcctaatccaactacagtcttcaagatcaccgtcgggagggcaaccacagaaaatcttctcaacttagtagatcaggaggaaaggtctgcagcgccagaaccaatccagcctatttctgtcattcccggttctggaggagaaaagggctcacacaagtaccagcggagcagctcgtctggctcggacgattatgcctatacccaggccctgcttttacaccagagggctcgtatggaacgcctagccaagcaactgaaactggaaaaagaggaactggagcggctgaagagcgaagtgaatggaatggaacacgaccttatgcaacgacggctccgcagagttagttgcactaccgctattccgacacccgaggagatgacacggctgcgctcgatgaatcgtcagcttcagatcaacgtcgattgtacactcaaggaggtggacttgctgcaatcaaggggcaattttgatcctaaagccatgaacaacttctatgacaatattgaaccaggcccagtcgtgccccctaagcctagtaaaaaggactccagcgacccgtgtactatagagcgcaaggccagacgcattagcgtgacgagcaaggtgcaggccgacatccacgatacgcaggcggcagctgcagatgaacatcgcaccgggtccacacagtcgccacggacccagccgagagacgaagactacgagggcgctccctggaactgtgactcctgtacattcctgaatcaccccgctctcaacagatgtgagcagtgtgagatgccgagatatacatag

SEQ ID NO: 285138 - DNA, 2139 bp, Artificial Sequence
  derived and/or modified sequence
atggcccagtcttcacctcaactagatatccaggtcctgcacgatttacggcagcggtttcctgagattcctgagggcgtggtgagccagtgtatgctacagaacaacaataatctcgaggcctgctgcagagctctatcccaggagagcagcaagtatttgtacatggagtatcactctccagacgacaatcgcatgaatagaaatcgcttgctacacatcaatctgggcatccattccccttcttcttatcacccaggtgacggtgctcagctcaatgggggaaggaccttagtgcatagcagctccgacggacatatcgatccccagcacgctgccggtaagcagctgatctgcctggtccaggaaccgcactcagccccagcagtggtggctgctactccgaattacaaccctttttttatgaacgagcagaacaggtcagcggctacacctccaagccaaccacctcagcaaccttcttcaatgcagacggggatgaacccgagcgctatgcaaggaccctctccaccacccccaccaccctcatatatgcacattccaagatattccacaaacccaatcaccgttaccgttagtcagaacctaccctctggacagactgtaccccgagcactgcagattctccctcaaataccctcgaatctctatggctcacccggaagtatctacattcggcagacaagccagagctcttccggtcgccagacgccccagtccacaccatggcaaagctctccacaagggcctgtccctcattattcacaacgacccctcccagtatatcctcaccagcaaaactatcagccatcccaatactcgcccaaacagcagcagattccgcagtcggcctatcatagcccccctccttcgcagtgtcctagtccattctcatctcctcagcaccaggttcagccatcccaactgggccatatctttatgcccccttcaccttctactacacctcctcacccgtaccagcaaggcccaccttcataccagaagcaggggtcgcattctgtggcctatctgccctatacagcatcctccctgtccaagggaagtatgaaaaaaattgaaataacggtggagcccagccagcgaccaggaactgccataaatcgatctccgtcaccaataagtaaccagcccagtccctggaaccagcattctctctacacagccacgacacccccttcttctagtcccagtcgagggataagttcccaaccaaaaccacctttctccgtgaatcccgtgtatatcacctacacacaaccaacgggaccatcttgtaccccctcccccagcccaagggtgattcccaatcctaccaccgtgtttaagataacagtgggcagagctaccactgagaatctgctcaatcttgtcgaccaggaggaaagatcagcggctccggaacccattcagccgatatccgttatccccggaagtggaggggaaaagggatcgcataagtatcagcgttctagctcttctgggagcgacgactacgcttacacacaggctcttctgctccaccagcgcgctaggatggagagattggccaaacagctcaagctggagaaagaagagctggagaggctgaaatccgaagtcaacggaatggaacacgacctcatgcaacgccgactccgaagagtgtcttgcaccactgccatccccaccccagaagaaatgacaaggctcaggagcatgaatcggcagctgcagataaacgtggactgcactctgaaggaagttgatcttctgcagtcacggggtaacttcgacccaaaggccatgaataacttttatgacaacatcgaacctggaccagttgtgccacccaagccaagcaaaaaagattcttccgatccctgcactatcgagcgcaaggcgagacggatttctgtaacttccaaggtgcaggccgatatccacgatacacaggccgctgccgctgatgaacaccggaccggctctacacagtctcctcgcacccagcctagggacgaagattatgagggggcaccatggaactgcgactcatgtaccttcctcaatcatcctgccctgaacagatgtgaacagtgcgaaatgccaagatacacctag

SEQ ID NO: 285139 - DNA, 2139 bp, Artificial Sequence
  derived and/or modified sequence
atggcccagtcttcgccccaactggatattcaggtactccatgacctaaggcagagattcccagagatccctgaaggggttgttagccagtgcatgttacaaaataataacaatctggaggcatgttgcagagctctgtctcaggagtcaagcaaatacctctatatggaataccattctcctgatgataataggatgaaccgcaaccggctgttgcatatcaatctgggtatccatagcccttccagctaccaccccggagatggagcccagctgaacggcggacgtacccttgtgcactcatcttcagatggacacatcgacccacagcacgctgctgggaagcagttgatttgccttgtgcaggagcctcattcagcacctgctgtggtcgctgccacacctaactacaatcccttttttatgaatgaacagaaccggtccgccgctactccgcctagccaaccccctcaacagccatccagcatgcagaccgggatgaatccctctgctatgcagggccctagcccacccccaccgccaccgagctacatgcacatcccacgctattctaccaatccaattacagtcaccgtttcccagaacttaccttctggccaaaccgtaccaagagcgcttcagattctgcctcagattccgagcaatctgtacgggtccccaggctctatttatattagacagactagccagtcctctagtggtagacagacaccacaatctactccctggcagagcagcccccagggcccagtaccccattacagccaaaggccactgccagtgtatccccaccagcagaattatcagccctctcaatacagcccaaaacaacagcagattccccaatccgcctaccacagcccaccaccgtctcagtgcccgtccccattttcgtctccacagcaccaagtgcagcctagtcagctgggacacatttttatgcctcccagcccaagcacaacacccccacatccctaccaacaagggcctccaagttatcaaaaacaaggttctcacagcgtagcctatctgccgtacactgcctccagcctctccaagggcagcatgaaaaagatcgaaattacagtcgagccaagccagagaccgggtactgctatcaaccggtctccctctcctattagcaaccagccatccccctggaaccaacactccctctacaccgccactacaccaccatcttcctctcctagcagaggcatctcttcccaacccaaacccccattctcagtgaacccagtctacataacatacacacagccaaccggaccttcctgtacgccaagccccagtccgagagtgatccccaaccctactaccgttttcaaaatcacagtgggcagagctaccacagagaacttactgaatctggttgatcaggaggaaagaagcgcagctcccgaaccaattcagcccatttctgtaataccgggatctggaggcgagaaaggctcacataagtatcaaaggtcatcaagttctgggtcagatgactacgcttatacccaagccctgctcctccaccagagagcgaggatggaaaggttggcgaagcaattgaaactggagaaggaagagctggagagattgaagagcgaggtcaatgggatggaacatgatctgatgcagcgcaggctgaggcgagtgtcatgcacaaccgccattcccactccagaagaaatgacccgcctcaggtccatgaacaggcagctgcaaataaacgttgactgcactctaaaagaggtcgacctgctccagagcagaggaaatttcgacccgaaggcgatgaacaacttctacgataacatcgagcctggcccagtggtgcccccaaaaccttccaaaaaagatagttccgatccttgtaccatcgaacggaaggccaggcgaatctcagtgacaagcaaagtgcaagccgacatccacgatacccaggcggcagccgctgacgagcatcgaaccgggtctacacagtctcctagaacgcagccacgagacgaggactatgaaggcgcaccctggaactgcgacagctgcaccttccttaaccaccccgctctcaaccgctgcgaacagtgcgaaatgcctagatacacttag

SEQ ID NO: 285140 - DNA, 3776 bp, Artificial Sequence
  derived and/or modified sequence
cacatgaccattggctggagcccagttgaccaagaaggaagccagagaaagccacacattcgggcgagcaaggatcacaaggagacacatctgagcctgatatagaggattgcacatcagcacatcattcagagatcctggactttgagatgtatgtagtaacaggacactgtcttcagccttttcttcaagtttttgaccgtggattgtgttgtgtcaaactggatgaattatcttagttgaattttcaccagttgaaaaattggagatttctagactactgaaaagaagttgctttcagagctggagatgtgaataaaatttctgtgccagggttgataaaccatcttgaggattccatccaggaaaccccatcacagttggttgttatgtctccttagactcctcttggctgtgacagtttctcagacttttgttcttgaggagtactgatcagaaaatgactgtggtgctagaagatcattacttttggaaagccggttaacatccatttcctaagagaaacttggccaccatttgctctggcatggcgcaaagcagcccacagcttgatattcaggttctccatgatcttcgacaacgtttccctgaaattccagagggcgtggtgtctcagtgcatgttacagaataacaacaatcttgaagcctgttgccgagccctttcccaggagagtagcaaatacttatatatggaataccatagtccagatgacaataggatgaatagaaatcgccttttacatattaacctgggtatccattctcctagtagctatcacccaggagatggagcccaacttaatggtggtcgaacactggtacatagctcaagtgatggacatattgatcctcagcatgcagcaggtaaacagctgatatgtttagttcaagaaccacactcagctccagctgttgttgctgctactcccaactacaatccattttttatgaacgaacagaacagaagtgcagctactcctccttcacaaccacctcaacagccatcttccatgcaaacaggaatgaatccgtctgctatgcaagggccttcaccaccaccgccacctccttcatacatgcacatacctcggtatagtacaaatccaattactgttacagtatcccagaacctcccttctggacagactgtaccaagagctttacaaattcttccacaaattccaagcaatctctatgggtctcctggttctatttatattagacagacatctcagagttcatcaggaagacaaactcctcagagtacgccgtggcagtcctcaccacagggcccagtgcctcactatagccagcgtcctttacctgtttatccacaccaacagaactatcagccttctcagtattctcccaaacagcagcagatccctcagtctgcttaccattcaccacctccttctcaatgtccttcacccttcagctctccacagcatcaagtgcaaccttcccagttgggccacatctttatgccacctagtccttcaactactccaccccatccatatcaacaaggacctcctagctatcagaaacagggaagccattcagtagcctatcttccatacacagcatctagtttatccaaaggttccatgaagaagatagaaattacagttgaaccttctcaaagacctgggacagcaattaataggagtccttcacccatcagtaatcaaccatctccatggaatcaacactcactgtacacagccaccacgccaccttcaagttctccttcaagagggatatctagtcaaccaaaacctccatttagtgttaatcctgtgtatattacatatacacagccaactggaccttcttgtactccatcaccatctcctcgagtgataccaaacccaactacagtttttaaaattaccgtaggccgagcaacgactgaaaatcttttaaatttagtggaccaagaagagcgctctgcagcaccagaacctattcagcccatttcagtgataccaggctctgggggagaaaagggaagccataaatatcagagaagttctagttctggatcagatgactatgcctacacacaagccttgctgttacatcaacgagcaaggatggagaggttagcaaagcaactgaaacttgagaaagaggagctagagcggttgaagtctgaagttaatggtatggagcatgacctgatgcagagacggctcagaagagtcagctgcaccactgcgatccctacgcctgaggaaatgacaagattgagaagcatgaacagacaactccagataaatgttgactgtacactgaaagaagttgacctccttcaatctagaggaaactttgatccaaaagccatgaataatttttatgacaacatagaacctggcccagttgtaccacccaagccatctaaaaaagactcctcagacccctgcacaattgagagaaaagcccgaagaattagcgtgacctccaaagtacaggcagacatccatgacacccaggcagcagctgcagatgagcatcgaactggctccacacaaagtcctcggacacaacctcgagatgaagactacgaaggggctccatggaattgtgatagctgcacctttcttaaccacccagcactaaatcgctgtgagcagtgcgagatgccacggtacacctgaattcagaaaagtctgcgccaggttgaaagtgaaactttgagcactaccagaagaaaaggaaacctcgggactctattcatccacccagccttttcattttcgattgcacagcggggaggaggaatggctttgtggtcgtcgttgtgctcacgaaaggaaaaatggggaggtcttttttttctcctttcttaactcactacagagtgagagatagaaagggatacttgaaactgggaaaggattcactctgtgaaagaatgtacacacagaagtcaagagctcttctgtggtggaatcccaattgttaaagttactgctgagtggcccttattttttaaagtagtactttgaatcatagtatgaaatgctacagtttatgcaaactgtgaattcccagagcagacttacctggtcaccgctctctggaaaaccaaggctccccgtgcttcttcccattgcttcctactaaagaggacaacaggaaaaagcacctagaatatttggggggggggggcaaattaattaagggtatttgtaattgctgcttttttcaggggtaatttccaacacacatacatgcacacaaacaaaatgttttaaaatgtgatttgtagcagtcaggaactaggcatatcatgcctttgtttaaaagtacaatcagaggtggtaagatgcctttggcttgtacagtgtgattcatcgagctctatcaacactggtaactaagacctacttatgccacataagagatgcatttttttaagttactgcatgtttttattaaggccattggttttcaaaataacaagtccttacaaagtatgattttataaatgatattctcgtaaaactgcgctttgccagtagcacagtgaatgtatgccaaatgcaagtccattccaaaatccatttggaaatcttgagctcagctgtggttcttaaacttttgcagtccatagggccttttttttttccttccaattttgtgataaattcatgatgtttacagcacagataaaactttgtgccataatcctaatttagctgaaatcaatattaactgttcaataaaaacttacttgcatatgtt

SEQ ID NO: 285141 - DNA, 6255 bp, Artificial Sequence
  derived and/or modified sequence
tgtaactagacttaaccatactttttttttttttttaaatagaaaatgactgtggtgctagaagatcattacttttggaaagccggttaacatccatttcctaagagaaacttggccaccatttgctctggcatggcgcaaagcagcccacagcttgatattcaggttctccatgatcttcgacaacgtttccctgaaattccagagggcgtggtgtctcagtgcatgttacagaataacaacaatcttgaagcctgttgccgagccctttcccaggagagtagcaaatacttatatatggaataccatagtccagatgacaataggatgaatagaaatcgccttttacatattaacctgggtatccattctcctagtagctatcacccaggagatggagcccaacttaatggtggtcgaacactggtacatagctcaagtgatggacatattgatcctcagcatgcagcaggtaaacagctgatatgtttagttcaagaaccacactcagctccagctgttgttgctgctactcccaactacaatccattttttatgaacgaacagaacagaagtgcagctactcctccttcacaaccacctcaacagccatcttccatgcaaacaggaatgaatccgtctgctatgcaagggccttcaccaccaccgccacctccttcatacatgcacatacctcggtatagtacaaatccaattactgttacagtatcccagaacctcccttctggacagactgtaccaagagctttacaaattcttccacaaattccaagcaatctctatgggtctcctggttctatttatattagacagacatctcagagttcatcaggaagacaaactcctcagagtacgccgtggcagtcctcaccacagggcccagtgcctcactatagccagcgtcctttacctgtttatccacaccaacagaactatcagccttctcagtattctcccaaacagcagcagatccctcagtctgcttaccattcaccacctccttctcaatgtccttcacccttcagctctccacagcatcaagtgcaaccttcccagttgggccacatctttatgccacctagtccttcaactactccaccccatccatatcaacaaggacctcctagctatcagaaacagggaagccattcagtagcctatcttccatacacagcatctagtttatccaaaggttccatgaagaagatagaaattacagttgaaccttctcaaagacctgggacagcaattaataggagtccttcacccatcagtaatcaaccatctccatggaatcaacactcactgtacacagccaccacgccaccttcaagttctccttcaagagggatatctagtcaaccaaaacctccatttagtgttaatcctgtgtatattacatatacacagccaactggaccttcttgtactccatcaccatctcctcgagtgataccaaacccaactacagtttttaaaattaccgtaggccgagcaacgactgaaaatcttttaaatttagtggaccaagaagagcgctctgcagcaccagaacctattcagcccatttcagtgataccaggctctgggggagaaaagggaagccataaatatcagagaagttctagttctggatcagatgactatgcctacacacaagccttgctgttacatcaacgagcaaggatggagaggttagcaaagcaactgaaacttgagaaagaggagctagagcggttgaagtctgaagttaatggtatggagcatgacctgatgcagagacggctcagaagagtcagctgcaccactgcgatccctacgcctgaggaaatgacaagattgagaagcatgaacagacaactccagataaatgttgactgtacactgaaagaagttgacctccttcaatctagaggaaactttgatccaaaagccatgaataatttttatgacaacatagaacctggcccagttgtaccacccaagccatctaaaaaagactcctcagacccctgcacaattgagagaaaagcccgaagaattagcgtgacctccaaagtacaggcagacatccatgacacccaggcagcagctgcagatgagcatcgaactggctccacacaaagtcctcggacacaacctcgagatgaagactacgaaggggctccatggaattgtgatagctgcacctttcttaaccacccagcactaaatcgctgtgagcagtgcgagatgccacggtacacctgaattcagaaaagtctgcgccaggttgaaagtgaaactttgagcactaccagaagaaaaggaaacctcgggactctattcatccacccagccttttcattttcgattgcacagcggggaggaggaatggctttgtggtcgtcgttgtgctcacgaaaggaaaaatggggaggtcttttttttctcctttcttaactcactacagagtgagagatagaaagggatacttgaaactgggaaaggattcactctgtgaaagaatgtacacacagaagtcaagagctcttctgtggtggaatcccaattgttaaagttactgctgagtggcccttattttttaaagtagtactttgaatcatagtatgaaatgctacagtttatgcaaactgtgaattcccagagcagacttacctggtcaccgctctctggaaaaccaaggctccccgtgcttcttcccattgcttcctactaaagaggacaacaggaaaaagcacctagaatatttggggggggggggcaaattaattaagggtatttgtaattgctgcttttttcaggggtaatttccaacacacatacatgcacacaaacaaaatgttttaaaatgtgatttgtagcagtcaggaactaggcatatcatgcctttgtttaaaagtacaatcagaggtggtaagatgcctttggcttgtacagtgtgattcatcgagctctatcaacactggtaactaagacctacttatgccacataagagatgcatttttttaagttactgcatgtttttattaaggccattggttttcaaaataacaagtccttacaaagtatgattttataaatgatattctcgtaaaactgcgctttgccagtagcacagtgaatgtatgccaaatgcaagtccattccaaaatccatttggaaatcttgagctcagctgtggttcttaaacttttgcagtccatagggccttttttttttccttccaattttgtgataaattcatgatgtttacagcacagataaaactttgtgccataatcctaatttagctgaaatcaatattaactgttcaataaaaacttacttgcatatgttaacaaaccagtgtgaggggaattacagttggccaacgacaaagttgcacactgcattatttaggaaaggagggattgtcaaaaattattaagagaaaggtgaatatagaggactttgaaacaacttttaaaatttaacataactgtatctagaggtcaattgagtctctacaggcagttcagatcattttaaagcactccttatttatgaaatagaacttcagggtgcggataagagatataaagtcatgtgactcactagggtgcatcgctggaaacttaatagcacatttcattaaggtctctgccattgttggagttccttcttagctcagaattggagttttggaatcttcccctcattttggtgagtataaacagcaataaagttagtaggttctcccatcctaaaggattttacctgaggatatcgtcttaggaatatccatagacgctcccatcaggtttctcccccaacccccctacaccgcccccccacttctaatttagcagtaatctctggcagacctggaaaaacaagctgctcttaatagcataatgaaaccaaaggcgtaataactcatcatagttttccatcagaatcatttcacactctgcctacagctttgaaaacattttttcatatgtgaaaaactccccaaaatatatccactagtctcccaaaggaagcatggtaattaacactgataaaaacatctctcacacaacaactgtggcaaaactgtgaaaataacggtgagaaagcagatgggcttaaaagcatggtccccaaaacaacgttcttcaaaggtttttgtaacactggtctctgtctccaataacagtctagccgtcctactgttctgtaatatgcctttgcctttgtatggtttcatatctctttagtgatggtcaaccccacttggttttaagttacaatttaggggaaatatatatatatatactgcttggtgtcctagctaaaaggtttaccagtattcatagtgatatgctgaagtggaggcaattaacttggcagttgtcagttgagaatgaaagtagcatgtctgaaaacagtctgatgctttataaaaccatgtagatgactttaaaactattgcatgaaaatacatcaaggttaataagctgttatacagtagatgcatggtttcaatcctttggtgatattatctagtcaatcattgttttcacctgccaggaaaagagagaaaacagtctattggataggtgtaaagggtggggtatgcggtatcagattgattttaaggaagttttgtacatgttaatttttaattgtgcacaagtttcatatgccaacataggctgtattcagttttaaaataggcaaaatgacttgacactgataaatctggtatgtttaactgtgtcccatatgtagactgctttttgcctatgaccagtttgaacaagaattcacccaactttcaagatgccttttcaaaaggatcttgtagtcagttggtatgtacagacaattggcatggaagtggtaggatataaatcggatgacgcctggctgctgaggtgccagctggatcagctggtgcacttcttgtttcttgtaagaggtttctttaaaatgactagtttgatgtatctggtaacatataggcctgactatacattttacattatttcgctattttgtaaactgggattttagaaagcacgtttgccattttgttaaagtacattgccccttaaattttggagtagtttttaaaagtttaaaatggtaatagaggagccagaaactttttaagcattgtaaaatgttttgaattgatattgactttgtttggaagagagtagaggcagggggctttaaagaaacaaagaaatgcattgtaaaaatgtagttttagagcaaattaataatgatggtggggaaagtgttgctaatttgtttatttccctggaagaaatgggaagtgtgataagcagtttaatttttaaggagctggtctcaattttagtactttttaattatgcaaataaatcaatgtttccttaaattttgtcattgctttgtcacagttgtctagggttcatatccaaccttctgtggcaattcaattttatatagtcttttaagaggtaattgtaatgtatttctgacagtataaacaaaaagaatataaggcatagaagaattgtcctctaaaaatatcaatgatgtatcctggaatgtgaagatgtccctttatagttaaaaattgaattattttaatattgtaccattgttagaccttgaatgagtccatgttaccgtgtgtgtctgtatatctatctgtagagaaagaaaaatgacaactgaaatgttacttttaaaaatcagaataaattgggcactgtctgtgttgcaccactactgtatcttttcgaaagaattaacagtatttgcctattgtaaaggttaattctgatgacgttttcacattcaccagactttttttcctgtattatttgcatccccaaatatttaatacaagtagattctgcatggcttgggcattcagagattaatagaatgatgactcaattttaattctaaagccatgaaaagttactttgagactgaacaattctgaattatttatgatacccaatgtccatgtttctttccctactgtaaaagaattgatcagtttcttcattaaagcagcaaaaacttattaaatcttgtaaataccatgtctcttttagatttctgtgtatgctgtgaatgaaatcattttgagatgaaattgtacaaaggcattttaaaaggctctgcatgcatcgtacctccaaacagtacatattcggaaagtcaaagattcctgcaaaataaataaactaaaagcaaacact

SEQ ID NO: 285142 - DNA, 6302 bp, Artificial Sequence
  derived and/or modified sequence
ccccatcacagttggttgttatgtctccttagactcctcttggctgtgacagtttctcagacttttgttcttgaggagtactgatcagaaaatgactgtggtgctagaagatcattacttttggaaagccggttaacatccatttcctaagagaaacttggccaccatttgctctggcatggcgcaaagcagcccacagcttgatattcaggttctccatgatcttcgacaacgtttccctgaaattccagagggcgtggtgtctcagtgcatgttacagaataacaacaatcttgaagcctgttgccgagccctttcccaggagagtagcaaatacttatatatggaataccatagtccagatgacaataggatgaatagaaatcgccttttacatattaacctgggtatccattctcctagtagctatcacccaggagatggagcccaacttaatggtggtcgaacactggtacatagctcaagtgatggacatattgatcctcagcatgcagcaggtaaacagctgatatgtttagttcaagaaccacactcagctccagctgttgttgctgctactcccaactacaatccattttttatgaacgaacagaacagaagtgcagctactcctccttcacaaccacctcaacagccatcttccatgcaaacaggaatgaatccgtctgctatgcaagggccttcaccaccaccgccacctccttcatacatgcacatacctcggtatagtacaaatccaattactgttacagtatcccagaacctcccttctggacagactgtaccaagagctttacaaattcttccacaaattccaagcaatctctatgggtctcctggttctatttatattagacagacatctcagagttcatcaggaagacaaactcctcagagtacgccgtggcagtcctcaccacagggcccagtgcctcactatagccagcgtcctttacctgtttatccacaccaacagaactatcagccttctcagtattctcccaaacagcagcagatccctcagtctgcttaccattcaccacctccttctcaatgtccttcacccttcagctctccacagcatcaagtgcaaccttcccagttgggccacatctttatgccacctagtccttcaactactccaccccatccatatcaacaaggacctcctagctatcagaaacagggaagccattcagtagcctatcttccatacacagcatctagtttatccaaaggttccatgaagaagatagaaattacagttgaaccttctcaaagacctgggacagcaattaataggagtccttcacccatcagtaatcaaccatctccatggaatcaacactcactgtacacagccaccacgccaccttcaagttctccttcaagagggatatctagtcaaccaaaacctccatttagtgttaatcctgtgtatattacatatacacagccaactggaccttcttgtactccatcaccatctcctcgagtgataccaaacccaactacagtttttaaaattaccgtaggccgagcaacgactgaaaatcttttaaatttagtggaccaagaagagcgctctgcagcaccagaacctattcagcccatttcagtgataccaggctctgggggagaaaagggaagccataaatatcagagaagttctagttctggatcagatgactatgcctacacacaagccttgctgttacatcaacgagcaaggatggagaggttagcaaagcaactgaaacttgagaaagaggagctagagcggttgaagtctgaagttaatggtatggagcatgacctgatgcagagacggctcagaagagtcagctgcaccactgcgatccctacgcctgaggaaatgacaagattgagaagcatgaacagacaactccagataaatgttgactgtacactgaaagaagttgacctccttcaatctagaggaaactttgatccaaaagccatgaataatttttatgacaacatagaacctggcccagttgtaccacccaagccatctaaaaaagactcctcagacccctgcacaattgagagaaaagcccgaagaattagcgtgacctccaaagtacaggcagacatccatgacacccaggcagcagctgcagatgagcatcgaactggctccacacaaagtcctcggacacaacctcgagatgaagactacgaaggggctccatggaattgtgatagctgcacctttcttaaccacccagcactaaatcgctgtgagcagtgcgagatgccacggtacacctgaattcagaaaagtctgcgccaggttgaaagtgaaactttgagcactaccagaagaaaaggaaacctcgggactctattcatccacccagccttttcattttcgattgcacagcggggaggaggaatggctttgtggtcgtcgttgtgctcacgaaaggaaaaatggggaggtcttttttttctcctttcttaactcactacagagtgagagatagaaagggatacttgaaactgggaaaggattcactctgtgaaagaatgtacacacagaagtcaagagctcttctgtggtggaatcccaattgttaaagttactgctgagtggcccttattttttaaagtagtactttgaatcatagtatgaaatgctacagtttatgcaaactgtgaattcccagagcagacttacctggtcaccgctctctggaaaaccaaggctccccgtgcttcttcccattgcttcctactaaagaggacaacaggaaaaagcacctagaatatttggggggggggggcaaattaattaagggtatttgtaattgctgcttttttcaggggtaatttccaacacacatacatgcacacaaacaaaatgttttaaaatgtgatttgtagcagtcaggaactaggcatatcatgcctttgtttaaaagtacaatcagaggtggtaagatgcctttggcttgtacagtgtgattcatcgagctctatcaacactggtaactaagacctacttatgccacataagagatgcatttttttaagttactgcatgtttttattaaggccattggttttcaaaataacaagtccttacaaagtatgattttataaatgatattctcgtaaaactgcgctttgccagtagcacagtgaatgtatgccaaatgcaagtccattccaaaatccatttggaaatcttgagctcagctgtggttcttaaacttttgcagtccatagggccttttttttttccttccaattttgtgataaattcatgatgtttacagcacagataaaactttgtgccataatcctaatttagctgaaatcaatattaactgttcaataaaaacttacttgcatatgttaacaaaccagtgtgaggggaattacagttggccaacgacaaagttgcacactgcattatttaggaaaggagggattgtcaaaaattattaagagaaaggtgaatatagaggactttgaaacaacttttaaaatttaacataactgtatctagaggtcaattgagtctctacaggcagttcagatcattttaaagcactccttatttatgaaatagaacttcagggtgcggataagagatataaagtcatgtgactcactagggtgcatcgctggaaacttaatagcacatttcattaaggtctctgccattgttggagttccttcttagctcagaattggagttttggaatcttcccctcattttggtgagtataaacagcaataaagttagtaggttctcccatcctaaaggattttacctgaggatatcgtcttaggaatatccatagacgctcccatcaggtttctcccccaacccccctacaccgcccccccacttctaatttagcagtaatctctggcagacctggaaaaacaagctgctcttaatagcataatgaaaccaaaggcgtaataactcatcatagttttccatcagaatcatttcacactctgcctacagctttgaaaacattttttcatatgtgaaaaactccccaaaatatatccactagtctcccaaaggaagcatggtaattaacactgataaaaacatctctcacacaacaactgtggcaaaactgtgaaaataacggtgagaaagcagatgggcttaaaagcatggtccccaaaacaacgttcttcaaaggtttttgtaacactggtctctgtctccaataacagtctagccgtcctactgttctgtaatatgcctttgcctttgtatggtttcatatctctttagtgatggtcaaccccacttggttttaagttacaatttaggggaaatatatatatatatactgcttggtgtcctagctaaaaggtttaccagtattcatagtgatatgctgaagtggaggcaattaacttggcagttgtcagttgagaatgaaagtagcatgtctgaaaacagtctgatgctttataaaaccatgtagatgactttaaaactattgcatgaaaatacatcaaggttaataagctgttatacagtagatgcatggtttcaatcctttggtgatattatctagtcaatcattgttttcacctgccaggaaaagagagaaaacagtctattggataggtgtaaagggtggggtatgcggtatcagattgattttaaggaagttttgtacatgttaatttttaattgtgcacaagtttcatatgccaacataggctgtattcagttttaaaataggcaaaatgacttgacactgataaatctggtatgtttaactgtgtcccatatgtagactgctttttgcctatgaccagtttgaacaagaattcacccaactttcaagatgccttttcaaaaggatcttgtagtcagttggtatgtacagacaattggcatggaagtggtaggatataaatcggatgacgcctggctgctgaggtgccagctggatcagctggtgcacttcttgtttcttgtaagaggtttctttaaaatgactagtttgatgtatctggtaacatataggcctgactatacattttacattatttcgctattttgtaaactgggattttagaaagcacgtttgccattttgttaaagtacattgccccttaaattttggagtagtttttaaaagtttaaaatggtaatagaggagccagaaactttttaagcattgtaaaatgttttgaattgatattgactttgtttggaagagagtagaggcagggggctttaaagaaacaaagaaatgcattgtaaaaatgtagttttagagcaaattaataatgatggtggggaaagtgttgctaatttgtttatttccctggaagaaatgggaagtgtgataagcagtttaatttttaaggagctggtctcaattttagtactttttaattatgcaaataaatcaatgtttccttaaattttgtcattgctttgtcacagttgtctagggttcatatccaaccttctgtggcaattcaattttatatagtcttttaagaggtaattgtaatgtatttctgacagtataaacaaaaagaatataaggcatagaagaattgtcctctaaaaatatcaatgatgtatcctggaatgtgaagatgtccctttatagttaaaaattgaattattttaatattgtaccattgttagaccttgaatgagtccatgttaccgtgtgtgtctgtatatctatctgtagagaaagaaaaatgacaactgaaatgttacttttaaaaatcagaataaattgggcactgtctgtgttgcaccactactgtatcttttcgaaagaattaacagtatttgcctattgtaaaggttaattctgatgacgttttcacattcaccagactttttttcctgtattatttgcatccccaaatatttaatacaagtagattctgcatggcttgggcattcagagattaatagaatgatgactcaattttaattctaaagccatgaaaagttactttgagactgaacaattctgaattatttatgatacccaatgtccatgtttctttccctactgtaaaagaattgatcagtttcttcattaaagcagcaaaaacttattaaatcttgtaaataccatgtctcttttagatttctgtgtatgctgtgaatgaaatcattttgagatgaaattgtacaaaggcattttaaaaggctctgcatgcatcgtacctccaaacagtacatattcggaaagtcaaagattcctgcaaaataaataaactaaaagcaaacacta

SEQ ID NO: 285143 - protein, 684 aa, Artificial Sequence
  derived and/or modified sequence
MAQSSPQLDIQVLHDLRQRFPEIPEGVVSQCMLQNNNNLEACCRALSQESSKYLYMEYHSPDDNRMNRNRLLHINLGIHSPSSYHPGDGAQLNGGRTLVHSSSDGHIDPQHAAGKQLICLVQEPHSAPAVVAATPNYNPFFMNEQNRSAATPPSQPPQQPSSMQTGMNPSAMQGPSPPPPPPSYMHIPRYSTNPITVTVSQNLPSGQTVPRALQILPQIPSNLYGSPGSIYIRQTSQSSSGRQTPQSTPWQSSPQGPVPHYSQRPLPVYPHQQNYQPSQYSPKQQQIPQSAYHSPPPSQCPSPFSSPQHQVQPSQLGHIFMPPSPSTTPPHPYQQGPPSYQKQGSHSVAYLPYTASSLSKGSMKKIEITVEPSQRPGTAINRSPSPISNQPSPWNQHSLYTATTPPSSSPSRGISSQPKPPFSVNPVYITYTQPTGPSCTPSPSPRVIPNPTTVFKITVGRATTENLLNLVDQEERSAAPEPIQPISVIPGSGGEKGSHKYQRSSSSGSDDYAYTQALLLHQRARMERLAKQLKLEKEELERLKSEVNGMEHDLMQRRLRRVSCTTAIPTPEEMTRLRSMNRQLQINVDCTLKEVDLLQSRDSSDPCTIERKARRISVTSKVQADIHDTQAAAADEHRTGSTQSPRTQPRDEDYEGAPWNCDSCTFLNHPALNRCEQCEMPRYT

SEQ ID NO: 285144 - DNA, 2055 bp, Artificial Sequence
  derived and/or modified sequence
atggcccagagcagcccccagctggacatccaggtgctgcacgacctgagacagagattccccgagatccccgagggcgtggtgagccagtgcatgctgcagaacaacaacaacctggaggcctgctgcagagccctgagccaggagagcagcaagtacctgtacatggagtaccacagccccgacgacaacagaatgaacagaaacagactgctgcacatcaacctgggcatccacagccccagcagctaccaccccggcgacggcgcccagctgaacggcggcagaaccctggtgcacagcagcagcgacggccacatcgacccccagcacgccgccggcaagcagctgatctgcctggtgcaggagccccacagcgcccccgccgtggtggccgccacccccaactacaaccccttcttcatgaacgagcagaacagaagcgccgccaccccccccagccagcccccccagcagcccagcagcatgcagaccggcatgaaccccagcgccatgcagggccccagcccccccccccccccccccagctacatgcacatccccagatacagcaccaaccccatcaccgtgaccgtgagccagaacctgcccagcggccagaccgtgcccagagccctgcagatcctgccccagatccccagcaacctgtacggcagccccggcagcatctacatcagacagaccagccagagcagcagcggcagacagaccccccagagcaccccctggcagagcagcccccagggccccgtgccccactacagccagagacccctgcccgtgtacccccaccagcagaactaccagcccagccagtacagccccaagcagcagcagatcccccagagcgcctaccacagccccccccccagccagtgccccagccccttcagcagcccccagcaccaggtgcagcccagccagctgggccacatcttcatgccccccagccccagcaccacccccccccacccctaccagcagggcccccccagctaccagaagcagggcagccacagcgtggcctacctgccctacaccgccagcagcctgagcaagggcagcatgaagaagatcgagatcaccgtggagcccagccagagacccggcaccgccatcaacagaagccccagccccatcagcaaccagcccagcccctggaaccagcacagcctgtacaccgccaccaccccccccagcagcagccccagcagaggcatcagcagccagcccaagccccccttcagcgtgaaccccgtgtacatcacctacacccagcccaccggccccagctgcacccccagccccagccccagagtgatccccaaccccaccaccgtgttcaagatcaccgtgggcagagccaccaccgagaacctgctgaacctggtggaccaggaggagagaagcgccgcccccgagcccatccagcccatcagcgtgatccccggcagcggcggcgagaagggcagccacaagtaccagagaagcagcagcagcggcagcgacgactacgcctacacccaggccctgctgctgcaccagagagccagaatggagagactggccaagcagctgaagctggagaaggaggagctggagagactgaagagcgaggtgaacggcatggagcacgacctgatgcagagaagactgagaagagtgagctgcaccaccgccatccccacccccgaggagatgaccagactgagaagcatgaacagacagctgcagatcaacgtggactgcaccctgaaggaggtggacctgctgcagagcagagacagcagcgacccctgcaccatcgagagaaaggccagaagaatcagcgtgaccagcaaggtgcaggccgacatccacgacacccaggccgccgccgccgacgagcacagaaccggcagcacccagagccccagaacccagcccagagacgaggactacgagggcgccccctggaactgcgacagctgcaccttcctgaaccaccccgccctgaacagatgcgagcagtgcgagatgcccagatacacctag

SEQ ID NO: 285145 - DNA, 2055 bp, Artificial Sequence
  derived and/or modified sequence
atggcacagagttcgccacagctagacatccaggtgctccatgatctgcgccagaggttcccagagatcccagagggcgtcgtttcccagtgcatgctgcagaataacaacaatctggaggcttgctgtcgggcgctaagccaggaaagtagcaagtacctctatatggagtatcatagcccagacgacaataggatgaatagaaacaggctcttgcatatcaacttaggcatacatagcccgtcctcgtaccaccccggggacggggctcagctgaatgggggccgcacactggtccactccagcagtgacggacacatcgatccgcagcacgccgccggcaaacagctgatttgtctagtccaggagcctcattcagcacctgccgtggtggccgccacacctaactataaccctttctttatgaacgagcagaatcgttcagcagcaactcccccaagccaacccccacagcagccttcatctatgcagaccgggatgaacccctccgccatgcagggaccgtctcctccacctcccccaccatcatatatgcacattccacgctactctactaatccaatcaccgtgaccgtgtctcaaaacttgccatcaggacagactgtcccccgggcattacagatactgccacaaatcccttccaatctatatgggagtcctggctctatttatattagacagaccagccagagcagcagcggacggcagaccccccagagtaccccctggcagtctagccctcaagggcctgtccctcactacagccagcggcctctgccagtgtatcctcatcagcagaactaccaacctagccagtactcaccaaagcagcagcaaatcccgcagtctgcataccacagtccaccacctagccaatgcccaagcccctttagttcaccgcaacaccaggtccagccgtctcaactgggacatatattcatgccacctagtccaagcacaacacctcctcacccttatcagcagggtccacctagctaccagaagcaaggctctcacagcgtggcttatctgccgtacaccgcgtcctccttgtccaaaggctcaatgaagaagattgagatcacggtcgagcctagtcagagacctggaacagccatcaaccgatccccttctcctatatcaaaccaacccagtccttggaaccagcattctttgtacacggcaacaactccccctagctcttcaccttcgaggggaatttcaagccaaccaaagcccccgttctctgtgaaccccgtgtacataacctatacccagcctacgggtcccagctgtacaccatccccttctccacgcgtgattcccaaccccacaactgtgttcaagataaccgtgggccgcgctactactgaaaatttgctgaatctggtggaccaagaggaaagaagcgccgcaccggaacctatacagcctatcagtgtcatccctggcagcgggggagagaaaggctcccacaagtatcagcgatcaagttcgtcaggatctgacgattatgcttatacccaagcccttctgctccatcagagggcacgcatggaacgtctcgccaagcagcttaaactcgagaaagaggaactggaacgacttaaatccgaagtgaatgggatggaacacgaccttatgcagcggaggctgcggagagtcagctgcaccaccgccatcccaacccctgaagagatgactagattgcgcagcatgaaccgccagctacagatcaacgtagattgcacactcaaagaagttgacctccttcaaagtcgggactcttctgacccgtgcaccatcgaaaggaaagccaggcggattagcgtgacgagcaaggttcaagccgacatccatgatacccaggccgcagctgctgacgagcatcgaacagggtccactcagagccctagaacgcagccgcgggatgaggattacgaaggagcaccctggaactgtgacagctgtacctttctgaatcaccctgccttgaacagatgtgagcaatgcgagatgccccgctatacatag

SEQ ID NO: 285146 - DNA, 2055 bp, Artificial Sequence
  derived and/or modified sequence
atggcccagagcagcccccagctggacatccaggtgctgcatgacctgcggcagcgcttccctgagatccctgagggcgtggtgtcccagtgcatgctgcagaacaacaacaacctggaggcctgctgccgggccctgagccaggagagcagcaagtacctgtacatggagtaccacagcccagatgacaacaggatgaacagaaaccggctgctgcacatcaacctgggcatccacagccccagcagctaccaccctggagatggagcccagctgaatggaggccgcaccctggtgcacagcagcagtgatggccacatcgacccccagcacgccgccggcaagcagctgatctgcctggtgcaggagccccacagcgccccagctgtggtggccgccacccccaactacaaccccttcttcatgaatgagcagaacagatctgctgccaccccacccagccagcccccccagcagcccagctccatgcagacaggcatgaaccccagcgccatgcagggccccagccccccacctcctcctccttcctacatgcacatcccccgctacagcaccaaccccatcaccgtgacagtgtcccagaacctgcccagcggccagacagtgccccgggccctgcagatcctgccccagatccccagcaacctgtatggcagccctggcagcatctacatccggcagaccagccagagcagcagcggccggcagaccccccagagcaccccctggcagagcagcccccagggccctgtgccccactacagccagaggcccctgcctgtgtacccccaccagcagaactaccagcccagccagtacagccccaagcagcagcagatcccccagagcgcctaccacagccccccacccagccagtgccccagccccttcagcagcccccagcaccaggtgcagcccagccagctgggccacatcttcatgccacccagccccagcaccaccccaccccacccctaccagcagggccccccatcctaccagaagcagggcagccacagcgtggcctacctgccctacacagccagcagcctgagcaagggctccatgaagaagattgagatcaccgtggagcccagccagaggcctggaacagccatcaacagaagccccagccccatcagcaaccagcccagcccctggaaccagcacagcctgtacacagccaccaccccacccagcagcagccccagccggggcatcagcagccagcccaagccacccttctctgtgaaccctgtgtacatcacctacacccagcccaccggccccagctgcacccccagccccagccccagggtcatccccaaccccaccaccgtcttcaagatcaccgtgggccgggccaccacagagaacctgctgaacctggtggaccaggaggagaggtctgctgcccctgagcccatccagcccatcagcgtcatccctggcagcggcggggagaagggcagccacaagtaccagaggagcagcagcagcggcagtgatgattatgcctacacccaggccctgctgctgcaccagagggccaggatggagcggctggccaagcagctgaagctggagaaggaggagctggagcggctgaagtctgaggtgaatggcatggagcatgacctgatgcagaggcggctgcggcgggtgtcctgcaccacagccatccccaccccagaggagatgacccggctgcgctccatgaaccggcagctgcagatcaacgtggactgcaccctgaaggaggtggacctgctgcagagccgggacagcagtgacccctgcaccattgaaaggaaggcccggcgcatctctgtgaccagcaaggtgcaggccgacatccatgacacccaggccgctgctgctgatgagcacaggacaggcagcacccagagccccaggacccagcccagagatgaggactatgagggcgccccctggaactgtgacagctgcaccttcctgaaccacccagccctgaacagatgtgagcagtgtgagatgccccgctacacctag

SEQ ID NO: 285147 - DNA, 2055 bp, Artificial Sequence
  derived and/or modified sequence
atggcccagagcagcccccagctggacatccaggtgctgcacgacctcaggcaacgcttccctgaaatcccagaaggagttgtgagccagtgtatgctgcagaacaacaacaacctggaagcttgctgccgcgccctttctcaggaatccagtaaatacctgtacatggaataccattctcccgatgacaaccggatgaaccgtaatcgactcctgcacatcaatctgggcatacactctcccagctcttatcaccccggcgatggtgcccagttgaatggcggacgcactctcgtgcactcatcgtccgatggccatatcgacccacagcatgctgcaggcaagcagctgatctgcctggttcaagaaccacatagtgctcccgccgtggtggccgctaccccaaattataatcccttcttcatgaacgagcaaaacaggtcggcggcaactcctccgtcccaacccccacaacagcccagtagtatgcaaactggaatgaatccttctgctatgcaaggaccctctccccctcctccccctccctcttacatgcacataccaaggtatagcacaaatcctatcacagttacagtctcacaaaatttgccttctggtcagactgtgcctcgggctctacagatcctgccacagatcccaagcaatctgtatggatccccaggctccatctatatccgccagacctctcagtcttcatctggtcgacagactccacagtcgaccccctggcaatcctctcctcagggcccagtcccccactactcccaaaggcccctgccggtgtaccctcaccagcaaaactatcaaccgagccagtactcccccaaacagcaacagatccctcagtctgcctaccactcgccgcctccctctcaatgccctagcccctttagtagcccccagcatcaggttcagccgagtcagcttggccacatcttcatgccgccaagcccctccacaacacctccgcacccgtatcagcaaggccctcccagctaccagaaacaggggtcgcattccgtcgcgtacctgccttacacagcgtcttctttgtccaaaggatccatgaagaagattgaaattaccgttgagccttcccaaagaccaggtacagcaattaatagatcaccttcacctatctcaaaccaaccttccccgtggaaccagcactccttgtacactgcaacgacccctccatcctccagtccgagcagaggcatatcttcccagcccaagcccccgttcagcgtgaacccagtgtatattacctacacccagcccacgggcccatcctgtacaccgtctcctagccctagagtcatccccaatccaacgacagtttttaaaattactgttggccgcgccactaccgaaaatctccttaacctagtggaccaggaggagcgttccgccgctcctgagccaatccagcctatttcagttattcctggttctggcggagaaaaaggctcacataagtatcagcgttcttcatcttccgggtctgatgattacgcatatacacaggccttgcttctgcatcagagagcacggatggaacgccttgccaagcaactaaagctggagaaagaggagctcgaaaggttgaaatccgaggtgaatggaatggaacacgatttgatgcagaggcggctccgcagggtgtcttgtaccacagcaattcctacaccagaggaaatgacccggctgcgctcaatgaatagacaactgcagatcaacgttgattgcaccctaaaggaggtggacctcctgcagagtcgcgattcttccgacccatgcaccattgaacggaaggcgaggaggatttcggtaaccagcaaggtgcaggccgatatacatgatacccaggccgccgctgcagacgagcaccgaaccggcagcacgcaatctccgcgcacacagcctcgtgacgaggactacgagggggccccatggaattgcgacagctgtacttttcttaatcaccccgctcttaaccgatgcgaacaatgcgaaatgcctcgatatacatag

SEQ ID NO: 285148 - DNA, 2055 bp, Artificial Sequence
  derived and/or modified sequence
atggctcagtcaagtccccaattagatatccaggtcctgcacgatctcagacagagattcccggaaataccggaaggggtggttagccagtgtatgctgcagaacaataataatctcgaagcttgctgcagggccctgtctcaggagtctagtaagtacctttatatggagtaccattctcccgatgataaccgcatgaacagaaaccgcttgctgcatataaacctgggcatccattccccctcctcttaccacccaggagacggagctcagctaaacgggggtcggacactggtgcacagcagctctgatggccatatagatcctcagcacgcggctgggaaacagcttatttgcctggtgcaggaacctcattcagcccctgcggtggtggccgctacccccaactataaccctttctttatgaacgagcagaaccggtctgctgctactcctccctctcaaccaccgcaacagccttcgtccatgcaaactggcatgaacccttccgctatgcagggcccttcacctccccctccaccacccagttacatgcatatcccaaggtactctacaaatcccattacggttaccgtgtcccagaatctaccatccggtcagacggtgcccagggcgctgcagattctcccccagattccgagcaacttgtacgggagtccgggttccatttacattaggcagactagccagagtagttcaggacggcagacacctcaatccaccccttggcagagtagcccccagggaccagttcctcattattcacagcgaccattgcctgtatatccgcatcagcagaattatcagccttcccaatattcacctaaacagcaacagatcccccagtccgcttaccactctccgccaccatcccaatgtccatccccattttcaagcccacagcatcaggtgcagcccagccagctggggcacattttcatgccaccttcaccgtccaccaccccaccgcacccttaccaacaggggcctcccagttaccagaagcagggctcccatagcgtggcatacctgccttatacagcgagttcactatccaaaggctctatgaaaaagatcgaaatcacggttgagccaagtcagagaccgggtaccgctataaatcgatcaccctcgccgatctccaatcagccgagcccatggaaccaacactctctatatactgctaccacacccccttcttcctcacccagtcgcggaattagttctcagcctaagcctcctttctccgttaacccagtgtacattacatatacgcagcccactggcccttcctgcacacccagtcctagtccaagggttatcccgaatcccaccacagtgttcaagatcaccgtggggagggcaaccacggagaacctgctgaatttagtcgaccaggaagaacggtccgctgccccagagcccatacagcccatcagtgtcatccccggaagtggaggagagaaaggatctcacaagtaccagaggtcaagctctagcggctctgacgattacgcatatacgcaagccctgctgctccaccagcgggcacgaatggagcgacttgcgaagcagttgaagctcgagaaggaggagctcgagagactgaagtctgaggtcaacggtatggagcatgacctgatgcaaagaaggctgcgcagggtgtcatgtaccactgccattcccaccccagaagaaatgacacgattgaggtccatgaaccgccagctgcagattaatgtggactgtacgcttaaggaagttgatctcctgcaatctcgcgacagctccgatccatgcaccatcgagcgaaaggcacgcaggataagcgtgactagtaaggtgcaggctgatattcacgacacccaggccgcagccgctgatgaacacaggacagggtctacacagagcccgcgaactcaacctcgagacgaggactacgaaggagccccatggaattgtgactcctgcactttcctcaaccacccagccttaaacaggtgtgaacaatgtgaaatgccgaggtatacctag

SEQ ID NO: 285149 - DNA, 3692 bp, Artificial Sequence
  derived and/or modified sequence
cacatgaccattggctggagcccagttgaccaagaaggaagccagagaaagccacacattcgggcgagcaaggatcacaaggagacacatctgagcctgatatagaggattgcacatcagcacatcattcagagatcctggactttgagatgtatgtagtaacaggacactgtcttcagccttttcttcaagtttttgaccgtggattgtgttgtgtcaaactggatgaattatcttagttgaattttcaccagttgaaaaattggagatttctagactactgaaaagaagttgctttcagagctggagatgtgaataaaatttctgtgccagggttgataaaccatcttgaggattccatccaggaaaccccatcacagttggttgttatgtctccttagactcctcttggctgtgacagtttctcagacttttgttcttgaggagtactgatcagaaaatgactgtggtgctagaagatcattacttttggaaagccggttaacatccatttcctaagagaaacttggccaccatttgctctggcatggcgcaaagcagcccacagcttgatattcaggttctccatgatcttcgacaacgtttccctgaaattccagagggcgtggtgtctcagtgcatgttacagaataacaacaatcttgaagcctgttgccgagccctttcccaggagagtagcaaatacttatatatggaataccatagtccagatgacaataggatgaatagaaatcgccttttacatattaacctgggtatccattctcctagtagctatcacccaggagatggagcccaacttaatggtggtcgaacactggtacatagctcaagtgatggacatattgatcctcagcatgcagcaggtaaacagctgatatgtttagttcaagaaccacactcagctccagctgttgttgctgctactcccaactacaatccattttttatgaacgaacagaacagaagtgcagctactcctccttcacaaccacctcaacagccatcttccatgcaaacaggaatgaatccgtctgctatgcaagggccttcaccaccaccgccacctccttcatacatgcacatacctcggtatagtacaaatccaattactgttacagtatcccagaacctcccttctggacagactgtaccaagagctttacaaattcttccacaaattccaagcaatctctatgggtctcctggttctatttatattagacagacatctcagagttcatcaggaagacaaactcctcagagtacgccgtggcagtcctcaccacagggcccagtgcctcactatagccagcgtcctttacctgtttatccacaccaacagaactatcagccttctcagtattctcccaaacagcagcagatccctcagtctgcttaccattcaccacctccttctcaatgtccttcacccttcagctctccacagcatcaagtgcaaccttcccagttgggccacatctttatgccacctagtccttcaactactccaccccatccatatcaacaaggacctcctagctatcagaaacagggaagccattcagtagcctatcttccatacacagcatctagtttatccaaaggttccatgaagaagatagaaattacagttgaaccttctcaaagacctgggacagcaattaataggagtccttcacccatcagtaatcaaccatctccatggaatcaacactcactgtacacagccaccacgccaccttcaagttctccttcaagagggatatctagtcaaccaaaacctccatttagtgttaatcctgtgtatattacatatacacagccaactggaccttcttgtactccatcaccatctcctcgagtgataccaaacccaactacagtttttaaaattaccgtaggccgagcaacgactgaaaatcttttaaatttagtggaccaagaagagcgctctgcagcaccagaacctattcagcccatttcagtgataccaggctctgggggagaaaagggaagccataaatatcagagaagttctagttctggatcagatgactatgcctacacacaagccttgctgttacatcaacgagcaaggatggagaggttagcaaagcaactgaaacttgagaaagaggagctagagcggttgaagtctgaagttaatggtatggagcatgacctgatgcagagacggctcagaagagtcagctgcaccactgcgatccctacgcctgaggaaatgacaagattgagaagcatgaacagacaactccagataaatgttgactgtacactgaaagaagttgacctccttcaatctagagactcctcagacccctgcacaattgagagaaaagcccgaagaattagcgtgacctccaaagtacaggcagacatccatgacacccaggcagcagctgcagatgagcatcgaactggctccacacaaagtcctcggacacaacctcgagatgaagactacgaaggggctccatggaattgtgatagctgcacctttcttaaccacccagcactaaatcgctgtgagcagtgcgagatgccacggtacacctgaattcagaaaagtctgcgccaggttgaaagtgaaactttgagcactaccagaagaaaaggaaacctcgggactctattcatccacccagccttttcattttcgattgcacagcggggaggaggaatggctttgtggtcgtcgttgtgctcacgaaaggaaaaatggggaggtcttttttttctcctttcttaactcactacagagtgagagatagaaagggatacttgaaactgggaaaggattcactctgtgaaagaatgtacacacagaagtcaagagctcttctgtggtggaatcccaattgttaaagttactgctgagtggcccttattttttaaagtagtactttgaatcatagtatgaaatgctacagtttatgcaaactgtgaattcccagagcagacttacctggtcaccgctctctggaaaaccaaggctccccgtgcttcttcccattgcttcctactaaagaggacaacaggaaaaagcacctagaatatttggggggggggggcaaattaattaagggtatttgtaattgctgcttttttcaggggtaatttccaacacacatacatgcacacaaacaaaatgttttaaaatgtgatttgtagcagtcaggaactaggcatatcatgcctttgtttaaaagtacaatcagaggtggtaagatgcctttggcttgtacagtgtgattcatcgagctctatcaacactggtaactaagacctacttatgccacataagagatgcatttttttaagttactgcatgtttttattaaggccattggttttcaaaataacaagtccttacaaagtatgattttataaatgatattctcgtaaaactgcgctttgccagtagcacagtgaatgtatgccaaatgcaagtccattccaaaatccatttggaaatcttgagctcagctgtggttcttaaacttttgcagtccatagggccttttttttttccttccaattttgtgataaattcatgatgtttacagcacagataaaactttgtgccataatcctaatttagctgaaatcaatattaactgttcaataaaaacttacttgcatatgtt

SEQ ID NO: 285150 - DNA, 9790 bp, Artificial Sequence
  derived and/or modified sequence
ccgagctgcctcacccccggccccgggaagggcatggccccggcaaactcccggccgtgactcgcgcgccccggctcggtggatgctcccggcgcaccgctcccgtgtgcggcggcttcccaaggacaggtatccgagaatcaggcaccccgacaagatgcccaagcgcgcgcactggggggccctctccgtggtgctgatcctgctttggggccatccgcgagtggcgctggcctgcccgcatccttgtgcctgctacgtccccagcgaggtccactgcacgttccgatccctggcttccgtgcccgctggcattgctaaacacgtggaaagaatcaatttggggtttaatagcatacaggccctgtcagaaacctcatttgcaggactgaccaagttggagctacttatgattcacggcaatgagatcccaagcatccccgatggagctttaagagacctcagctctcttcaggttttcaagttcagctacaacaagctgagagtgatcacaggacagaccctccagggtctctctaacttaatgaggctgcacattgaccacaacaagatcgagtttatccaccctcaagctttcaacggcttaacgtctctgaggctactccatttggaaggaaatctcctccaccagctgcaccccagcaccttctccacgttcacatttttggattatttcagactctccaccataaggcacctctacttagcagagaacatggttagaactcttcctgccagcatgcttcggaacatgccgcttctggagaatctttacttgcagggaaatccgtggacctgcgattgtgagatgagatggtttttggaatgggatgcaaaatccagaggaattctgaagtgtaaaaaggacaaagcttatgaaggcggtcagttgtgtgcaatgtgcttcagtccaaagaagttgtacaaacatgagatacacaagctgaaggacatgacttgtctgaagccttcaatagagtcccctctgagacagaacaggagcaggagtattgaggaggagcaagaacaggaagaggatggtggcagccagctcatcctggagaaattccaactgccccagtggagcatctctttgaatatgaccgacgagcacgggaacatggtgaacttggtctgtgacatcaagaaaccaatggatgtgtacaagattcacttgaaccaaacggatcctccagatattgacataaatgcaacagttgccttggactttgagtgtccaatgacccgagaaaactatgaaaagctatggaaattgatagcatactacagtgaagttcccgtgaagctacacagagagctcatgctcagcaaagaccccagagtcagctaccagtacaggcaggatgctgatgaggaagctctttactacacaggtgtgagagcccagattcttgcagaaccagaatgggtcatgcagccatccatagatatccagctgaaccgacgtcagagtacggccaagaaggtgctactttcctactacacccagtattctcaaacaatatccaccaaagatacaaggcaggctcggggcagaagctgggtaatgattgagcctagtggagctgtgcaaagagatcagactgtcctggaagggggtccatgccagttgagctgcaacgtgaaagcttctgagagtccatctatcttctgggtgcttccagatggctccatcctgaaagcgcccatggatgacccagacagcaagttctccattctcagcagtggctggctgaggatcaagtccatggagccatctgactcaggcttgtaccagtgcattgctcaagtgagggatgaaatggaccgcatggtatatagggtacttgtgcagtctccctccactcagccagccgagaaagacacagtgacaattggcaagaacccaggggagtcggtgacattgccttgcaatgctttagcaatacccgaagcccaccttagctggattcttccaaacagaaggataattaatgatttggctaacacatcacatgtatacatgttgccaaatggaactctttccatcccaaaggtccaagtcagtgacagtggttactacagatgtgtggctgtcaaccagcaaggggcagaccattttacggtgggaatcacagtgaccaagaaagggtctggcttgccatccaaaagaggcagacgcccaggtgcaaaggctctttccagagtcagagaagacatcgtggaggatgaagggggctcgggcatgggagatgaagagaacacttcaaggagacttctgcatccaaaggaccaagaggtgttcctcaaaacaaaggatgatgccatcaatggagacaagaaagccaagaaagggagaagaaagctgaaactctggaagcattcggaaaaagaaccagagaccaatgttgcagaaggtcgcagagtgtttgaatctagacgaaggataaacatggcaaacaaacagattaatccggagcgctgggctgatattttagccaaagtccgtgggaaaaatctccctaagggcacagaagtacccccattgattaaaaccacaagtcctccatccttgagtctagaagtcacaccaccttttcctgctatttctcccccctcagcatctcctgtgcagacagtaaccagtgctgaagaatcctcagcagatgtacctctacttggtgaagaagagcacgttttgggtaccatttcctcagccagcatggggctagaacacaaccacaatggagttattcttgttgaacctgaagtaacaagcacacctctggaggaagttgttgatgacctttccgagaagactgaggagataacttccactgaaggagacctgaaggggacagcagcccctacacttatatctgagccttatgaaccatctcctactctgcacacattagacacagtctatgaaaagcccacccatgaagagacggcaacagagggttggtctgcagcagatgttggatcgtcaccagagcccacatccagtgagtatgagcctccattggatgctgtctccttggctgagtctgagcccatgcaatactttgacccagatttggagactaagtcacaaccagatgaggataagatgaaagaagacacctttgcacaccttactccaacccccaccatctgggttaatgactccagtacatcacagttatttgaggattctactataggggaaccaggtgtcccaggccaatcacatctacaaggactgacagacaacatccaccttgtgaaaagtagtctaagcactcaagacaccttactgattaaaaagggtatgaaagagatgtctcagacactacagggaggaaatatgctagagggagaccccacacactccagaagttctgagagtgagggccaagagagcaaatccatcactttgcctgactccacactgggtataatgagcagtatgtctccagttaagaagcctgcggaaaccacagttggtaccctcctagacaaagacaccacaacagcaacaacaacaccaaggcaaaaagttgctccgtcatccaccatgagcactcacccttctcgaaggagacccaacgggagaaggagattacgccccaacaaattccgccaccggcacaagcaaaccccacccacaacttttgccccatcagagactttttctactcaaccaactcaagcacctgacattaagatttcaagtcaagtggagagttctctggttcctacagcttgggtggataacacagttaatacccccaaacagttggaaatggagaagaatgcagaacccacatccaagggaacaccacggagaaaacacgggaagaggccaaacaaacatcgatataccccttctacagtgagctcaagagcgtccggatccaagcccagcccttctccagaaaataaacatagaaacattgttactcccagttcagaaactatacttttgcctagaactgtttctctgaaaactgagggcccttatgattccttagattacatgacaaccaccagaaaaatatattcatcttaccctaaagtccaagagacacttccagtcacatataaacccacatcagatggaaaagaaattaaggatgatgttgccacaaatgttgacaaacataaaagtgacattttagtcactggtgaatcaattactaatgccataccaacttctcgctccttggtctccactatgggagaatttaaggaagaatcctctcctgtaggctttccaggaactccaacctggaatccctcaaggacggcccagcctgggaggctacagacaggcatacctgttaccacttctggggaaaatcttacagaccctccccttcttaaagagcttgaggatgtggatttcacttccgagtttttgtcctctttgacagtctccacaccatttcaccaggaagaagctggttcttccacaactctctcaagcataaaagtggaggtggcttcaagtcaggcagaaaccaccacccttgatcaagatcatcttgaaaccactgtggctattctcctttctgaaactagaccacagaatcacacccctactgctgcccggatgaaggagccagcatcctcgtccccatccacaattctcatgtctttgggacaaaccaccaccactaagccagcacttcccagtccaagaatatctcaagcatctagagattccaaggaaaatgttttcttgaattatgtggggaatccagaaacagaagcaaccccagtgaacaatgaaggaacacagcatatgtcagggccaaatgaattatcaacaccctcttccgaccaggatgcatttaacttgtctacaaagctggaattggaaaagcaagtatttggtagtaggagtctaccacgtggcccagatagccaacgccaggatggaagagttcatgcttctcatcaactaaccagagtccctgccaaacccatcctaccaacagcaacagtgaggctgcctgaaatgtccacacaaagcgcttccagatactttgtaacttcccagtcacctcgtcactggaccaacaaaccggaaataactacatatccttctggggctttgccagagaacaaacagtttacaactccaagattatcaagtacaacaattcctctcccattgcacatgtccaaacccagcattcctagtaagtttactgaccgaagaactgaccaattcaatggctactccaaagtgtttggaaataacaacatccctgaggcaagaaacccagttggaaagcctcccagtccaagaattcctcattattccaatggaagactccctttctttaccaacaagactctttcttttccacagttgggagtcacccggagaccccagatacccacttctcctgccccagtaatgagagagagaaaagttattccaggttcctacaacaggatacattcccatagcaccttccatctggactttggccctccggcacctccgttgttgcacactccgcagaccacgggatcaccctcaactaacttacagaatatccctatggtctcttccacccagagttctatctcctttataacatcttctgtccagtcctcaggaagcttccaccagagcagctcaaagttctttgcaggaggacctcctgcatccaaattctggtctcttggggaaaagccacaaatcctcaccaagtccccacagactgtgtccgtcaccgctgagacagacactgtgttcccctgtgaggcaacaggaaaaccaaagcctttcgttacttggacaaaggtttccacaggagctcttatgactccgaataccaggatacaacggtttgaggttctcaagaacggtaccttagtgatacggaaggttcaagtacaagatcgaggccagtatatgtgcaccgccagcaacctgcacggcctggacaggatggtggtcttgctttcggtcaccgtgcagcaacctcaaatcctagcctcccactaccaggacgtcactgtctacctgggagacaccattgcaatggagtgtctggccaaagggaccccagccccccaaatttcctggatcttccctgacaggagggtgtggcaaactgtgtcccccgtggagggccgcatcaccctgcacgaaaaccggaccctttccatcaaggaggcgtccttctcagacagaggcgtctataagtgcgtggccagcaatgcagccggggcggacagcctggccatccgcctgcacgtggcggcactgccccccgttatccaccaggagaagctggagaacatctcgctgcccccggggctcagcattcacattcactgcactgccaaggctgcgcccctgcccagcgtgcgctgggtgctcggggacggtacccagatccgcccctcgcagttcctccacgggaacttgtttgttttccccaacgggacgctctacatccgcaacctcgcgcccaaggacagcgggcgctatgagtgcgtggccgccaacctggtaggctccgcgcgcaggacggtgcagctgaacgtgcagcgtgcagcagccaacgcgcgcatcacgggcacctccccgcggaggacggacgtcaggtacggaggaaccctcaagctggactgcagcgcctcgggggacccctggccgcgcatcctctggaggctgccgtccaagaggatgatcgacgcgctcttcagttttgatagcagaatcaaggtgtttgccaatgggaccctggtggtgaaatcagtgacggacaaagatgccggagattacctgtgcgtagctcgaaataaggttggtgatgactacgtggtgctcaaagtggatgtggtgatgaaaccggccaagattgaacacaaggaggagaacgaccacaaagtcttctacgggggtgacctgaaagtggactgtgtggccaccgggcttcccaatcccgagatctcctggagcctcccagacgggagtctggtgaactccttcatgcagtcggatgacagcggtggacgcaccaagcgctatgtcgtcttcaacaatgggacactctactttaacgaagtggggatgagggaggaaggagactacacctgctttgctgaaaatcaggtcgggaaggacgagatgagagtcagagtcaaggtggtgacagcgcccgccaccatccggaacaagacttacttggcggttcaggtgccctatggagacgtggtcactgtagcctgtgaggccaaaggagaacccatgcccaaggtgacttggttgtccccaaccaacaaggtgatccccacctcctctgagaagtatcagatataccaagatggcactctccttattcagaaagcccagcgttctgacagcggcaactacacctgcttggtcaggaacagcgcgggagaggataggaagacggtgtggattcacgtcaacgtccagccacccaagatcaacggtaaccccaaccccatcaccactgtgcgggagatagcagccgggggcagtcggaaactgattgactgcaaagctgaaggcatccccaccccgagggtgttatgggcttttcccgagggtgtggttctgccagctccatactatggaaaccggatcactgtccatggcaacggttccctggacatcaggagtttgaggaagagcgactccgtccagctggtatgcatggcacgcaacgagggaggggaggccaggttgatcctgcagctcactgtcctggagcccatggagaaacccatcttccacgacccgatcagcgagaagatcacggccatggcgggccacaccatcagcctcaactgctctgccgcggggaccccgacacccagcctggtgtgggtccttcccaatggcaccgatctgcagagtggacagcagctgcagcgcttctaccacaaggctgacggcatgctacacattagcggtctctcctcggtggacgccggggcctaccgctgcgtggcccgcaatgccgctggccacacggagaggctggtctccctgaaggtgggactgaagccagaagcaaacaagcagtatcataacctggtcagcatcatcaatggtgagaccctgaagctcccctgcacccctcccggggctgggcagggacgtttctcctggacgctccccaatggcatgcatctggagggcccccaaaccctgggacgcgtttctcttctggacaatggcaccctcacggttcgtgaggcctcggtgtttgacaggggtacctatgtatgcaggatggagacggagtacggcccttcggtcaccagcatccccgtgattgtgatcgcctatcctccccggatcaccagcgagcccaccccggtcatctacacccggcccgggaacaccgtgaaactgaactgcatggctatggggattcccaaagctgacatcacgtgggagttaccggataagtcgcatctgaaggcaggggttcaggctcgtctgtatggaaacagatttcttcacccccagggatcactgaccatccagcatgccacacagagagatgccggcttctacaagtgcatggcaaaaaacattctcggcagtgactccaaaacaacttacatccacgtcttctgaaatgtggattccagaatgattgcttaggaactgacaacaaagcggggtttgtaagggaagccaggttggggaataggagctcttaaataatgtgtcacagtgcatggtggcctctggtgggtttcaagttgaggttgatcttgatctacaattgttgggaaaaggaagcaatgcagacacgagaaggagggctcagccttgctgagacactttcttttgtgtttacatcatgccaggggcttcattcagggtgtctgtgctctgactgcaatttttctttttttgcaaatgccactcgactgccttcataagcgtccataggatatctgaggaacattcatcaaaaataagccatagacatgaacaacacctcactaccccattgaagacgcatcacctagttaacctgctgcagtttttacatgatagactttgttccagattgacaagtcatctttcagttatttcctctgtcacttcaaaactccagcttgcccaataaggatttagaaccagagtgactgatatatatatatattttaattcagagttacatacatacagctaccattttatatgaaaaaagaaaaacatttcttcctggaactcactttttatataatgttttatatatatattttttcctttcaaatcagacgatgagactagaaggagaaatactttctgtcttattaaaattaataaattattggtctttacaagacttggatacattacagcagacatggaaatataattttaaaaaatttctctccaacctccttcaaattcagtcaccactgttatattaccttctccaggaaccctccagtggggaaggctgcgatattagatttccttgtatgcaaagtttttgttgaaagctgtgctcagaggaggtgagaggagaggaaggagaaaactgcatcataactttacagaattgaatctagagtcttccccgaaaagcccagaaacttctctgcagtatctggcttgtccatctggtctaaggtggctgcttcttccccagccatgagtcagtttgtgcccatgaataatacacgacctgttatttccatgactgctttactgtatttttaaggtcaatatactgtacatttgataataaaataatattctccc

SEQ ID NO: 285151 - DNA, 9765 bp, Artificial Sequence
  derived and/or modified sequence
gagctgcctcacccccggccccgggaagggcatggccccggcaaactcccggccgtgactcgcgcgccccggctcggtggatgctcccggcgcaccgctcccgtgtgcggcggcttcccaaggacagatgcccaagcgcgcgcactggggggccctctccgtggtgctgatcctgctttggggccatccgcgagtggcgctggcctgcccgcatccttgtgcctgctacgtccccagcgaggtccactgcacgttccgatccctggcttccgtgcccgctggcattgctaaacacgtggaaagaatcaatttggggtttaatagcatacaggccctgtcagaaacctcatttgcaggactgaccaagttggagctacttatgattcacggcaatgagatcccaagcatccccgatggagctttaagagacctcagctctcttcaggttttcaagttcagctacaacaagctgagagtgatcacaggacagaccctccagggtctctctaacttaatgaggctgcacattgaccacaacaagatcgagtttatccaccctcaagctttcaacggcttaacgtctctgaggctactccatttggaaggaaatctcctccaccagctgcaccccagcaccttctccacgttcacatttttggattatttcagactctccaccataaggcacctctacttagcagagaacatggttagaactcttcctgccagcatgcttcggaacatgccgcttctggagaatctttacttgcagggaaatccgtggacctgcgattgtgagatgagatggtttttggaatgggatgcaaaatccagaggaattctgaagtgtaaaaaggacaaagcttatgaaggcggtcagttgtgtgcaatgtgcttcagtccaaagaagttgtacaaacatgagatacacaagctgaaggacatgacttgtctgaagccttcaatagagtcccctctgagacagaacaggagcaggagtattgaggaggagcaagaacaggaagaggatggtggcagccagctcatcctggagaaattccaactgccccagtggagcatctctttgaatatgaccgacgagcacgggaacatggtgaacttggtctgtgacatcaagaaaccaatggatgtgtacaagattcacttgaaccaaacggatcctccagatattgacataaatgcaacagttgccttggactttgagtgtccaatgacccgagaaaactatgaaaagctatggaaattgatagcatactacagtgaagttcccgtgaagctacacagagagctcatgctcagcaaagaccccagagtcagctaccagtacaggcaggatgctgatgaggaagctctttactacacaggtgtgagagcccagattcttgcagaaccagaatgggtcatgcagccatccatagatatccagctgaaccgacgtcagagtacggccaagaaggtgctactttcctactacacccagtattctcaaacaatatccaccaaagatacaaggcaggctcggggcagaagctgggtaatgattgagcctagtggagctgtgcaaagagatcagactgtcctggaagggggtccatgccagttgagctgcaacgtgaaagcttctgagagtccatctatcttctgggtgcttccagatggctccatcctgaaagcgcccatggatgacccagacagcaagttctccattctcagcagtggctggctgaggatcaagtccatggagccatctgactcaggcttgtaccagtgcattgctcaagtgagggatgaaatggaccgcatggtatatagggtacttgtgcagtctccctccactcagccagccgagaaagacacagtgacaattggcaagaacccaggggagtcggtgacattgccttgcaatgctttagcaatacccgaagcccaccttagctggattcttccaaacagaaggataattaatgatttggctaacacatcacatgtatacatgttgccaaatggaactctttccatcccaaaggtccaagtcagtgacagtggttactacagatgtgtggctgtcaaccagcaaggggcagaccattttacggtgggaatcacagtgaccaagaaagggtctggcttgccatccaaaagaggcagacgcccaggtgcaaaggctctttccagagtcagagaagacatcgtggaggatgaagggggctcgggcatgggagatgaagagaacacttcaaggagacttctgcatccaaaggaccaagaggtgttcctcaaaacaaaggatgatgccatcaatggagacaagaaagccaagaaagggagaagaaagctgaaactctggaagcattcggaaaaagaaccagagaccaatgttgcagaaggtcgcagagtgtttgaatctagacgaaggataaacatggcaaacaaacagattaatccggagcgctgggctgatattttagccaaagtccgtgggaaaaatctccctaagggcacagaagtacccccattgattaaaaccacaagtcctccatccttgagtctagaagtcacaccaccttttcctgctatttctcccccctcagcatctcctgtgcagacagtaaccagtgctgaagaatcctcagcagatgtacctctacttggtgaagaagagcacgttttgggtaccatttcctcagccagcatggggctagaacacaaccacaatggagttattcttgttgaacctgaagtaacaagcacacctctggaggaagttgttgatgacctttccgagaagactgaggagataacttccactgaaggagacctgaaggggacagcagcccctacacttatatctgagccttatgaaccatctcctactctgcacacattagacacagtctatgaaaagcccacccatgaagagacggcaacagagggttggtctgcagcagatgttggatcgtcaccagagcccacatccagtgagtatgagcctccattggatgctgtctccttggctgagtctgagcccatgcaatactttgacccagatttggagactaagtcacaaccagatgaggataagatgaaagaagacacctttgcacaccttactccaacccccaccatctgggttaatgactccagtacatcacagttatttgaggattctactataggggaaccaggtgtcccaggccaatcacatctacaaggactgacagacaacatccaccttgtgaaaagtagtctaagcactcaagacaccttactgattaaaaagggtatgaaagagatgtctcagacactacagggaggaaatatgctagagggagaccccacacactccagaagttctgagagtgagggccaagagagcaaatccatcactttgcctgactccacactgggtataatgagcagtatgtctccagttaagaagcctgcggaaaccacagttggtaccctcctagacaaagacaccacaacagcaacaacaacaccaaggcaaaaagttgctccgtcatccaccatgagcactcacccttctcgaaggagacccaacgggagaaggagattacgccccaacaaattccgccaccggcacaagcaaaccccacccacaacttttgccccatcagagactttttctactcaaccaactcaagcacctgacattaagatttcaagtcaagtggagagttctctggttcctacagcttgggtggataacacagttaatacccccaaacagttggaaatggagaagaatgcagaacccacatccaagggaacaccacggagaaaacacgggaagaggccaaacaaacatcgatataccccttctacagtgagctcaagagcgtccggatccaagcccagcccttctccagaaaataaacatagaaacattgttactcccagttcagaaactatacttttgcctagaactgtttctctgaaaactgagggcccttatgattccttagattacatgacaaccaccagaaaaatatattcatcttaccctaaagtccaagagacacttccagtcacatataaacccacatcagatggaaaagaaattaaggatgatgttgccacaaatgttgacaaacataaaagtgacattttagtcactggtgaatcaattactaatgccataccaacttctcgctccttggtctccactatgggagaatttaaggaagaatcctctcctgtaggctttccaggaactccaacctggaatccctcaaggacggcccagcctgggaggctacagacaggcatacctgttaccacttctggggaaaatcttacagaccctccccttcttaaagagcttgaggatgtggatttcacttccgagtttttgtcctctttgacagtctccacaccatttcaccaggaagaagctggttcttccacaactctctcaagcataaaagtggaggtggcttcaagtcaggcagaaaccaccacccttgatcaagatcatcttgaaaccactgtggctattctcctttctgaaactagaccacagaatcacacccctactgctgcccggatgaaggagccagcatcctcgtccccatccacaattctcatgtctttgggacaaaccaccaccactaagccagcacttcccagtccaagaatatctcaagcatctagagattccaaggaaaatgttttcttgaattatgtggggaatccagaaacagaagcaaccccagtgaacaatgaaggaacacagcatatgtcagggccaaatgaattatcaacaccctcttccgaccaggatgcatttaacttgtctacaaagctggaattggaaaagcaagtatttggtagtaggagtctaccacgtggcccagatagccaacgccaggatggaagagttcatgcttctcatcaactaaccagagtccctgccaaacccatcctaccaacagcaacagtgaggctgcctgaaatgtccacacaaagcgcttccagatactttgtaacttcccagtcacctcgtcactggaccaacaaaccggaaataactacatatccttctggggctttgccagagaacaaacagtttacaactccaagattatcaagtacaacaattcctctcccattgcacatgtccaaacccagcattcctagtaagtttactgaccgaagaactgaccaattcaatggctactccaaagtgtttggaaataacaacatccctgaggcaagaaacccagttggaaagcctcccagtccaagaattcctcattattccaatggaagactccctttctttaccaacaagactctttcttttccacagttgggagtcacccggagaccccagatacccacttctcctgccccagtaatgagagagagaaaagttattccaggttcctacaacaggatacattcccatagcaccttccatctggactttggccctccggcacctccgttgttgcacactccgcagaccacgggatcaccctcaactaacttacagaatatccctatggtctcttccacccagagttctatctcctttataacatcttctgtccagtcctcaggaagcttccaccagagcagctcaaagttctttgcaggaggacctcctgcatccaaattctggtctcttggggaaaagccacaaatcctcaccaagtccccacagactgtgtccgtcaccgctgagacagacactgtgttcccctgtgaggcaacaggaaaaccaaagcctttcgttacttggacaaaggtttccacaggagctcttatgactccgaataccaggatacaacggtttgaggttctcaagaacggtaccttagtgatacggaaggttcaagtacaagatcgaggccagtatatgtgcaccgccagcaacctgcacggcctggacaggatggtggtcttgctttcggtcaccgtgcagcaacctcaaatcctagcctcccactaccaggacgtcactgtctacctgggagacaccattgcaatggagtgtctggccaaagggaccccagccccccaaatttcctggatcttccctgacaggagggtgtggcaaactgtgtcccccgtggagggccgcatcaccctgcacgaaaaccggaccctttccatcaaggaggcgtccttctcagacagaggcgtctataagtgcgtggccagcaatgcagccggggcggacagcctggccatccgcctgcacgtggcggcactgccccccgttatccaccaggagaagctggagaacatctcgctgcccccggggctcagcattcacattcactgcactgccaaggctgcgcccctgcccagcgtgcgctgggtgctcggggacggtacccagatccgcccctcgcagttcctccacgggaacttgtttgttttccccaacgggacgctctacatccgcaacctcgcgcccaaggacagcgggcgctatgagtgcgtggccgccaacctggtaggctccgcgcgcaggacggtgcagctgaacgtgcagcgtgcagcagccaacgcgcgcatcacgggcacctccccgcggaggacggacgtcaggtacggaggaaccctcaagctggactgcagcgcctcgggggacccctggccgcgcatcctctggaggctgccgtccaagaggatgatcgacgcgctcttcagttttgatagcagaatcaaggtgtttgccaatgggaccctggtggtgaaatcagtgacggacaaagatgccggagattacctgtgcgtagctcgaaataaggttggtgatgactacgtggtgctcaaagtggatgtggtgatgaaaccggccaagattgaacacaaggaggagaacgaccacaaagtcttctacgggggtgacctgaaagtggactgtgtggccaccgggcttcccaatcccgagatctcctggagcctcccagacgggagtctggtgaactccttcatgcagtcggatgacagcggtggacgcaccaagcgctatgtcgtcttcaacaatgggacactctactttaacgaagtggggatgagggaggaaggagactacacctgctttgctgaaaatcaggtcgggaaggacgagatgagagtcagagtcaaggtggtgacagcgcccgccaccatccggaacaagacttacttggcggttcaggtgccctatggagacgtggtcactgtagcctgtgaggccaaaggagaacccatgcccaaggtgacttggttgtccccaaccaacaaggtgatccccacctcctctgagaagtatcagatataccaagatggcactctccttattcagaaagcccagcgttctgacagcggcaactacacctgcttggtcaggaacagcgcgggagaggataggaagacggtgtggattcacgtcaacgtccagccacccaagatcaacggtaaccccaaccccatcaccactgtgcgggagatagcagccgggggcagtcggaaactgattgactgcaaagctgaaggcatccccaccccgagggtgttatgggcttttcccgagggtgtggttctgccagctccatactatggaaaccggatcactgtccatggcaacggttccctggacatcaggagtttgaggaagagcgactccgtccagctggtatgcatggcacgcaacgagggaggggaggccaggttgatcctgcagctcactgtcctggagcccatggagaaacccatcttccacgacccgatcagcgagaagatcacggccatggcgggccacaccatcagcctcaactgctctgccgcggggaccccgacacccagcctggtgtgggtccttcccaatggcaccgatctgcagagtggacagcagctgcagcgcttctaccacaaggctgacggcatgctacacattagcggtctctcctcggtggacgccggggcctaccgctgcgtggcccgcaatgccgctggccacacggagaggctggtctccctgaaggtgggactgaagccagaagcaaacaagcagtatcataacctggtcagcatcatcaatggtgagaccctgaagctcccctgcacccctcccggggctgggcagggacgtttctcctggacgctccccaatggcatgcatctggagggcccccaaaccctgggacgcgtttctcttctggacaatggcaccctcacggttcgtgaggcctcggtgtttgacaggggtacctatgtatgcaggatggagacggagtacggcccttcggtcaccagcatccccgtgattgtgatcgcctatcctccccggatcaccagcgagcccaccccggtcatctacacccggcccgggaacaccgtgaaactgaactgcatggctatggggattcccaaagctgacatcacgtgggagttaccggataagtcgcatctgaaggcaggggttcaggctcgtctgtatggaaacagatttcttcacccccagggatcactgaccatccagcatgccacacagagagatgccggcttctacaagtgcatggcaaaaaacattctcggcagtgactccaaaacaacttacatccacgtcttctgaaatgtggattccagaatgattgcttaggaactgacaacaaagcggggtttgtaagggaagccaggttggggaataggagctcttaaataatgtgtcacagtgcatggtggcctctggtgggtttcaagttgaggttgatcttgatctacaattgttgggaaaaggaagcaatgcagacacgagaaggagggctcagccttgctgagacactttcttttgtgtttacatcatgccaggggcttcattcagggtgtctgtgctctgactgcaatttttctttttttgcaaatgccactcgactgccttcataagcgtccataggatatctgaggaacattcatcaaaaataagccatagacatgaacaacacctcactaccccattgaagacgcatcacctagttaacctgctgcagtttttacatgatagactttgttccagattgacaagtcatctttcagttatttcctctgtcacttcaaaactccagcttgcccaataaggatttagaaccagagtgactgatatatatatatattttaattcagagttacatacatacagctaccattttatatgaaaaaagaaaaacatttcttcctggaactcactttttatataatgttttatatatatattttttcctttcaaatcagacgatgagactagaaggagaaatactttctgtcttattaaaattaataaattattggtctttacaagacttggatacattacagcagacatggaaatataattttaaaaaatttctctccaacctccttcaaattcagtcaccactgttatattaccttctccaggaaccctccagtggggaaggctgcgatattagatttccttgtatgcaaagtttttgttgaaagctgtgctcagaggaggtgagaggagaggaaggagaaaactgcatcataactttacagaattgaatctagagtcttccccgaaaagcccagaaacttctctgcagtatctggcttgtccatctggtctaaggtggctgcttcttccccagccatgagtcagtttgtgcccatgaataatacacgacctgttatttccatgactgctttactgtatttttaaggtcaatatactgtacatttgataataaaataatattctcccaaaaa

SEQ ID NO: 285152 - DNA, 285 bp, Artificial Sequence
  derived and/or modified sequence
aaaatccttgatgccatgaacagggattgcggtatccccctttctcacctccaggtggatgggggtatgacgtctaataaaatactgatgcagttgcaggccgatattctgtatatccccgtcgttaagccctcgatgcccgagacaacagccctgggtgccgcgatggccgcgggggctgccgaaggggtaggggtgtggagcttggaacctgaggatttgagtgccgttactatggagcgattcgaaccgcagatcaacgctgagggaaccttcaaggagtag

SEQ ID NO: 285153 - DNA, 464 bp, Artificial Sequence
  derived and/or modified sequence
aagattttggatgccatgaatcgagactgtggaattccactcagtcatttgcaggtagatggaggaatgaccagcaacaaaattcttatgcagctacaagcagacattctgtatataccagtagtgaagccctcaatgcccgaaaccactgcactgggtgcggctatggcggcaggggctgcagaaggagtcggcgtatggagtctcgaacccgaggatttgtctgccgtcacgatggagcggtttgaacctcagattaatgcggagggtacatttaaagaatgaaatgttcagtgatatactgtgaaaacgaccttagtgcacgggagttttgtttttctgtttagttaaaagttaaggaaccaagtaaaatagtaaatgttatcattgcagattcggctgccaagcatattgggctttactgaataaatgtgaatgagagaaatcgttgcttatcaaaagaa

SEQ ID NO: 285154 - DNA, 285 bp, Artificial Sequence
  derived and/or modified sequence
aagatcctggatgccatgaacagagactgtggcatccccctgagccacctgcaggtggatggcggcatgaccagcaacaagatcctgatgcagctgcaggccgacatcctgtacatccctgtggtgaagcccagcatgcctgagaccacagccctgggcgccgccatggccgccggggctgctgagggcgtgggcgtgtggagcctggagcctgaggacctgtctgctgtgaccatggagagatttgagccccagatcaatgctgagggcaccttcaaggagtag

SEQ ID NO: 285155 - DNA, 285 bp, Artificial Sequence
  derived and/or modified sequence
aagatcctggacgccatgaaccgggactgcggcatccccctgagccacctccaggtggacgggggaatgacaagcaataagattctgatgcagcttcaagccgacattctgtatatccctgtagtgaagcctagcatgcccgagactactgccttgggagcagcaatggccgctggggccgccgagggggtgggggtttggagtctcgagccggaggacctgagcgcggtgactatggagaggttcgaaccacagatcaatgccgagggaaccttcaaagagtag

SEQ ID NO: 285156 - DNA, 285 bp, Artificial Sequence
  derived and/or modified sequence
aagatcttagatgccatgaatcgggactgtggcatccccctatcccacctccaggtcgacggagggatgaccagcaataaaatccttatgcagttgcaggccgacattctgtacatcccagtggttaagccaagtatgccggagacgacagcccttggggcagcaatggctgcgggtgcggctgaaggggtgggtgtgtggagtttggaaccagaagatctgtctgccgtcactatggaaagattcgagccacagattaatgctgagggtacatttaaggaatag

SEQ ID NO: 285157 - DNA, 285 bp, Artificial Sequence
  derived and/or modified sequence
aagatcctggacgccatgaacagagactgcggcatccccctgagccacctgcaggtggacggcggcatgaccagcaacaagatcctgatgcagctgcaggccgacatcctgtacatccccgtggtgaagcccagcatgcccgagaccaccgccctgggcgccgccatggccgccggcgccgccgagggcgtgggcgtgtggagcctggagcccgaggacctgagcgccgtgaccatggagagattcgagccccagatcaacgccgagggcaccttcaaggagtag

SEQ ID NO: 285158 - protein, 107 aa, Artificial Sequence
  derived and/or modified sequence
MKPAMETAAEENTEQSQERKGCFECCIKCLGGVPYASLVATILCFSGVALFCGCGHVALAGTVAILEQHFSTNASDHALLSEVIQLMQYVIYGIASFFFLYGIILLA

SEQ ID NO: 285159 - protein, 589 aa, Artificial Sequence
  derived and/or modified sequence
MLHLHHSCLCFRSWLPAMLAVLLSLAPSASSDISASRPNILLLMADDLGIGDIGCYGNNTMRTPNIDRLAEDGVKLTQHISAASLCTPSRAAFLTGRYPVRSGMVSSIGYRVLQWTGASGGLPTNETTFAKILKEKGYATGLIGKWHLGLNCESASDHCHHPLHHGFDHFYGMPFSLMGDCARWELSEKRVNLEQKLNFLFQVLALVALTLVAGKLTHLIPVSWMPVIWSALSAVLLLASSYFVGALIVHADCFLMRNHTITEQPMCFQRTTPLILQEVASFLKRNKHGPFLLFVSFLHVHIPLITMENFLGKSLHGLYGDNVEEMDWMVGRILDTLDVEGLSNSTLIYFTSDHGGSLENQLGNTQYGGWNGIYKGGKGMGGWEGGIRVPGIFRWPGVLPAGRVIGEPTSLMDVFPTVVRLAGGEVPQDRVIDGQDLLPLLLGTAQHSDHEFLMHYCERFLHAARWHQRDRGTMWKVHFVTPVFQPEGAGACYGRKVCPCFGEKVVHHDPPLLFDLSRDPSETHILTPASEPVFYQVMERVQQAVWEHQRTLSPVPLQLDRLGNIWRPWLQPCCGPFPLCWCLREDDPQ

SEQ ID NO: 285160 - protein, 178 aa, Artificial Sequence
  derived and/or modified sequence
MLHLHHSCLCFRSWLPAMLAVLLSLAPSASSDISASRPNILLLMADDLGIGDIGCYGNNTMRTPNIDRLAEDGVKLTQHISAASLCTPSRAAFLTGRYPVRSGMVSSIGYRVLQWTGASGGLPTNETTFAKILKEKGYATGLIGKWHLGLNCESASDHCHHPLHHGFDHFYGMPFSLM

SEQ ID NO: 285161 - DNA, 1853 bp, Artificial Sequence
  derived and/or modified sequence
ccttcctcttcttgatcggggattcaggaaggagcccaggagcagaggaagtagagagagagacaacatgttacatctgcaccattcttgtttgtgtttcaggagctggctgccagcgatgctcgctgtactgctaagtttggcaccatcagcttccagcgacatttccgcctcccgaccgaacatccttcttctgatggcggacgaccttggcattggggacattggctgctatggcaacaacaccatgaggactccgaatattgaccgccttgcagaggacggcgtgaagctgacccaacacatctctgccgcatctttgtgcaccccaagcagagccgccttcctcacgggcagataccctgtgcgatcagggatggtttccagcattggttaccgtgttcttcagtggaccggagcatctggaggtcttccaacaaatgagacaacttttgcaaaaatactgaaagagaaaggctatgccactggactcattggaaaatggcatctgggtctcaactgtgagtcagccagtgatcattgccaccaccctctccatcatggctttgaccatttctacggaatgcctttctccttgatgggtgattgcgcccgctgggaactctcagagaagcgtgtcaacctggaacaaaaactcaacttcctcttccaagtcctggccttggttgccctcacactggtagcagggaagctcacacacctgatacccgtctcgtggatgccggtcatctggtcagccctttcggccgtcctcctcctcgcaagctcctattttgtgggtgctctgattgtccatgccgattgctttctgatgagaaaccacaccatcacggagcagcccatgtgcttccaaagaacgacaccccttattctgcaggaggttgcgtcctttctcaaaaggaataagcatgggcctttcctcctctttgtttcctttctacacgttcacatccctcttatcactatggagaacttcctcgggaagagtctccacgggctgtatggggacaacgtagaggagatggactggatggtaggacggatccttgacactttggacgtggagggtttgagcaacagcaccctcatttattttacgtcggatcacggcggttccctagagaatcaacttggaaacacccagtatggtggctggaatggaatttataaaggtgggaagggcatgggaggatgggaaggtgggatccgcgtgcccgggatcttccgctggcccggggtgctcccggccggccgagtgattggcgagcccacgagtctgatggacgtgttccccaccgtggtccggctggcgggcggcgaggtgccccaggacagagtgattgacggccaagaccttctgcccttgctcctggggacagcccaacactcagaccacgagttcctgatgcattattgtgagaggtttctgcacgcagccaggtggcatcaacgggacagaggaacaatgtggaaagtccactttgtgacgcctgtgttccagccagagggagccggtgcctgctatggaagaaaggtctgcccgtgctttggggaaaaagtagtccaccacgatccacctttgctctttgacctctcaagagacccttctgagacccacatcctcacaccagcctcagagcccgtgttctatcaggtgatggaacgagtccagcaggcggtgtgggaacaccagcggacactcagcccagttcctctgcagctggacaggctgggcaacatctggagaccgtggctgcagccctgctgtggcccgttccccctctgctggtgccttagggaagatgacccacaataaatgtctgcagtgaaaa

SEQ ID NO: 285162 - DNA, 644 bp, Artificial Sequence
  derived and/or modified sequence
tcttcttgatcggggattcaggaaggagcccaggagcagaggtcaatttctgctgtcaatgtgattgtggacatctttatgtcttacaggaagtagagagagagacaacatgttacatctgcaccattcttgtttgtgtttcaggagctggctgccagcgatgctcgctgtactgctaagtttggcaccatcagcttccagcgacatttccgcctcccgaccgaacatccttcttctgatggcggacgaccttggcattggggacattggctgctatggcaacaacaccatgaggactccgaatattgaccgccttgcagaggacggcgtgaagctgacccaacacatctctgccgcatctttgtgcaccccaagcagagccgccttcctcacgggcagataccctgtgcgatcagggatggtttccagcattggttaccgtgttcttcagtggaccggagcatctggaggtcttccaacaaatgagacaacttttgcaaaaatactgaaagagaaaggctatgccactggactcattggaaaatggcatctgggtctcaactgtgagtcagccagtgatcattgccaccaccctctccatcatggctttgaccatttctacggaatgcctttctccttgatgg

SEQ ID NO: 285163 - DNA, 1770 bp, Artificial Sequence
  derived and/or modified sequence
atgcttcatctgcaccacagctgcctgtgtttccgttcctggttacctgccatgctggctgttctgttgtctcttgcacccagcgcaagcagcgacatctccgcctcccgccctaacatcctgctcctcatggccgacgatctggggattggtgatataggttgctacggcaacaacacgatgcggacacccaatatagaccgcctggccgaagacggcgtgaaacttactcagcatatctcagccgccagtctctgtacaccttccagggccgccttcctcacggggaggtaccccgtgaggtccggcatggtctcttccatcggctatcgggtccttcaatggactggcgcctccggcggcctccctaccaacgagacgaccttcgccaagatacttaaagagaaaggttacgctaccggcttgataggtaaatggcatctaggcctgaactgcgaatctgcctcagatcattgtcaccacccccttcaccacggatttgatcatttctacggtatgcctttctcactcatgggcgactgtgcccgatgggaactgtccgaaaagagagttaatctggaacagaagctcaactttttgttccaggtgctcgctcttgtcgcactaactctggtcgctggcaaacttacacatcttatccccgtgtcttggatgccagtgatctggtccgcgctgagtgccgtgttattactggcctcatcttatttcgtgggagcactgattgtgcatgcagactgctttctgatgagaaatcacacaattactgagcagccaatgtgctttcagcgcaccaccccactgatcctgcaggaggtggcttcattcctgaaacgaaataaacatggtcctttcctgcttttcgtctctttcttgcacgtgcacattccgctcataactatggagaattttctggggaaatccctgcacggactgtacggggataatgtagaggaaatggactggatggttggaaggatcttagacacattggatgtcgaaggactcagcaatagcaccttgatatactttacctctgatcacggaggctcactggagaaccagctcggaaacacacagtatggtgggtggaacggtatatataagggtggcaagggcatgggcggctgggagggagggatcagggtgccaggcatcttcagatggcctggagtgctgcctgccgggcgcgttataggagaaccaacctccctcatggacgtcttcccaactgtggtgcgtcttgctggaggtgaggttccgcaagatcgggtgattgatggacaggatctgttgccactgctcctcggaaccgctcagcatagtgaccatgagtttctaatgcattactgcgaaaggttcctgcacgccgcacggtggcatcagcgggatcgcggaaccatgtggaaggtgcacttcgtgaccccggtgtttcaacctgagggagctggggcatgttatggacgaaaggtgtgtccatgcttcggagaaaaagttgtgcaccatgaccccccactgctctttgatttatcgagggatccttctgagacccatattcttactcccgcctccgaacccgttttttatcaagtcatggagcgggtgcagcaagcagtgtgggagcaccaacgaacacttagccctgtgcccctccaattggaccgtctgggcaatatctggcggccttggctgcagccttgctgcggccccttccctctttgctggtgtttaagagaagacgacccgcagtag

SEQ ID NO: 285164 - DNA, 537 bp, Artificial Sequence
  derived and/or modified sequence
atgctgcacctgcaccacagctgcctgtgtttccggtcttggctcccagcaatgctagcggtcttgttaagtctggccccttccgccagcagcgacatatccgcttctagaccgaacattctgctgctgatggccgacgacctggggatcggtgacatcggctgttacggcaacaacaccatgagaacgcccaacatcgatcgtttagctgaggacggcgtcaagttgacccagcatatttccgcagcctctctgtgtaccccctcaagagctgcttttctgaccggtcgctaccctgtccgcagcggcatggtctcatccatcggttatagggtattgcagtggactggtgcctccggcgggttgccaacaaatgagaccacctttgcaaagattcttaaggaaaaaggatacgccacaggactcattggcaaatggcacctcggactcaactgtgagtccgcaagtgatcattgccaccatccactacatcacggctttgaccatttctatggtatgcctttcagcctgatgtag

SEQ ID NO: 285165 - DNA, 1770 bp, Artificial Sequence
  derived and/or modified sequence
atgctgcacctgcaccacagctgcctgtgcttccgctcctggctgcctgccatgctggccgtgctgctgagcctggcccccagcgccagcagtgacatcagcgccagccggcccaacatcctgctgctgatggctgatgacctgggcatcggggacatcggctgctacggcaacaacaccatgaggacccccaacatcgaccggctggctgaagatggagtgaagctgacccagcacatctctgctgccagcctgtgcacccccagcagagctgccttcctgaccggccgctaccctgtgcgcagcggcatggtgagcagcatcggctacagagtgctgcagtggacaggagccagcggcggcctgcccaccaatgagaccacctttgccaagatcctgaaggagaagggctacgccaccggcctgattggcaagtggcacctgggcctgaactgtgagagcgccagtgaccactgccaccaccccctgcaccacggctttgaccacttctacggcatgcccttcagcctgatgggagactgtgcccgctgggagctgtctgagaagagggtgaacctggagcagaagctgaacttcctgttccaggtgctggccctggtggccctgaccctggtggccggcaagctgacccacctgatccctgtgtcctggatgcctgtgatctggagcgccctgtctgctgtgctgctgctggccagcagctactttgtgggcgccctgattgtgcatgctgactgcttcctgatgaggaaccacaccatcacagagcagcccatgtgcttccagaggaccacccccctcatcctgcaggaggtggccagcttcctgaagaggaacaagcacggccccttcctgctgtttgtgtccttcctgcacgtgcacatccccctcatcaccatggagaacttcctgggcaagagcctgcacggcctgtatggagacaacgtggaggagatggactggatggtgggccgcatcctggacaccctggatgtggagggcctgagcaacagcaccctcatctacttcaccagtgaccacggcggcagcctggagaaccagctgggcaacacccagtatggaggctggaatggcatctacaagggcggcaagggcatgggcggctgggagggcggcatccgggtgcccggcatcttccgctggccaggagtgctgcctgctggccgggtgattggagagcccaccagcctgatggatgtgttccccaccgtggtgcggctggccggcggggaggtgccccaggacagagtgattgatggccaggacctgctgcccctgctgctgggcacagcccagcacagcgaccacgagttcctgatgcactactgtgagcgcttcctgcatgctgcccgctggcaccagagggaccggggcaccatgtggaaggtgcactttgtgacccctgtgttccagcctgagggcgctggggcctgctacggcaggaaggtgtgcccctgctttggagagaaggtggtgcaccacgacccccccctgctgtttgacctgagccgggaccccagcgagacccacatcctgaccccagccagcgagcccgtcttctaccaggtgatggagcgggtgcagcaggccgtgtgggagcaccagaggaccctgagccctgtgcccctgcagctggaccggctgggcaacatctggaggccctggctgcagccctgctgcggccccttccccctgtgctggtgcctgagagaagatgacccccagtag

SEQ ID NO: 285166 - DNA, 537 bp, Artificial Sequence
  derived and/or modified sequence
atgctgcacctgcaccacagctgcctgtgcttccgctcctggctgcctgccatgctggccgtgctgctgagcctggcccccagcgccagcagtgacatcagcgccagccggcccaacatcctgctgctgatggctgatgacctgggcatcggggacatcggctgctacggcaacaacaccatgaggacccccaacatcgaccggctggctgaagatggagtgaagctgacccagcacatctctgctgccagcctgtgcacccccagcagagctgccttcctgaccggccgctaccctgtgcgcagcggcatggtgagcagcatcggctacagagtgctgcagtggacaggagccagcggcggcctgcccaccaatgagaccacctttgccaagatcctgaaggagaagggctacgccaccggcctgattggcaagtggcacctgggcctgaactgtgagagcgccagtgaccactgccaccaccccctgcaccacggctttgaccacttctacggcatgcccttcagcctgatgtag

SEQ ID NO: 285167 - DNA, 1770 bp, Artificial Sequence
  derived and/or modified sequence
atgctgcacctgcaccacagctgcctgtgcttccggagctggctgcctgccatgttggccgttttgctgtctcttgcgccttcggctagttctgacatttcagccagcaggcccaacatcctgcttctgatggcggacgatctgggtatcggagacataggttgttatggtaacaacacaatgcgaacccccaacatagacaggctggcagaggatggagtgaagttaacacagcacatttctgctgctagtctttgtacaccttccagagcagcctttttgacgggtagatatccagtccgatctggcatggtgtcctctattggataccgcgttttgcaatggacaggggcatcaggtgggctcccaaccaacgagaccacgttcgctaagatcctgaaggagaagggctatgcgacggggttgattggcaaatggcacttgggtctgaactgtgagtcagcgtccgatcattgccatcacccactgcatcatgggttcgatcacttctatggtatgcctttttctttgatgggcgattgtgcccgatgggagctgagcgagaaaagagtgaatttagagcagaagctgaacttcctctttcaagttttggccttagtcgctctcactctggtcgcaggcaaattgacacatctcattccagtttcctggatgccggtcatctggagtgccctttcagcagtactcctcttagcaagcagctatttcgtcggcgccctgattgtccatgccgattgcttccttatgcgaaaccacaccattacagagcagcctatgtgtttccagcgcaccactcccctaattctacaagaagtggctagtttcttaaaaaggaataagcatggccctttcctgctctttgtgagcttccttcatgtgcacatccctttgattaccatggagaactttctcgggaaatcgctccacggactgtacggagataacgtggaagagatggactggatggtcgggcgaatcttagacactttagacgtggagggcctctcgaatagcaccctgatctatttcacctcagaccatggcggctcactggagaatcagttgggtaacacgcaatatggggggtggaacggtatttataaaggaggcaaggggatggggggatgggagggcgggatcagagtgcctggaatttttcgttggccaggagtgctgcctgctgggagagtaatcggggagcctacaagccttatggatgtgtttccaactgtggtgcggctggcaggtggagaagtgcctcaagatcgggtcatcgatgggcaggacctgcttcctcttctcctcggtacagcccagcacagcgaccacgaatttctgatgcactattgtgagcgcttcctgcatgccgccaggtggcatcaacgagatagaggcacgatgtggaaggttcattttgtcactcctgttttccagcccgagggagccggagcctgttacggccgcaaggtgtgtccttgttttggagaaaaggttgtgcaccacgacccccctttactatttgatttatctagggatccatctgaaacccatattttgacacccgcgtcagagcctgtgttctaccaggtgatggagagggtacagcaggctgtttgggaacatcagcggacgctctctcccgttcctctacaactcgatcggttaggcaatatttggaggccatggctccagccatgctgcgggccttttcccttatgttggtgcctgcgtgaagatgacccgcagtag

SEQ ID NO: 285168 - DNA, 537 bp, Artificial Sequence
  derived and/or modified sequence
atgctgcacctgcaccacagctgcctgtgcttccggagctggctgccggccatgctagccgtgttgctgagtctcgccccatccgcctcctccgacatctccgccagccgacctaacattctattgctcatggccgatgacttggggattggcgatattgggtgttacggaaataataccatgcgaacccctaatatcgaccgtctcgcagaggacggggtgaagctcactcagcacatctcagccgcctccctttgcactccttccagagcagccttccttactggaagatatcccgtcaggtcgggaatggtgagtagtattggctatcgggtgcttcagtggaccggcgcaagcgggggactgcccactaacgaaacaacgttcgcaaagatcctgaaggaaaaggggtatgccactgggctgatcggaaagtggcaccttggactcaattgtgagtccgcttctgaccactgtcatcacccactgcaccatggattcgatcatttctacgggatgccattctccttgatgtag

SEQ ID NO: 285169 - DNA, 1770 bp, Artificial Sequence
  derived and/or modified sequence
atgctccacttgcaccactcctgtctgtgctttaggtcctggctacccgctatgctagccgtcctgctgagcctcgccccaagtgcctcctctgatatctccgccagccgcccaaatatcctccttttgatggctgatgacttgggaatcggagatattgggtgctacgggaacaacaccatgagaactccaaatatcgaccggctcgccgaagatggggtaaagctgactcaacacatctccgcggcaagcctgtgtactccgtcaagggcagcattcctgacaggcaggtaccctgtacggtctggcatggtcagctccatcggttatagggtgctgcagtggacaggggcaagtggcggacttcccacgaacgagacgacattcgccaagattctaaaagagaaagggtacgcaaccggtctcattggtaaatggcatctcgggctcaattgcgaatccgcttcagatcattgccatcaccctctccaccacggtttcgaccacttttacggcatgccattttccttaatgggcgattgcgccagatgggaactctcagagaagagagtaaatctagaacagaaactgaacttccttttccaggtgctggcccttgtggcccttactctggttgcaggcaagcttacacacctgattcccgtgtcttggatgcctgtcatctggtccgccttgtctgccgtactgctgctggcatctagctacttcgtcggcgcattgattgtccatgccgactgcttcctgatgcgcaatcataccataaccgagcagcccatgtgttttcagaggactacgcccctgatactgcaggaggtagcgtcctttttaaagcgcaataagcatgggccatttctccttttcgtgagtttcttgcatgtgcatatacccctaatcactatggaaaatttccttggcaagtcattacacgggctgtacggggataatgtcgaggaaatggactggatggtgggtagaattttggacaccctggacgtcgaggggctttccaactccaccctcatatatttcactagcgaccacgggggatcactcgagaatcagttgggcaatactcaatacggcggttggaacggtatttacaagggcggtaaaggtatgggagggtgggagggtgggattagggttcccggaatcttccggtggcccggagtgctgccagccggaagggtgattggcgaaccaacctccctcatggatgtctttcctacggtggtacgcctggccggtggggaggtccctcaagacagagtgatcgacggacaagatttgctgcctctactgttaggcacagcccaacactctgaccacgaattccttatgcattattgcgaacggttcctgcacgctgcccgatggcaccaaagagacaggggcaccatgtggaaggtccatttcgtaacccctgtgtttcaaccagaaggagccggagcatgctatggccgtaaagtgtgcccatgtttcggagagaaggtcgtgcatcacgaccctccgctgctcttcgatctgtcacgcgatccctccgaaactcatattctcacaccggcatctgagcccgttttttatcaggtcatggaaagagtgcagcaggctgtgtgggagcatcagcggacattatcaccagtgcccctgcaactcgaccgtctgggaaatatctggagaccatggctacaaccatgctgtggcccttttcccctgtgttggtgcctacgcgaggacgatccacagtag

SEQ ID NO: 285170 - DNA, 537 bp, Artificial Sequence
  derived and/or modified sequence
atgctccacctacaccactcttgcctgtgtttccgtagctggctgcccgctatgttggccgtgcttttgtcacttgcacccagcgcctccagtgacatctccgcctcccggccaaacattctgcttctcatggccgacgatctgggaataggagatataggttgctacggtaacaacacaatgcggacgccaaatattgataggcttgccgaggatggggtcaaacttacccagcatatcagcgctgccagcctttgtacaccaagccgcgcagcgttcttgacgggaaggtaccccgttcggtccggcatggttagctcaatcggatatagggtcttgcagtggacgggcgctagcgggggactccctacaaacgaaactaccttcgccaagatcctaaaagagaagggttacgccaccggactgattgggaaatggcacttgggcctgaactgcgaatccgcctccgaccattgccaccaccctctgcatcatggattcgatcacttttatggcatgcccttctctctgatgtag

SEQ ID NO: 285171 - DNA, 1770 bp, Artificial Sequence
  derived and/or modified sequence
atgctgcacctgcaccacagctgcctgtgcttcagaagctggctgcccgccatgctggccgtgctgctgagcctggcccccagcgccagcagcgacatcagcgccagcagacccaacatcctgctgctgatggccgacgacctgggcatcggcgacatcggctgctacggcaacaacaccatgagaacccccaacatcgacagactggccgaggacggcgtgaagctgacccagcacatcagcgccgccagcctgtgcacccccagcagagccgccttcctgaccggcagataccccgtgagaagcggcatggtgagcagcatcggctacagagtgctgcagtggaccggcgccagcggcggcctgcccaccaacgagaccaccttcgccaagatcctgaaggagaagggctacgccaccggcctgatcggcaagtggcacctgggcctgaactgcgagagcgccagcgaccactgccaccaccccctgcaccacggcttcgaccacttctacggcatgcccttcagcctgatgggcgactgcgccagatgggagctgagcgagaagagagtgaacctggagcagaagctgaacttcctgttccaggtgctggccctggtggccctgaccctggtggccggcaagctgacccacctgatccccgtgagctggatgcccgtgatctggagcgccctgagcgccgtgctgctgctggccagcagctacttcgtgggcgccctgatcgtgcacgccgactgcttcctgatgagaaaccacaccatcaccgagcagcccatgtgcttccagagaaccacccccctgatcctgcaggaggtggccagcttcctgaagagaaacaagcacggccccttcctgctgttcgtgagcttcctgcacgtgcacatccccctgatcaccatggagaacttcctgggcaagagcctgcacggcctgtacggcgacaacgtggaggagatggactggatggtgggcagaatcctggacaccctggacgtggagggcctgagcaacagcaccctgatctacttcaccagcgaccacggcggcagcctggagaaccagctgggcaacacccagtacggcggctggaacggcatctacaagggcggcaagggcatgggcggctgggagggcggcatcagagtgcccggcatcttcagatggcccggcgtgctgcccgccggcagagtgatcggcgagcccaccagcctgatggacgtgttccccaccgtggtgagactggccggcggcgaggtgccccaggacagagtgatcgacggccaggacctgctgcccctgctgctgggcaccgcccagcacagcgaccacgagttcctgatgcactactgcgagagattcctgcacgccgccagatggcaccagagagacagaggcaccatgtggaaggtgcacttcgtgacccccgtgttccagcccgagggcgccggcgcctgctacggcagaaaggtgtgcccctgcttcggcgagaaggtggtgcaccacgacccccccctgctgttcgacctgagcagagaccccagcgagacccacatcctgacccccgccagcgagcccgtgttctaccaggtgatggagagagtgcagcaggccgtgtgggagcaccagagaaccctgagccccgtgcccctgcagctggacagactgggcaacatctggagaccctggctgcagccctgctgcggccccttccccctgtgctggtgcctgagagaggacgacccccagtag

SEQ ID NO: 285172 - DNA, 537 bp, Artificial Sequence
  derived and/or modified sequence
atgctgcacctgcaccacagctgcctgtgcttcagaagctggctgcccgccatgctggccgtgctgctgagcctggcccccagcgccagcagcgacatcagcgccagcagacccaacatcctgctgctgatggccgacgacctgggcatcggcgacatcggctgctacggcaacaacaccatgagaacccccaacatcgacagactggccgaggacggcgtgaagctgacccagcacatcagcgccgccagcctgtgcacccccagcagagccgccttcctgaccggcagataccccgtgagaagcggcatggtgagcagcatcggctacagagtgctgcagtggaccggcgccagcggcggcctgcccaccaacgagaccaccttcgccaagatcctgaaggagaagggctacgccaccggcctgatcggcaagtggcacctgggcctgaactgcgagagcgccagcgaccactgccaccaccccctgcaccacggcttcgaccacttctacggcatgcccttcagcctgatgtag

SEQ ID NO: 285173 - protein, 197 aa, Artificial Sequence
  derived and/or modified sequence
METLESELTCPICLELFEDPLLLPCAHSLCFNCAHRILVSHCATNESVESITAFQCPTCRHVITLSQRGLDGLKRNVTLQNIIDRFQKASVSGPNSPSETRRERAFDANTMTSAEKVLCQFCDQDPAQDAVKTCVTCEVSYCDECLKATHPNKKPFTGHRLIEPIPDSHIRGLMCLEHEDEKVNMYCVTDDQLICAL

SEQ ID NO: 285174 - DNA, 587 bp, Artificial Sequence
  derived and/or modified sequence
taaagatggcaggtttggcgctctaggtggcagagaaaccaccaggaaggcttggtgaatggggagaaaggtatggtgatccggtccaccgtgtggttaggattcccaaattttgttgacagcgtctcggatatgaaccacacggaaatttggcctgctgctttctgcgtggggagtgcgatgtggatccagctgttgtacagtgcctgcttctggtggctgttttgctatgcagtggatgcttatctggtgatccggagatcggcaggactgagcaccatcctgctgtatcacatcatggcgtggggcctggccaccctgctctgtgtggagggagccgccatgctctactacccttccgtgtccaggtgtgagcggggcctggaccacgccatcccccactatgtcaccatgtacctgcccctgctgctggttctcgtggcgaaccccatcctgttccaaaagacagtgactgcagtggcctctttacttaaaggaagacaaggcatttacacggagaacgagaggaggatgggagccgtgatcaagatccgatttttcaaaatcatgctggttttaattatttg

SEQ ID NO: 285175 - DNA, 859 bp, Artificial Sequence
  derived and/or modified sequence
taccgcggggccggtcacggggagcgcgtccagaggtccagcccgcggcccgaagggtatggtgatccggtccaccgtgtggttaggattcccaaattttgttgacagcgtctcggatatgaaccacacggaaatttggcctgctgctttctgcgtggggagtgcgatgtggatccagctgttgtacagtgcctgcttctggtggctgttttgctatgcagtggatgcttatctggtgatccggagatcggcaggactgagcaccatcctgctgtatcacatcatggcgtggggcctggccaccctgctctgtgtggagggagccgccatgctctactacccttccgtgtccaggtgtgagcggggcctggaccacgccatcccccactatgtcaccatgtacctgcccctgctgctggttctcgtggcgaaccccatcctgttccaaaagacagtgactgcagtggcctctttacttaaaggaagacaaggcatttacacggagaacgagaggaggatgggagccgtgatcaagatccgatttttcaaaatcatgctggttttaattatttgttggttgtcgaatatcatcaatgaaagccttttattctatcttgagatgcaaacagatatcaatggaggttctttgaaacctgtcagaactgcagccaagaccacatggtttattatgggaatcctgaatccagcccagggatttctcttgtctttggccttctacggctggacaggatgcagcctgggttttcagtctcccaggaaggagatccagtgggaatcactgaccacctcggctgctgagggggctcacccatccccactgatgccccatgaaaaccct

SEQ ID NO: 285176 - DNA, 516 bp, Artificial Sequence
  derived and/or modified sequence
atggtaatccggtcaaccgtgtggctgggcttccctaactttgtcgactccgtcagtgacatgaaccacacagagatttggcccgcggcattttgtgtgggaagtgccatgtggattcagctgctttacagtgcatgtttctggtggttattttgttatgcagtggatgcgtacctcgttatacggcggagcgcggggttgtccaccatcttgctgtaccacataatggcctgggggttggccaccctcctttgtgtagaaggtgccgctatgctgtattatcctagtgtgtcacgatgcgagcgggggttagatcacgccatcccgcactacgttactatgtacttgcccctgttgcttgtgcttgtggccaacccaattttgttccagaagactgtgacagctgtggccagccttctgaagggtagacagggtatctatacagaaaatgagaggagaatgggcgccgtgatcaagatccggttcttcaagatcatgctggttctcatcatctag

SEQ ID NO: 285177 - DNA, 864 bp, Artificial Sequence
  derived and/or modified sequence
tgaacggccggacccgtgacagggagcgcttcaaggggcccagcaagaggtcctaaaggaatggtgattcggtctaccgtgtggttaggattccctaactttgttgactcagtaagcgatatgaatcacactgagatttggccagccgccttttgcgtgggaagtgccatgtggatacagctgctgtacagcgcttgcttctggtggctcttctgctatgcggttgatgcctatttggtcatcaggcgaagcgctggcttatcaaccattctgctgtatcacataatggcatgggggctcgccaccttgctctgtgtggagggagccgctatgctgtactacccttcggtgagtcgatgcgagcgaggattggatcatgcgattccccactatgtcacaatgtatctgccgctcctcctagtgctcgtggccaatcccatcctgttccagaagacggtgacggcagttgcatctctactgaagggtcgtcagggcatctacaccgaaaatgagaggaggatgggcgccgtcatcaagattaggttcttcaagattatgttggtactcattatctgttggctgtcgaacatcattaatgagtccctgctgttctatctggagatgcaaactgatattaatggcggcagcctcaaaccggtgcggacggccgcaaagactacgtggttcataatgggtatcttaaacccggctcaagggttcctcttatccctcgctttctacggatggacggggtgcagtctgggcttccagagccctagaaaggagattcagtgggagtctcttactacatctgcagcggaaggggcgcacccatccccccttatgccgcatgagaacccatag

SEQ ID NO: 285178 - DNA, 516 bp, Artificial Sequence
  derived and/or modified sequence
atggtgatccgcagcacagtgtggctgggcttccccaactttgtggacagcgtgtctgacatgaaccacacagagatctggccagctgccttctgtgtgggcagcgccatgtggatccagctgctgtacagcgcctgcttctggtggctgttctgctatgctgtggatgcctacctggtgatccgccgctctgctggcctgagcaccatcctgctgtaccacatcatggcctggggcctggccaccctgctgtgtgtggagggcgccgccatgctgtactaccccagcgtgagccgctgtgagcggggcctggaccacgccatcccccactacgtgaccatgtacctgcccctgctgctggtgctggtggccaaccccatcctcttccagaagacagtgacagctgtggccagcctgctgaagggccggcagggcatctacacagaaaatgaaagaaggatgggcgccgtcatcaagatccgcttcttcaagatcatgctggtgctgatcatctag

SEQ ID NO: 285179 - DNA, 864 bp, Artificial Sequence
  derived and/or modified sequence
tgaacagctggccctgtgactggaagtgccagccggggccctgcccggggccccaagggcatggtgatccgcagcacagtgtggctgggcttccccaactttgtggacagcgtgtctgacatgaaccacacagagatctggccagctgccttctgtgtgggcagcgccatgtggatccagctgctgtacagcgcctgcttctggtggctgttctgctatgctgtggatgcctacctggtgatccgccgctctgctggcctgagcaccatcctgctgtaccacatcatggcctggggcctggccaccctgctgtgtgtggagggcgccgccatgctgtactaccccagcgtgagccgctgtgagcggggcctggaccacgccatcccccactacgtgaccatgtacctgcccctgctgctggtgctggtggccaaccccatcctcttccagaagacagtgacagctgtggccagcctgctgaagggccggcagggcatctacacagaaaatgaaagaaggatgggcgccgtcatcaagatccgcttcttcaagatcatgctggtgctgatcatctgctggctgagcaacatcatcaatgaaagcctgctcttctacctggagatgcagacagacatcaatggaggcagcctgaagcctgtgaggacagctgccaagaccacctggttcatcatgggcatcctgaacccagcccagggcttcctgctgagcctggccttctacggctggacaggctgcagcctgggcttccagagccccaggaaggagatccagtgggagagcctgaccaccagcgctgctgagggcgcccaccccagccccctgatgcctcatgagaacccctag

SEQ ID NO: 285180 - DNA, 516 bp, Artificial Sequence
  derived and/or modified sequence
atggtgatccggagcaccgtgtggctgggcttccccaacttcgtggattcagtgtctgacatgaaccacacggaaatctggccagcagccttttgcgtgggctcagctatgtggattcagttactttatagtgcttgcttctggtggctgttttgttatgccgtcgatgcctacctcgttatccgcaggtccgctggtctcagcaccatacttctctatcacatcatggcttggggtcttgcaaccctgctgtgcgttgaaggggcagcgatgctgtactacccaagtgtgtctcgatgcgagagggggttggatcacgccattccacactacgttactatgtacctccccctactcctagtgctcgtagccaaccccattctttttcaaaagacagttaccgctgtcgccagtttgctgaagggaagacaagggatctacactgagaatgaaagacgaatgggtgccgtgatcaagatccgatttttcaaaatcatgctggtgctcattatctag

SEQ ID NO: 285181 - DNA, 864 bp, Artificial Sequence
  derived and/or modified sequence
tgaaccgccggccccgtgaccggcagcgccagccggggccccgcccgcggcccgaaaggcatggtcattaggagtacagtctggctcgggtttcctaacttcgttgacagcgtgtcagatatgaatcacactgaaatttggcctgccgcattctgtgtgggctctgccatgtggatacagctgttgtattctgcctgtttctggtggctcttttgttacgcggtggacgcctacttggtgatccgccgcagcgccggactctctaccattttgctgtaccatatcatggcctgggggcttgccacactcctgtgcgtggagggggccgccatgctgtattacccttccgtgagtaggtgcgagcgtgggttggatcatgccataccacactacgtgactatgtatttgccgctgcttttggttctcgtggccaatccaattctgttccaaaaaacagtaacagccgttgcatccttgctcaaaggaagacagggaatctacaccgaaaatgagaggcggatgggggcggtcatcaaaatccggttcttcaaaataatgctggtgttaattatctgctggcttagcaatatcatcaacgagagtttgcttttttacttggaaatgcagactgacatcaacggcggctccctcaaacctgtgagaaccgctgccaaaacaacttggttcatcatggggatcctgaatccagcccagggatttctgttaagcttggccttctacggctggacaggctgtagtctgggttttcagagcccccggaaagagatacagtgggagagcctaactacaagcgcagcagaaggcgcacacccatcccccctgatgccacatgaaaacccctag

SEQ ID NO: 285182 - DNA, 516 bp, Artificial Sequence
  derived and/or modified sequence
atggtgatccggagcactgtgtggttagggtttcccaacttcgtggactcagttagtgatatgaaccatacggaaatatggcctgccgcattctgcgtaggctctgctatgtggatccaactcctttatagtgcttgtttctggtggcttttctgttatgctgtcgacgcctacctggtcataaggcggagcgcaggcctatccaccattctgctttatcatataatggcatggggtctggccactctattatgcgtggagggtgcagccatgctctactatccctccgtgtctcggtgcgaaagggggctcgaccacgctatcccccactacgtaacgatgtatctgcccctcttattggtcctggttgcgaatccgatcctgtttcagaagacagtgaccgccgtggcaagccttcttaaagggaggcaggggatctatactgaaaacgagcgacgaatgggcgcagtgattaaaatccggttcttcaagattatgctcgtgctaattatttag

SEQ ID NO: 285183 - DNA, 864 bp, Artificial Sequence
  derived and/or modified sequence
taaacagccggaccagttaccggctccgcatctaggggcccagctcgaggcccaaaagggatggtgatccgatccacggtgtggttgggcttccccaattttgtcgactccgtgtccgacatgaaccataccgagatatggccagctgccttctgtgtcgggagcgcaatgtggatccagttgctgtatagtgcttgcttttggtggctgttctgctatgccgttgatgcatatttagtaattcgccgttctgcagggctctctacaatcctgctttatcacattatggcctggggcttagccacactcttatgtgtggagggggctgccatgctgtattacccttctgtgtcacgatgcgagcgtgggctcgaccatgctatcccccactatgtgaccatgtatcttcctcttctgctggtgttagtggctaaccctattctttttcaaaaaacagtgactgctgtagcctccttactcaaaggcaggcagggcatctatactgaaaacgagaggcgcatgggggcagttatcaagatcagattctttaaaattatgctcgtcctgataatctgctggctcagcaatataattaatgagtcgttgctgttttacctggaaatgcagaccgatattaacgggggaagcctgaagcctgtccgaaccgccgcaaaaacaacttggtttatcatggggatcctgaatcccgcacaggggttcctgctgagcttagccttctacgggtggaccggatgctccttaggcttccagtcgcctagaaaggagatccagtgggagtcgctgactacgtctgcagccgaaggtgcccatccgtctccacttatgccccacgaaaacccatag

SEQ ID NO: 285184 - DNA, 516 bp, Artificial Sequence
  derived and/or modified sequence
atggtgatcagaagcaccgtgtggctgggcttccccaacttcgtggacagcgtgagcgacatgaaccacaccgagatctggcccgccgccttctgcgtgggcagcgccatgtggatccagctgctgtacagcgcctgcttctggtggctgttctgctacgccgtggacgcctacctggtgatcagaagaagcgccggcctgagcaccatcctgctgtaccacatcatggcctggggcctggccaccctgctgtgcgtggagggcgccgccatgctgtactaccccagcgtgagcagatgcgagagaggcctggaccacgccatcccccactacgtgaccatgtacctgcccctgctgctggtgctggtggccaaccccatcctgttccagaagaccgtgaccgccgtggccagcctgctgaagggcagacagggcatctacaccgagaacgagagaagaatgggcgccgtgatcaagatcagattcttcaagatcatgctggtgctgatcatctag

SEQ ID NO: 285185 - DNA, 864 bp, Artificial Sequence
  derived and/or modified sequence
tgaaccgccggccccgtgaccggcagcgccagcagaggccccgccagaggccccaagggcatggtgatcagaagcaccgtgtggctgggcttccccaacttcgtggacagcgtgagcgacatgaaccacaccgagatctggcccgccgccttctgcgtgggcagcgccatgtggatccagctgctgtacagcgcctgcttctggtggctgttctgctacgccgtggacgcctacctggtgatcagaagaagcgccggcctgagcaccatcctgctgtaccacatcatggcctggggcctggccaccctgctgtgcgtggagggcgccgccatgctgtactaccccagcgtgagcagatgcgagagaggcctggaccacgccatcccccactacgtgaccatgtacctgcccctgctgctggtgctggtggccaaccccatcctgttccagaagaccgtgaccgccgtggccagcctgctgaagggcagacagggcatctacaccgagaacgagagaagaatgggcgccgtgatcaagatcagattcttcaagatcatgctggtgctgatcatctgctggctgagcaacatcatcaacgagagcctgctgttctacctggagatgcagaccgacatcaacggcggcagcctgaagcccgtgagaaccgccgccaagaccacctggttcatcatgggcatcctgaaccccgcccagggcttcctgctgagcctggccttctacggctggaccggctgcagcctgggcttccagagccccagaaaggagatccagtgggagagcctgaccaccagcgccgccgagggcgcccaccccagccccctgatgccccacgagaacccctag

SEQ ID NO: 285186 - protein, 1468 aa, Artificial Sequence
  derived and/or modified sequence
MAPVHGDDCEIGASALSDSGSFVSSRARREKKSKKGRQEALERLKKAKAGEKYKYEVEDFTGVYEEVDEEQYSKLVQARQDDDWIVDDDGIGYVEDGREIFDDDLEDDALDADEKGKDGKARNKDKRNVKKLAVTKPNNIKSMFIACAGKKTADKAVDLSKDGLLGDILQDLNTETPQITPPPVMILKKKRSIGASPNPFSVHTATAVPSGKIASPVSRKEPPLTPVPLKRAEFAGDDVQVESTEEEQESGAMEFEDGDFDEPMEVEEVDLEPMAAKAWDKESEPAEEVKQEADSGKGTVSYLGSFLPDVSCWDIDQEGDSSFSVQEVQVDSSHLPLVKGADEEQVFHFYWLDAYEDQYNQPGVVFLFGKVWIESAETHVSCCVMVKNIERTLYFLPREMKIDLNTGKETGTPISMKDVYEEFDEKIATKYKIMKFKSKPVEKNYAFEIPDVPEKSEYLEVKYSAEMPQLPQDLKGETFSHVFGTNTSSLELFLMNRKIKGPCWLEVKSPQLLNQPVSWCKVEAMALKPDLVNVIKDVSPPPLVVMAFSMKTMQNAKNHQNEIIAMAALVHHSFALDKAAPKPPFQSHFCVVSKPKDCIFPYAFKEVIEKKNVKVEVAATERTLLGFFLAKVHKIDPDIIVGHNIYGFELEVLLQRINVCKAPHWSKIGRLKRSNMPKLGGRSGFGERNATCGRMICDVEISAKELIRCKSYHLSELVQQILKTERVVIPMENIQNMYSESSQLLYLLEHTWKDAKFILQIMCELNVLPLALQITNIAGNIMSRTLMGGRSERNEFLLLHAFYENNYIVPDKQIFRKPQQKLGDEDEEIDGDTNKYKKGRKKAAYAGGLVLDPKVGFYDKFILLLDFNSLYPSIIQEFNICFTTVQRVASEAQKVTEDGEQEQIPELPDPSLEMGILPREIRKLVERRKQVKQLMKQQDLNPDLILQYDIRQKALKLTANSMYGCLGFSYSRFYAKPLAALVTYKGREILMHTKEMVQKMNLEVIYGDTDSIMINTNSTNLEEVFKLGNKVKSEVNKLYKLLEIDIDGVFKSLLLLKKKKYAALVVEPTSDGNYVTKQELKGLDIVRRDWCDLAKDTGNFVIGQILSDQSRDTIVENIQKRLIEIGENVLNGSVPVSQFEINKALTKDPQDYPDKKSLPHVHVALWINSQGGRKVKAGDTVSYVICQDGSNLTASQRAYAPEQLQKQDNLTIDTQYYLAQQIHPVVARICEPIDGIDAVLIATWLGLDPTQFRVHHYHKDEENDALLGGPAQLTDEEKYRDCERFKCPCPTCGTENIYDNVFDGSGTDMEPSLYRCSNIDCKASPLTFTVQLSNKLIMDIRRFIKKYYDGWLICEEPTCRNRTRHLPLQFSRTGPLCPACMKATLQPEYSDKSLYTQLCFYRYIFDAECALEKLTTDHEKDKLKKQFFTPKVLQDYRKLKNTAEQFLSRSGYSEVNLSKLFAGCAVKS

SEQ ID NO: 285187 - DNA, 4407 bp, Artificial Sequence
  derived and/or modified sequence
atggcccccgtgcacggcgacgactgcgagatcggcgccagcgccctgagcgacagcggcagcttcgtgagcagcagagccagaagagagaagaagagcaagaagggcagacaggaggccctggagagactgaagaaggccaaggccggcgagaagtacaagtacgaggtggaggacttcaccggcgtgtacgaggaggtggacgaggagcagtacagcaagctggtgcaggccagacaggacgacgactggatcgtggacgacgacggcatcggctacgtggaggacggcagagagatcttcgacgacgacctggaggacgacgccctggacgccgacgagaagggcaaggacggcaaggccagaaacaaggacaagagaaacgtgaagaagctggccgtgaccaagcccaacaacatcaagagcatgttcatcgcctgcgccggcaagaagaccgccgacaaggccgtggacctgagcaaggacggcctgctgggcgacatcctgcaggacctgaacaccgagaccccccagatcacccccccccccgtgatgatcctgaagaagaagagaagcatcggcgccagccccaaccccttcagcgtgcacaccgccaccgccgtgcccagcggcaagatcgccagccccgtgagcagaaaggagccccccctgacccccgtgcccctgaagagagccgagttcgccggcgacgacgtgcaggtggagagcaccgaggaggagcaggagagcggcgccatggagttcgaggacggcgacttcgacgagcccatggaggtggaggaggtggacctggagcccatggccgccaaggcctgggacaaggagagcgagcccgccgaggaggtgaagcaggaggccgacagcggcaagggcaccgtgagctacctgggcagcttcctgcccgacgtgagctgctgggacatcgaccaggagggcgacagcagcttcagcgtgcaggaggtgcaggtggacagcagccacctgcccctggtgaagggcgccgacgaggagcaggtgttccacttctactggctggacgcctacgaggaccagtacaaccagcccggcgtggtgttcctgttcggcaaggtgtggatcgagagcgccgagacccacgtgagctgctgcgtgatggtgaagaacatcgagagaaccctgtacttcctgcccagagagatgaagatcgacctgaacaccggcaaggagaccggcacccccatcagcatgaaggacgtgtacgaggagttcgacgagaagatcgccaccaagtacaagatcatgaagttcaagagcaagcccgtggagaagaactacgccttcgagatccccgacgtgcccgagaagagcgagtacctggaggtgaagtacagcgccgagatgccccagctgccccaggacctgaagggcgagaccttcagccacgtgttcggcaccaacaccagcagcctggagctgttcctgatgaacagaaagatcaagggcccctgctggctggaggtgaagagcccccagctgctgaaccagcccgtgagctggtgcaaggtggaggccatggccctgaagcccgacctggtgaacgtgatcaaggacgtgagccccccccccctggtggtgatggccttcagcatgaagaccatgcagaacgccaagaaccaccagaacgagatcatcgccatggccgccctggtgcaccacagcttcgccctggacaaggccgcccccaagccccccttccagagccacttctgcgtggtgagcaagcccaaggactgcatcttcccctacgccttcaaggaggtgatcgagaagaagaacgtgaaggtggaggtggccgccaccgagagaaccctgctgggcttcttcctggccaaggtgcacaagatcgaccccgacatcatcgtgggccacaacatctacggcttcgagctggaggtgctgctgcagagaatcaacgtgtgcaaggccccccactggagcaagatcggcagactgaagagaagcaacatgcccaagctgggcggcagaagcggcttcggcgagagaaacgccacctgcggcagaatgatctgcgacgtggagatcagcgccaaggagctgatcagatgcaagagctaccacctgagcgagctggtgcagcagatcctgaagaccgagagagtggtgatccccatggagaacatccagaacatgtacagcgagagcagccagctgctgtacctgctggagcacacctggaaggacgccaagttcatcctgcagatcatgtgcgagctgaacgtgctgcccctggccctgcagatcaccaacatcgccggcaacatcatgagcagaaccctgatgggcggcagaagcgagagaaacgagttcctgctgctgcacgccttctacgagaacaactacatcgtgcccgacaagcagatcttcagaaagccccagcagaagctgggcgacgaggacgaggagatcgacggcgacaccaacaagtacaagaagggcagaaagaaggccgcctacgccggcggcctggtgctggaccccaaggtgggcttctacgacaagttcatcctgctgctggacttcaacagcctgtaccccagcatcatccaggagttcaacatctgcttcaccaccgtgcagagagtggccagcgaggcccagaaggtgaccgaggacggcgagcaggagcagatccccgagctgcccgaccccagcctggagatgggcatcctgcccagagagatcagaaagctggtggagagaagaaagcaggtgaagcagctgatgaagcagcaggacctgaaccccgacctgatcctgcagtacgacatcagacagaaggccctgaagctgaccgccaacagcatgtacggctgcctgggcttcagctacagcagattctacgccaagcccctggccgccctggtgacctacaagggcagagagatcctgatgcacaccaaggagatggtgcagaagatgaacctggaggtgatctacggcgacaccgacagcatcatgatcaacaccaacagcaccaacctggaggaggtgttcaagctgggcaacaaggtgaagagcgaggtgaacaagctgtacaagctgctggagatcgacatcgacggcgtgttcaagagcctgctgctgctgaagaagaagaagtacgccgccctggtggtggagcccaccagcgacggcaactacgtgaccaagcaggagctgaagggcctggacatcgtgagaagagactggtgcgacctggccaaggacaccggcaacttcgtgatcggccagatcctgagcgaccagagcagagacaccatcgtggagaacatccagaagagactgatcgagatcggcgagaacgtgctgaacggcagcgtgcccgtgagccagttcgagatcaacaaggccctgaccaaggacccccaggactaccccgacaagaagagcctgccccacgtgcacgtggccctgtggatcaacagccagggcggcagaaaggtgaaggccggcgacaccgtgagctacgtgatctgccaggacggcagcaacctgaccgccagccagagagcctacgcccccgagcagctgcagaagcaggacaacctgaccatcgacacccagtactacctggcccagcagatccaccccgtggtggccagaatctgcgagcccatcgacggcatcgacgccgtgctgatcgccacctggctgggcctggaccccacccagttcagagtgcaccactaccacaaggacgaggagaacgacgccctgctgggcggccccgcccagctgaccgacgaggagaagtacagagactgcgagagattcaagtgcccctgccccacctgcggcaccgagaacatctacgacaacgtgttcgacggcagcggcaccgacatggagcccagcctgtacagatgcagcaacatcgactgcaaggccagccccctgaccttcaccgtgcagctgagcaacaagctgatcatggacatcagaagattcatcaagaagtactacgacggctggctgatctgcgaggagcccacctgcagaaacagaaccagacacctgcccctgcagttcagcagaaccggccccctgtgccccgcctgcatgaaggccaccctgcagcccgagtacagcgacaagagcctgtacacccagctgtgcttctacagatacatcttcgacgccgagtgcgccctggagaagctgaccaccgaccacgagaaggacaagctgaagaagcagttcttcacccccaaggtgctgcaggactacagaaagctgaagaacaccgccgagcagttcctgagcagaagcggctacagcgaggtgaacctgagcaagctgttcgccggctgcgccgtgaagagctag

SEQ ID NO: 285188 - DNA, 4407 bp, Artificial Sequence
  derived and/or modified sequence
atggctccagtgcacggagatgattgcgaaattggggcatcggctctaagtgattcagggtctttcgtctcctcgagagcgcgaagagaaaaaaagtccaaaaaaggacgccaggaagcactggaacgtctgaaaaaggccaaggccggtgagaagtataaatatgaggtcgaggactttacgggcgtttatgaggaggtggatgaagaacagtattcaaaacttgtgcaggcgagacaagatgacgactggatcgtggacgacgacggaatcggctacgttgaggacggccgcgaaatcttcgatgatgatctggaggacgatgcactcgatgcagatgaaaagggtaaggatggcaaggctcggaataaggacaaacggaatgtgaagaagttagcggtgacaaaaccgaataacatcaagagtatgtttattgcctgtgctggcaagaagaccgccgataaagctgtcgatctatctaaggacgggctgctaggggacatcttacaggatttgaacaccgaaacgccccagataaccccgcctcccgtgatgattttgaagaagaagcgctccattggcgcatctcccaaccccttcagcgtacacacagctaccgctgtgccgtcagggaagatcgcaagtcccgtctccagaaaggagccaccactcacacccgtgccactcaagcgcgctgaattcgcaggcgacgacgtgcaagtagagagcaccgaagaggaacaagaatcaggggctatggaatttgaggacggggactttgacgagccaatggaagtggaagaggtcgatctggaaccaatggccgccaaagcctgggacaaggagtcagaacccgcagaagaggtaaagcaggaagcggattccggcaaagggacggtgagttacctaggcagttttctacccgatgtgtcctgctgggacattgatcaggagggggattcctctttctcagttcaagaggtgcaggtcgacagcagtcacctgccactcgtaaagggcgcagatgaggagcaagtgttccacttttactggctggacgcttacgaggatcagtacaaccagcctggggtggtctttctgtttggaaaggtgtggatagaatccgccgaaactcatgtatcctgttgcgtaatggtcaagaacattgagcgtactctgtatttcctgcctagggaaatgaagattgacctgaacactggcaaagagacaggaacgcccatttcaatgaaggacgtatacgaggagttcgacgaaaagatcgctactaaatacaagattatgaaatttaaaagtaagccagttgagaaaaactacgcgttcgagatacccgatgttcccgagaagtccgagtacctcgaggtgaaatattcagctgagatgccacagcttcctcaggacctgaaaggcgaaactttcagtcacgtattcggaaccaatacttcctccttagaactgtttctaatgaaccgtaaaatcaaggggccgtgttggctggaggtaaagagtccacagctgttgaatcagcctgtgagttggtgcaaagtcgaagccatggccctgaagcccgacctagttaacgtaataaaggatgtgtcgccgccacccctggtagtgatggcattctccatgaaaactatgcagaacgccaaaaatcatcagaatgagattattgctatggccgcactggtgcaccatagcttcgccctggataaggccgcacccaaacccccattccagtcacatttttgtgtcgtgtctaaacctaaagactgtatattcccatacgcctttaaagaggtgatcgagaaaaaaaatgtgaaggtggaggttgccgccacagagagaactcttctgggcttttttctggccaaggtacacaaaatcgaccctgatataattgtggggcataatatctacggatttgagctcgaagtgctactacagaggatcaacgtctgtaaggctcctcattggagtaaaatcgggagactcaagcggtctaacatgccaaagctggggggccgctccggctttggcgaaaggaatgccacctgtggtcgtatgatctgtgacgttgagatctcggcaaaagagctgattcggtgcaagagctatcacctgtccgagctggtccagcaaattcttaaaacagaacgtgttgttattcccatggagaacatacagaatatgtacagtgagagcagccagctcctctatctgttagagcacacctggaaggatgctaagttcattctacagattatgtgtgaactaaatgtgctgccactggctttgcagatcaccaacatcgctggtaacattatgtcacgtaccctgatggggggtcggtccgaaagaaacgaatttctcctgttgcacgccttttatgaaaataactatattgttcctgataagcagattttccggaagccacagcaaaagctaggggatgaggacgaggagatcgacggagataccaacaagtacaagaaaggtagaaaaaaggcagcctacgccggaggtttagtgctagatccaaaggtgggcttttatgataagtttattctgctccttgactttaatagtttatatccctccattattcaggaatttaacatctgtttcacaacagtgcaacgcgtcgcttctgaagcccaaaaggtgactgaggatggagaacaggaacagatccctgaacttccagatccatctcttgaaatgggcatcttacctcgcgaaatcagaaaactcgtggagcggcgtaagcaagtgaagcagctgatgaaacagcaggatctgaatcctgatctgatcctgcagtacgatattcggcagaaggctctgaaattaactgcaaacagcatgtacggctgtctgggctttagctatagtaggttttatgccaagcccttggcggccttggttacttataaggggagggagatccttatgcatactaaagagatggtccagaagatgaatctggaggtgatctacggcgacactgactcgatcatgataaacactaacagcaccaatctcgaggaggtgtttaaactgggaaacaaggtgaaaagcgaagtaaataaactgtataagttgctcgaaattgatatcgacggggttttcaaatcactgttgttgctgaaaaagaaaaaatacgccgccttggtcgtggagcccacctcagatgggaactacgtgaccaagcaagagctgaaggggctagatatcgtgcgtcgggactggtgcgatttggctaaggacacaggtaattttgtgattggacagattttatcagaccaaagtcgcgacactattgtggaaaacattcagaagcgcctcatcgaaatcggtgaaaacgtattaaatggctcagtcccagtttctcagtttgagatcaataaagctcttacaaaggatcctcaggactacccggataagaagtccctcccccacgtgcacgtggcactgtggataaatagccaggggggcaggaaggtgaaggcaggagatacagtatcgtatgtcatttgccaagacggttcaaacttgacagcctcccagcgcgcttacgctccagaacagctgcagaagcaggataacttaacgattgacacacagtattacctggcgcagcagatacaccctgtggttgcgcgaatctgcgagcccattgatggcatcgacgctgtgctcatcgctacgtggctgggactcgatccgacacagtttcgtgtgcatcattaccacaaagatgaagagaatgacgcgctgttgggtggcccagcacagctgactgatgaagaaaaatatagggattgtgaacggtttaagtgtccctgccccacttgtggcactgagaacatttacgacaacgtgtttgatggctcaggtactgacatggaaccctcattatacaggtgctcaaatatcgactgtaaggcatcgcccctgacatttactgttcagctgtctaacaagttgattatggacattcggcgatttatcaaaaaatattatgacggctggctgatctgcgaggaaccaacttgcaggaacagaaccagacatctcccgctgcagttttccaggacaggtccactgtgcccagcctgtatgaaggctacactccaaccggagtacagcgataagtcactgtatacgcagttatgtttttaccgctatatattcgacgcggagtgcgccctggagaagcttaccaccgaccacgaaaaagacaaactcaaaaagcaatttttcacacccaaagtgctgcaggattatcggaagcttaagaacactgccgagcagtttttaagccgctccgggtactctgaggtgaatctctctaagctgtttgccggctgcgccgttaaaagctag

SEQ ID NO: 285189 - DNA, 4407 bp, Artificial Sequence
  derived and/or modified sequence
atggcccctgtgcatggagatgactgtgaaattggagccagcgccctgagtgacagcggcagctttgtgagcagccgggcccggcgggagaagaagagcaagaagggccggcaggaggccctggagcggctgaagaaggccaaggccggggagaagtacaagtatgaggtggaggacttcaccggggtgtatgaggaggtggatgaggagcagtacagcaagctggtgcaggcccggcaggatgatgactggatcgtggatgatgatggcatcggctacgtggaggatggccgggagatctttgatgatgacctggaggatgatgccctggatgctgatgagaagggcaaggatggcaaggccaggaacaaggacaagagaaatgtgaagaagctggccgtgaccaagcccaacaacatcaagtccatgtttattgcctgtgccggcaagaagacagctgacaaggctgtggacctgagcaaggatggcctgctgggggacatcctgcaggacctgaacacagagaccccccagatcaccccacctcctgtgatgatcctgaagaagaagaggagcattggagccagccccaaccccttctctgtgcacacagccacagctgtgcccagcggcaagatcgccagccctgtgtccaggaaggagccccccctgacccctgtgcccctgaagagagctgagtttgctggagatgatgtgcaggtggagagcacagaggaggagcaggagagcggggccatggagtttgaagatggagactttgatgagcccatggaggtggaggaggtggacctggagcccatggccgccaaggcctgggacaaggagagcgagcctgctgaggaggtgaagcaggaggccgacagcgggaaaggaacagtgtcctacctgggcagcttcctgcctgatgtgtcctgctgggacatcgaccaggagggggacagcagcttctctgtgcaggaggtgcaggtggacagcagccacctgcccctggtgaagggagcagatgaggagcaggtgttccacttctactggctggatgcctatgaggaccagtacaaccagcccggggtggtgttcctgtttgggaaggtgtggattgaatctgctgagacccacgtgtcctgctgcgtgatggtgaagaacattgaaagaaccctgtacttcctgccccgggagatgaagattgacctgaacacaggcaaggagaccggcacccccatctccatgaaggatgtgtatgaggagtttgatgagaagatcgccaccaagtacaagatcatgaagttcaagagcaagcctgtggagaagaactatgcctttgagatcccagatgtgcctgagaagtctgagtacctggaggtgaagtacagcgctgagatgccccagctgccccaggacctgaagggggagaccttcagccacgtgtttggcaccaacaccagcagcctggagctgttcctgatgaacaggaagatcaagggcccctgctggctggaggtgaagagcccccagctgctgaaccagcctgtgtcctggtgcaaggtggaggccatggccctgaagccagacctggtgaatgtcatcaaggatgtgagccccccacccctggtggtgatggccttctccatgaagaccatgcagaatgccaagaaccaccagaatgagatcatcgccatggccgccctggtgcaccacagctttgccctggacaaggccgcccccaagccacccttccagagccacttctgtgtggtgtccaagcccaaggactgcatcttcccctatgccttcaaggaggtgattgagaagaagaatgtgaaggtggaggtggccgccacagagaggaccctgctgggcttcttcctggccaaggtgcacaagattgatcctgacatcatcgtgggccacaacatctacggctttgagctggaggtgctgctgcagaggatcaacgtgtgcaaggccccccactggagcaagattggccgcctgaagaggagcaacatgcccaagctgggcggccgcagcggctttggagagagaaatgccacctgtggccgcatgatctgtgatgtggagatcagcgccaaggagctgatccgctgcaagagctaccacctgtctgagctggtgcagcagatcctgaagacagagcgggtggtgatccccatggagaacatccagaacatgtacagcgagagcagccagctgctgtacctgctggagcacacctggaaggatgccaagttcatcctgcagatcatgtgtgagctgaatgtgctgcccctggccctgcagatcaccaacattgctggcaacatcatgagcaggaccctgatgggcggccgctcagaaagaaatgagttcctgctgctgcacgccttctatgagaacaactacatcgtgcctgacaagcagatcttcaggaagccccagcagaagctgggagatgaagatgaggagattgatggagacaccaacaagtacaagaagggcaggaagaaggccgcctatgctgggggcctggtgctggaccccaaggtgggcttctatgacaagttcatcctgctgctggacttcaacagcctgtaccccagcatcatccaggagttcaacatctgcttcaccaccgtgcagagggtggccagcgaggcccagaaggtgacagaagatggagagcaggagcagatccctgagctgcctgaccccagcctggagatgggcatcctgccccgggagatcaggaagctggtggagaggaggaagcaggtgaagcagctgatgaagcagcaggacctgaacccagacctgatcctgcagtatgacatccggcagaaggccctgaagctgacagccaacagcatgtatggctgcctgggcttctcctacagccgcttctacgccaagcccctggccgccctggtgacctacaagggccgggagatcctgatgcacaccaaggagatggtgcagaagatgaacctggaggtgatctacggggacacagacagcatcatgatcaacaccaacagcaccaacctggaggaggtgttcaagctgggcaacaaggtgaagtctgaggtgaacaagctgtacaagctgctggagattgatattgatggagtcttcaagagcctgctgctgctgaagaagaagaagtatgctgccctggtggtggagcccaccagtgatggcaactacgtgaccaagcaggagctgaagggcctggacatcgtgagaagagactggtgtgacctggccaaggacaccggcaacttcgtcatcggccagatcctgagtgaccagagccgggacaccatcgtggagaacatccagaagaggctgattgaaattggagaaaatgtgctgaatggatctgtgcctgtgtcccagtttgagatcaacaaggccctgaccaaggacccccaggactacccagacaagaagagcctgccccacgtgcacgtggccctgtggatcaacagccagggcggcaggaaggtgaaggccggggacacagtgtcctatgtgatctgccaggacggcagcaacctgacagccagccagagggcctatgcccctgagcagctgcagaagcaggacaacctgaccatcgacacccagtactacctggcccagcagatccaccctgtggtggcccgcatctgtgagcccattgatggcattgatgctgtgctgattgccacctggctgggcctggaccccacccagttccgggtgcaccactaccacaaggatgaggagaatgatgccctgctgggcggccctgcccagctgacagatgaggagaagtacagagactgtgagcgcttcaagtgcccctgccccacctgtggcacagagaacatctatgacaacgtgtttgatggcagcggcacagacatggagcccagcctgtaccgctgcagcaacatcgactgcaaggccagccccctgaccttcaccgtgcagctgagcaacaagctgatcatggacatccgccgcttcatcaagaagtactatgatggctggctgatctgtgaggagcccacctgcaggaacagaaccaggcacctgcccctgcagttcagcaggacaggccccctgtgcccagcctgcatgaaggccaccctgcagcctgagtacagcgacaagagcctgtacacccagctgtgcttctaccgctacatctttgatgctgaatgtgccctggagaagctgaccacagaccacgagaaggacaagctgaagaagcagttcttcacccccaaggtgctgcaggactacaggaagctgaagaacacagctgagcagttcctgagccgcagcggctacagcgaggtgaacctgagcaagctgtttgctggctgtgctgtgaagagctag

SEQ ID NO: 285190 - DNA, 5486 bp, Artificial Sequence
  derived and/or modified sequence
ccagttttgggctggttggcgcggaatcgggagattcgggaccatggcacctgtgcacggcgacgactgtgagataggggcgagtgctctgtcagattcagggagttttgtatcttctcgagcccggcgagaaaaaaaatcaaagaaggggcgccaagaagccctagaaagactgaaaaaggctaaagctggtgagaagtataaatatgaagtcgaggacttcacaggtgtttatgaagaagttgatgaagaacagtattcgaagctggttcaggcacgccaggatgatgactggattgtggatgatgatggtattggctatgtggaagatggccgagagatttttgatgatgaccttgaagatgatgcccttgatgctgatgagaaaggaaaagatggtaaagcacgcaataaagacaagaggaatgtaaagaagctcgcagtgacaaaaccgaacaacattaagtcaatgttcattgcttgtgctggaaagaaaactgcagataaagctgtagacttgtccaaggatggtctgctaggtgacattctacaggatcttaacactgagacacctcaaataactccaccacctgtaatgatactgaagaagaaaagatccattggagcttcaccgaatcctttctctgtgcacaccgccacggcagttccttcaggaaaaattgcttcccctgtctccagaaaggagcctccattaactcctgttcctcttaaacgtgctgaatttgctggcgatgatgtacaggtcgagagtacagaagaagagcaggagtcaggggcaatggagtttgaagatggtgactttgatgagcccatggaagttgaagaggtggacctggagcctatggctgccaaggcttgggacaaagagagtgagccagcagaggaagtgaaacaagaggcggattctgggaaagggaccgtgtcctacttaggaagttttctcccggatgtctcttgttgggacattgatcaagaaggtgatagcagtttctcagtgcaagaagttcaagtggattccagtcacctcccattggtaaaaggggcagatgaggaacaagtattccacttttattggttggatgcttatgaggatcagtacaaccaaccaggtgtggtatttctgtttgggaaagtttggattgaatcagccgagacccatgtgagctgttgtgtcatggtgaaaaatatcgagcgaacgctttacttccttccccgtgaaatgaaaattgatctaaatacggggaaagaaacaggaactccaatttcaatgaaggatgtttatgaggaatttgatgagaaaatagcaacaaaatataaaattatgaagttcaagtctaagccagtggaaaagaactatgcttttgagatacctgatgttccagaaaaatctgagtacttggaagttaaatactcggctgaaatgccacagcttcctcaagatttgaaaggagaaactttttctcatgtatttgggaccaacacatctagcctggaactgttcttgatgaacagaaagatcaaaggaccttgttggcttgaagtaaaaagtccacagctcttgaatcagccagtcagttggtgtaaagttgaggcaatggctttgaaaccagacctggtgaatgtaattaaggatgtcagtccaccaccgcttgtcgtgatggctttcagcatgaagacaatgcagaatgcaaagaaccatcaaaatgagattattgctatggcagctttggtccatcacagttttgcattggataaagcagccccaaagcctccctttcagtcacacttctgtgttgtgtctaaaccaaaggactgtatttttccatatgctttcaaagaagtcattgagaaaaagaatgtgaaggttgaggttgctgcaacagaaagaacactgctaggttttttccttgcaaaagttcacaaaattgatcctgatatcattgtgggtcataatatttatgggtttgaactggaagtactactgcagagaattaatgtgtgcaaagctcctcactggtccaagataggtcgactgaagcgatccaacatgccaaagcttgggggccggagtggatttggtgaaagaaatgctacctgtggtcgaatgatctgtgatgtggaaatttcagcaaaggaattgattcgttgtaaaagctaccatctgtctgaacttgttcagcagattctaaaaactgaaagggttgtaatcccaatggaaaatatacaaaatatgtacagtgaatcttctcaactgttatacctgttggaacacacctggaaagatgccaagttcattttgcagatcatgtgtgagctaaatgttcttccattagcattgcagatcactaacatcgctgggaacattatgtccaggacgctgatgggtggacgatccgagcgtaacgagttcttgttgcttcatgcattttacgaaaacaactatattgtgcctgacaagcagattttcagaaagcctcagcaaaaactgggagatgaagatgaagaaattgatggagataccaataaatacaagaaaggacgtaagaaagcagcttatgctggaggcttggttttggaccccaaagttggtttttatgataagttcattttgcttctggacttcaacagtctatatccttccatcattcaggaatttaacatttgttttacaacagtacaaagagttgcttcagaggcacagaaagttacagaggatggagaacaagaacagatccctgagttgccagatccaagcttagaaatgggcattttgcccagagagatccggaaactggtagaacggagaaaacaagtcaaacagctaatgaaacagcaagacttaaatccagaccttattcttcagtatgacattcgacagaaggctttgaagctcacagcgaacagtatgtatggttgcctgggattttcctatagcagattttacgccaaaccactggctgccttggtgacatacaaaggaagggagattttgatgcatacgaaagagatggtacaaaagatgaatcttgaagttatttatggagatacagattcaattatgataaacaccaatagcaccaatctggaagaagtatttaagttgggaaacaaggtaaaaagtgaagtgaataagttgtacaaactgcttgaaatagacattgatggggttttcaagtctctgctactgctgaaaaaaaagaagtacgctgctctggttgttgagccaacgtcggatgggaattatgtcaccaaacaggagctcaaaggattagatatagttagaagagattggtgtgatcttgctaaagacactggaaactttgtgattggccagattctttctgatcaaagccgggacactatagtggaaaacattcagaagaggctgatagaaattggagaaaatgtgctaaatggcagtgtcccagtgagccagtttgaaattaacaaggcattgacaaaggatccccaggattaccctgataaaaaaagcctacctcatgtacatgttgccctctggataaattctcaaggaggcagaaaggtgaaagctggagatactgtgtcatatgtcatctgtcaggatggatcaaacctcactgcaagtcagagggcctatgcgcctgagcagctgcagaaacaggataatctaaccattgacacccagtactacctggcccagcagatccacccagtcgtggctcggatctgtgaaccaatagacggaattgatgctgtcctcattgcaacgtggttgggacttgaccccacccaatttagagttcatcattatcataaagatgaagagaatgatgctctacttggtggcccagcacagctcactgatgaagagaaatacagggactgtgaaagattcaaatgtccatgccctacatgtggaactgagaatatttatgataatgtctttgatggttcgggaacagatatggagcccagcttgtatcgttgcagtaacatcgattgtaaggcttcacctctgacctttacagtacaactgagcaacaaattgatcatggacattagacgtttcattaaaaagtactatgatggctggttgatatgtgaagagccaacctgtcgcaatcgaactcgtcaccttccccttcaattctcccgaactgggcctctttgcccagcctgcatgaaagctacacttcaaccagagtattctgacaagtccctgtacacccagctgtgcttttaccggtacatttttgatgcggagtgtgcactggagaaacttactaccgatcatgagaaagataaattgaagaagcaattttttacccccaaagttctgcaggactacagaaaactcaagaacacagcagagcaattcttgtcccgaagtggctactccgaagtgaatctgagcaaactcttcgctggttgtgccgtgaaatcctaagggaatcccaggagtaaccaaggagggggtagttgaaaaatcccagcttcctctgtgcctccactctggccctaaatgctcctccagcatctgtttctcccttgggactgtgtctcatgtttgtgtgaatgtagaccaggaaagggggctgcaaaaatgttgagtctaatgttcgtaagcatcatagaaattcctgtcttcatattaagatgtactgctttaaaacacaactccagagcccctccccaagctcccctccccaagctcctgaagacccggtttctgagggagggaaattgctacttggattgagagtagctggaatgtaagtgaccccaggctttgcctcagggcctttagcctatgtcccccccacataaagagagcttctcagagcctgactgaagagctgacgttttgctttttcatatgccaattaaacccggtctaaatccaaatgcttctccagccatccaggagtggctgtccttttcagtcttgtcttttatataggtagctgagggggaagatttagaagccttgcactcactaaatagattaaacagagcaggcttgtttgttgaattgctccaaagtccaacagacacacactgagcaggtgttttacactcacattccctttttgccccttaaatagaaagtgcaggtaaaggtttatacaacaagaaagcacattgaaaataatttgatactctaacaatccattaacatgtgtaggggttacggtgaggatcactgtgttgtattcagaaaaacggggagagggatgcttaattggccctggcgcttgctatttttttctcatttcttcacaataggaccgtctttggcagcagcaaaatgtatttcagtatggcagtctttcctctcttacattattggtaagattatactaacaaaatgtttccccttgtacaattatgctgtgtttttaaaaaacattgacctgtgtgtttttataaaagaaaaagtatgttgtgccttcttcttaagaataaagttttctaaagggaaa

SEQ ID NO: 285191 - DNA, 4407 bp, Artificial Sequence
  derived and/or modified sequence
atggcccccgtgcacggcgacgactgcgagatcggcgccagcgccttgtctgatagcggatccttcgtgtcttccagggccagacgcgaaaagaaatccaaaaaaggacgccaggaggccttggagcgactcaagaaggccaaggcaggcgaaaaatataaatatgaagtggaggacttcacaggagtctatgaagaggtggacgaggaacagtactctaagcttgtgcaggcaagacaggacgacgattggattgtggacgatgatggcatcggttacgtcgaagacggtcgcgaaatttttgacgacgatctggaggatgatgcacttgacgctgacgagaaaggaaaagatggcaaggcccgaaacaaagacaagagaaatgtgaagaagttggcggtgacaaaaccaaataatattaagtcaatgtttattgcctgtgccggcaagaagacagccgataaggccgtagacttgtccaaagacgggcttctgggagatatactccaggatcttaacaccgagacacctcagatcaccccaccacctgtgatgattctgaaaaagaagagatcaatcggagcgtctcccaatccattctcagtacataccgcaacagccgtaccttcaggcaagattgcctcccctgttagcaggaaagagcctccactgaccccagttcctctcaaaagggccgaattcgccggagatgatgtgcaagtcgagtcaaccgaggaggagcaggagtcaggcgccatggagttcgaggacggcgatttcgatgagcccatggaggtagaagaggtcgatttagagccgatggctgctaaagcttgggacaaagagagcgagcccgcagaggaggtcaagcaggaggctgactctggcaagggaacagtgagttacctcggtagcttcctccctgatgtgagctgctgggacatcgatcaagagggtgacagtagctttagcgttcaggaggtacaagtcgactcttcacacttaccactggtcaagggagcagatgaggaacaggtgttccatttttattggttggacgcttacgaggatcaatacaatcagccgggggtcgtgttcctattcggcaaggtttggatcgaaagtgccgaaacccacgtgtcatgttgcgttatggtgaaaaacatcgagaggaccctttacttcttgcccagggaaatgaaaattgatctcaataccggtaaagagacgggaactccaatctcaatgaaagacgtgtatgaggaatttgatgaaaagatcgcaacaaagtacaagattatgaaattcaagtccaagcctgtagaaaaaaattacgccttcgagatccctgacgtgcccgaaaaatcagagtatctggaagtaaaatattccgcagaaatgccgcagttgcctcaggacttaaagggtgagacattttctcacgtttttggaactaatacgtcaagcctcgagctcttcctgatgaatcgcaaaatcaaaggcccgtgttggcttgaggtcaagagccctcaactcctgaaccagcctgtctcctggtgcaaggtggaggccatggctctcaaacccgatctggtgaatgttatcaaggatgtcagcccgccgccccttgtggtgatggctttctcgatgaagacaatgcaaaatgccaaaaatcaccagaacgagatcatcgctatggctgcacttgtacaccacagtttcgccctggataaagccgcgcccaaaccacctttccaaagtcatttctgcgttgtgagtaagccaaaagattgtatttttccgtacgcctttaaagaggttatcgaaaagaagaatgtgaaagtcgaggtagctgctaccgagcgaacactgctgggcttctttttggcgaaggtgcacaagattgatccggacattattgtgggtcacaatatttatggtttcgagttagaggtcctgctgcagagaataaacgtgtgcaaggcccctcactggtctaaaattggtcgcctaaaaagatcaaacatgcccaaactgggggggcggagcggctttggggagcgtaacgctacctgcggcaggatgatctgcgatgtagaaatcagcgcaaaggaactcattcggtgtaagtcttatcatctctcagagttggttcaacaaatcttgaaaaccgaacgcgtcgtgattccaatggagaatatccagaacatgtactccgagagttcacagctactgtatctgcttgagcacacctggaaagatgcaaagttcatcctgcaaatcatgtgcgagctgaatgtcctgcctctggcgctccaaatcaccaatatcgcaggtaacatcatgtctcggaccctgatgggcgggaggagtgagaggaatgaatttctcctgctgcacgccttctacgaaaataattatatcgtgccggacaagcagattttccggaaaccacaacaaaagcttggggatgaagatgaagaaatcgatggagatacaaacaaatacaaaaaagggcgtaaaaaagcggcttatgcaggagggctggtgctggatccaaaggtgggattctacgacaagttcattctgctgttggacttcaactcactgtatcctagcatcatacaggagtttaacatttgttttaccacggtccagcgcgtagccagtgaggcacagaaggtcactgaggatggggagcaggagcagatccccgagctccccgacccttccctggagatgggcatactcccccgcgagattaggaaactggtcgaaaggaggaaacaggtgaagcaactgatgaaacagcaggacctcaacccagacctaatccttcagtacgatattagacaaaaggccctgaagcttactgccaattcaatgtatggatgtttgggcttctcttactcaagattctatgctaagccactagccgctctcgtaacttacaaaggacgggaaatcctcatgcatacgaaggaaatggtacagaagatgaatcttgaggtaatttatggtgatacagattctatcatgattaatacaaatagcaccaatttggaggaggttttcaaactgggcaataaagtaaagtcagaggtgaataagttatataagctgctcgagattgatattgatggagtattcaagagcctgcttttactgaaaaaaaaaaaatacgcagccctcgttgttgaacctacctccgatggcaactatgtgaccaaacaggaactcaagggacttgatatcgtacggcgggattggtgcgatctggcgaaggataccggcaacttcgtgattgggcagattttgtctgaccaatcacgggataccattgtggaaaatatccaaaaaaggttgatcgaaattggcgaaaatgtgctcaacgggtcggtgccagtgagtcagttcgagataaataaggcattgacaaaggaccctcaggactaccctgacaaaaaatctttaccacatgttcatgtggcactgtggattaactcccaaggaggaagaaaggtgaaagcaggtgatacggtaagttatgtgatctgccaggacggatccaatctgacagcaagtcagcgggcatacgcacctgagcaactgcagaagcaggataacttgactatcgacacccaatattacctcgcccagcagatccaccctgtggtggcccgtatctgtgaaccaatcgatgggattgacgcagtgctgattgctacctggttagggctggatccaacacaattcagagtacatcattaccacaaggacgaagagaatgacgctctgcttggtggaccggcccagttgacagatgaagagaagtatcgggactgcgaaagattcaaatgtccgtgtcccacctgtggaaccgagaacatctatgataacgtgtttgacggaagcggtaccgacatggagccaagcctataccggtgctcaaacatcgactgcaaagcaagtccactgacatttactgtgcagctgagcaataagttgatcatggatatccggaggttcatcaagaagtactatgacggctggctgatttgtgaggagcctacatgcaggaatcgcacgaggcacctgcctcttcaattctcgcgaaccggccccctttgccccgcctgcatgaaagccactctgcaaccagagtacagcgacaagtccttatacacccagctgtgtttttacagatatatcttcgacgctgaatgtgctctggagaagctgaccacggatcacgagaaggacaagctgaagaagcagttttttacacctaaagtgctgcaggattacagaaagttgaagaacactgctgaacagtttctgtctcggtctggctatagcgaggtcaacctaagcaagctgttcgccggctgcgccgtaaagtcttag

SEQ ID NO: 285192 - DNA, 4407 bp, Artificial Sequence
  derived and/or modified sequence
atggctcctgtgcatggggacgattgtgagatcggcgctagcgcattgtctgattccgggtctttcgtgtcatcccgcgctcgcagagagaagaagagtaaaaagggcagacaggaggcgttggaacgacttaaaaaggccaaggccggtgaaaaatacaaatatgaggtggaagattttacaggtgtctatgaggaagtggatgaagaacagtactctaaactggtgcaagctcggcaggacgatgactggattgtcgacgatgatggaatcggctacgtggaggatgggcgtgagatcttcgacgacgacctcgaagatgacgcactggatgccgacgagaaaggaaaggacgggaaggcccgtaataaggacaaaaggaatgtgaagaagttggccgtgaccaaacccaataacatcaagtctatgttcatcgcttgtgcagggaagaaaacggccgataaggccgtggacctctctaaagacgggctccttggtgatatcctgcaagatctaaacactgaaacccctcagattacccctcccccagtgatgatcctgaaaaagaaacggtcaattggagcctcccctaacccctttagcgtgcacaccgctacagcggtcccctcaggcaagatcgcgtcacccgtcagcagaaaggagccccctctgactcctgtgcccctgaagagagccgagtttgccggagacgacgtacaagtggagtcaaccgaagaggagcaagagtccggcgctatggagttcgaggatggagattttgatgagcccatggaggtagaagaggttgacctcgagccaatggccgcaaaggcttgggataaggaatccgagcccgctgaggaggtcaaacaggaggcagattccggaaagggaacagtgtcatatcttggtagcttcctgcccgacgtgtcttgctgggatatagatcaggaaggggactcctctttttcagtccaggaggtgcaggtagacagctcccatctcccgctcgtgaagggggctgatgaggaacaagtgtttcatttctattggttagacgcatacgaggaccaatataaccagcctggcgtcgtttttctgttcggcaaggtgtggatcgaaagtgctgaaacccacgttagctgctgtgttatggtgaaaaatattgagcgtacactgtattttctgcccagagaaatgaaaattgatctcaataccgggaaagagactggcactccaattagcatgaaagatgtctacgaagagtttgacgagaagatcgccaccaagtataagatcatgaaattcaaatcaaaacccgttgaaaagaactacgcattcgagatccctgatgtaccggagaagtctgaatatctggaagtgaaatattccgccgagatgccacagctgcctcaggatcttaagggggaaaccttcagccacgtgttcgggacaaacacctcatctttggagttattcctgatgaacagaaaaatcaaaggtccctgctggctagaggtaaaatctccacagctgctaaaccagcccgtcagttggtgcaaggtcgaggccatggccttgaagcctgatcttgtcaacgttatcaaagatgtgtcaccacctcccctggtcgtgatggcgttttccatgaaaactatgcagaatgcaaagaaccatcagaacgagattattgctatggctgctcttgtgcaccatagttttgcattagacaaggccgcacctaagccaccgtttcagtctcacttttgcgtcgtatcaaaaccaaaagattgtatctttccttacgcattcaaggaagtgatcgaaaagaagaatgtcaaagtagaagtcgctgcaacagaacggaccttgcttggcttttttctggccaaagtacacaagattgatcctgatattattgtgggtcataatatatacggcttcgaacttgaagttctgctgcagagaatcaacgtgtgcaaagcccctcattggtctaaaatagggcgactcaaacgatcgaatatgccaaaattaggaggcaggagcggatttggcgagcggaacgcaacttgcggccgaatgatatgtgatgtggagattagcgccaaagagctgatcagatgtaagagttaccatctgtccgagctcgtgcagcagattctgaagaccgaaagagtggttatccccatggagaacatccaaaatatgtacagcgaaagcagccagctattatatctactggagcatacttggaaggatgcaaaatttatcctgcagattatgtgcgagctcaacgtgctgccattggccttgcagatcactaacatcgccggaaatattatgtcccgaaccctgatgggcggaaggagtgaacggaacgagtttctgctcctgcacgctttttacgaaaataattatatcgttcccgacaagcagatcttcaggaagccacagcagaagcttggagacgaggatgaggagatagatggtgacacaaacaagtataagaaaggacggaagaaggcggcatatgccggtggccttgtgctagaccccaaagtcggtttctacgacaagttcattctgctcctggattttaactccctgtacccaagcattatacaggagttcaacatttgttttaccactgtgcagcgtgttgcaagcgaggcccagaaggtaaccgaggacggcgaacaggagcaaataccagagttacctgaccccagcctggaaatgggcatcctccccagagaaattcgtaagctcgtcgaacgcagaaagcaagtgaaacaattaatgaagcagcaggacctgaaccctgaccttattttacaatacgatatcagacagaaggcacttaagctaacagcgaacagtatgtacgggtgcctcggattctcatatagccggttctacgccaagccactggctgcactagtcacttataaaggcagagagatcctgatgcacacgaaagagatggttcagaaaatgaacctcgaggttatctatggcgacacagactccatcatgattaacaccaattccacaaatctcgaggaagtgttcaaattaggaaataaggtgaagagcgaggttaacaaactctacaaactgcttgagatcgacatcgacggagttttcaaatccttactgctccttaaaaagaagaagtacgcagcactggttgtggaacccaccagtgacggcaactacgtgactaagcaggaattaaagggactggatatagtaagacgggactggtgcgacctggcaaaagatacaggaaatttcgtgatcggccagatcctttccgaccagtcacgcgacaccattgtggagaacatccaaaaacggctgatcgaaatcggtgagaacgtgctgaacggttccgtgcctgtgagccagtttgagattaacaaggccctcaccaaggatccgcaggattaccctgataagaaatctttgccacacgtacatgtcgccctgtggatcaactctcagggtgggagaaaagtcaaggccggtgataccgtaagctatgtcatttgtcaggacgggagcaatctgacagcatcccagagagcctacgcgcctgaacagctgcagaagcaagacaatctaaccattgatacacaatattacctggcgcaacagatacatccagtggtggccagaatctgtgagcctatagacggcattgacgcagttctaatcgccacgtggttggggctcgacccaacacaatttcgggtgcatcactatcataaagatgaagaaaatgatgctcttctcggtggaccagctcagttgacagacgaggaaaagtatcgcgattgcgaacgattcaaatgtccctgtcccacctgcggcactgaaaacatttatgacaatgtgttcgatggtagcggtactgacatggaaccaagcctttataggtgctctaacatcgattgtaaagcctcccctctgacattcaccgtgcagctcagtaataaattaataatggacatcaggcgcttcatcaagaagtactatgatggctggctgatttgtgaggaacccacctgtcggaaccgcactaggcacctaccactccagttttcacgcacaggacctctctgccccgcttgtatgaaggccacattgcagccagagtacagcgataagtcattgtatactcagctgtgtttttacaggtatatttttgatgctgagtgtgctcttgagaagctcaccacagaccacgaaaaggataaattgaaaaaacagttttttacccccaaggtgctccaggactaccgtaagctgaagaatacagccgaacagttcctgtcacgctcagggtattctgaggtgaatctgagtaaattattcgctggctgcgctgtgaagagctag

SEQ ID NO: 285193 - protein, 600 aa, Artificial Sequence
  derived and/or modified sequence
MGCSSSSTKTRRSDTSLRAALIIQNWYRGYKARLKARQHYALTIFQSIEYADEQGQMQLSTFFSFMLENYTHIHKEELEILHAHYVLEVLFETKKVLKQMPNFTHIQTSPSKEVTICGDLHGKLDDLFLIFYKNGLPSERNPYVFNGDFVDRGKNSIEILMILCVSFLVYPNDLHLNRGNHEDFMMNLRYGFTKEILHKYKLHGKRILQILEEFYAWLPIGTIVDNEILVIHGGISETTDLNLLHRVERNKMKSVLIPPTETNRDHDTDSKHNKVGVTFNAHGRIKTNGSPTEHLTEHEWEQIIDILWSDPRGKNGCFPNTCRGGGCYFGPDVTSKILNKYQLKMLIRSHECKPEGYEICHDGKVVTIFSASNYYEEGSNRGAYIKLCSGTTPRFFQYQVTKATCFQPLRQRVDTMENSAIKILRERVISRKSDLTRAFQLQDHRKSGKLSVSQWAFCMENILGLNLPWRSLSSNLVNIDQNGNVEYMSSFQNIRIEKPVQEAHSTLVETLYRYRSDLEIIFNAIDTDHSGLISVEEFRAMWKLFSSHYNVHIDDSQVNKLANIMDLNKDGSIDFNEFLKAFYVVHRYEDLMKPDVTNLG

SEQ ID NO: 285194 - protein, 653 aa, Artificial Sequence
  derived and/or modified sequence
MGCSSSSTKTRRSDTSLRAALIIQNWYRGYKARLKARQHYALTIFQSIEYADEQGQMQLSTFFSFMLENYTHIHKEELELRNQSLESEQDMRDRWDYVDSIDVPDSYNGPRLQFPLTCTDIDLLLEAFKEQQILHAHYVLEVLFETKKVLKQMPNFTHIQTSPSKEVTICGDLHGKLDDLFLIFYKNGLPSERNPYVFNGDFVDRGKNSIEILMILCVSFLVYPNDLHLNRGNHEDFMMNLRYGFTKEILHKYKLHGKRILQILEEFYAWLPIGTIVDNEILVIHGGISETTDLNLLHRVERNKMKSVLIPPTETNRDHDTDSKHNKVGVTFNAHGRIKTNGSPTEHLTEHEWEQIIDILWSDPRGKNGCFPNTCRGGGCYFGPDVTSKILNKYQLKMLIRSHECKPEGYEICHDGKVVTIFSASNYYEEGSNRGAYIKLCSGTTPRFFQYQVTKATCFQPLRQRVDTMENSAIKILRERVISRKSDLTRAFQLQDHRKSGKLSVSQWAFCMENILGLNLPWRSLSSNLVNIDQNGNVEYMSSFQNIRIEKPVQEAHSTLVETLYRYRSDLEIIFNAIDTDHSGLISVEEFRAMWKLFSSHYNVHIDDSQVNKLANIMDLNKDGSIDFNEFLKAFYVVHRYEDLMKPDVTNLG

SEQ ID NO: 285195 - protein, 376 aa, Artificial Sequence
  derived and/or modified sequence
MGCSSSSTKTRRSDTSLRAALIIQNWYRGYKARLKARQHYALTIFQSIEYADEQGQMQLSTFFSFMLENYTHIHKEELELRNQSLESEQDMRDRWDYVDSIDVPDSYNGPRLQFPLTCTDIDLLLEAFKEQQILHAHYVLEVLFETKKVLKQMPNFTHIQTSPSKEVTICGDLHGKLDDLFLIFYKNGLPSERNPYVFNGDFVDRGKNSIEILMILCVSFLVYPNDLHLNRGNHEDFMMNLRYGFTKEILHKYKLHGKRILQILEEFYAWLPIGTIVDNEILVIHGGISETTDLNLLHRVERNKMKSVLIPPTETNRDHDTDSKHNKVGVTFNAHGRIKTNGSPTEHLTEHEWEQSGYYGKQRHQDIKRESDFTKK

SEQ ID NO: 285196 - protein, 588 aa, Artificial Sequence
  derived and/or modified sequence
MLENYTHIHKEELELRNQSLESEQDMRDRWDYVDSIDVPDSYNGPRLQFPLTCTDIDLLLEAFKEQQILHAHYVLEVLFETKKVLKQMPNFTHIQTSPSKEVTICGDLHGKLDDLFLIFYKNGLPSERNPYVFNGDFVDRGKNSIEILMILCVSFLVYPNDLHLNRGNHEDFMMNLRYGFTKEILHKYKLHGKRILQILEEFYAWLPIGTIVDNEILVIHGGISETTDLNLLHRVERNKMKSVLIPPTETNRDHDTDSKHNKVGVTFNAHGRIKTNGSPTEHLTEHEWEQIIDILWSDPRGKNGCFPNTCRGGGCYFGPDVTSKILNKYQLKMLIRSHECKPEGYEICHDGKVVTIFSASNYYEEGSNRGAYIKLCSGTTPRFFQYQVTKATCFQPLRQRVDTMENSAIKILRERVISRKSDLTRAFQLQDHRKSGKLSVSQWAFCMENILGLNLPWRSLSSNLVNIDQNGNVEYMSSFQNIRIEKPVQEAHSTLVETLYRYRSDLEIIFNAIDTDHSGLISVEEFRAMWKLFSSHYNVHIDDSQVNKLANIMDLNKDGSIDFNEFLKAFYVVHRYEDLMKPDVTNLG

SEQ ID NO: 285197 - DNA, 1803 bp, Artificial Sequence
  derived and/or modified sequence
atgggctgttcatctagtagtaccaaaacaaggagatctgatacctcacttagggcggccctgattattcagaactggtaccggggatataaggctcggctgaaggctcgacagcattacgctctcacgatttttcaatctatcgagtatgccgacgaacagggtcagatgcaactgagtactttctttagtttcatgctggagaactacactcacattcataaagaggagctagaaattctccatgcgcactacgtacttgaagtcctgtttgagactaaaaaggtactcaaacagatgccgaatttcactcatatccagaccagcccctccaaggaggtgaccatatgcggagacctgcacgggaagctagatgatctgtttctgatattctataaaaatggacttccaagcgaacggaatccctacgtgttcaacggggactttgtagatcggggtaagaattctatcgagattcttatgatactctgcgtcagctttctggtctaccccaacgaccttcacctcaatcgtgggaatcatgaggatttcatgatgaatctccgctacggattcactaaggaaatcctgcataaatacaagcttcacggaaagagaatcttgcagattctggaagagttttacgcgtggctgcccataggcactatcgtagataatgaaatcctggtaatccacggcggcatctccgagacaaccgatttaaatctgttgcatcgagttgagagaaacaaaatgaagagtgtgctcattcctccaactgaaaccaatagagaccatgacacagactcaaagcataataaggtcggagtgacctttaatgcgcacggacggattaagacaaatggctcccctaccgaacacctcactgaacatgagtgggagcagattatagacatcctgtggtcggatcccaggggcaagaatggctgtttcccgaatacatgcagggggggaggctgttactttggacccgatgtgaccagtaaaatcctgaataagtatcaattgaaaatgctcattagatcacacgaatgtaagcccgaaggttatgaaatttgccacgacggcaaagtcgtaactatattcagtgccagtaactactacgaggaagggtcaaaccgcggggcctacattaaattgtgttctgggacaacccccaggtttttccaataccaggtgacgaaagcaacgtgtttccagcccctgcggcagcgcgtggacaccatggagaatagcgctataaagatactgagagaacgtgtgatctctcgaaaatcagacctcaccagggcgttccagctacaggatcaccggaagagtgggaaactctcagtgtctcaatgggccttttgcatggaaaatattcttggtctaaacttgccatggcgctcactgtcgtcaaatcttgtgaacatcgatcagaacggcaacgttgaatatatgagtagcttccaaaacatcaggattgaaaagcccgtacaggaggcacactccacacttgtggaaaccctttataggtacaggtcagacctggagatcatcttcaacgccatcgataccgaccactcgggactaatttcagttgaggagtttagggccatgtggaagttattcagcagccactacaacgtccacatcgatgactctcaggtcaacaaactggccaatattatggacttgaacaaagacggctccatcgattttaatgagttcttgaaggccttttacgtggttcacaggtatgaagatctgatgaagcccgacgtaactaacctcggttag

SEQ ID NO: 285198 - DNA, 1962 bp, Artificial Sequence
  derived and/or modified sequence
atggggtgctccagctcatctacaaaaacacgcaggtccgatacatccctaagagcagctctcattatccagaactggtacaggggatataaggcacgtttaaaagcacgtcagcattatgccttgaccatttttcagtcaattgagtacgccgatgagcagggccagatgcagttgagcaccttttttagcttcatgctggagaactatactcacatacacaaggaggagttggagctgcgcaaccagtcactcgagtctgagcaggatatgcgcgaccgctgggattatgtggattctattgatgtccctgatagctataacggaccaagattgcagtttccccttacctgtaccgatattgacctcttactggaagcattcaaggagcagcagatactgcatgctcactacgttctagaggttttattcgagactaagaaggtgctgaagcagatgcccaacttcacacacattcagacttcccccagtaaggaggtcactatttgcggcgatctacatggtaagctggacgacctatttctgattttctacaaaaatggcctcccatctgagaggaacccctatgtcttcaacggggacttcgtcgatcgcggcaaaaattccatcgagattctgatgattttgtgcgtttcttttcttgtgtacccgaacgacctgcatctcaacaggggaaatcatgaggacttcatgatgaatctgcggtacggattcacaaaagaaattctgcataagtataaactacatgggaagagaattcttcagattctcgaagaattttacgcgtggttacccatcggaacgatcgtggacaacgagatcctcgtaattcatggggggatcagcgaaaccaccgatctgaatctgttacatagagtagagagaaacaagatgaagagtgtgcttatcccacccactgagacgaatcgtgaccatgacaccgattctaaacacaataaggtgggcgtgaccttcaatgcccatgggaggatcaagactaatggtagtcctacggaacacctaacagagcatgaatgggagcaaataatcgatattttgtggtcagatcctcggggcaagaatgggtgctttccgaatacctgtcggggcggcggatgttactttggacctgatgtcacgtcaaaaatattaaacaagtatcaactgaagatgcttatccggtcacacgaatgtaagccagagggctacgaaatctgccacgatgggaaagtggtgaccatctttagcgccagcaattattatgaagaagggtcgaatcgcggcgcctacatcaagctgtgcagtgggactacccccagattctttcaataccaggtgaccaaggctacctgcttccagccactaaggcagcgcgtcgataccatggagaattcggctattaagatcctgagagaacgcgtgattagccgtaagtcggacctgacccgggcgttccagctgcaagaccacaggaagagcgggaagctttcagtctctcagtgggccttctgcatggagaatatcctgggtttgaacctgccgtggcgtagcctgagctccaacctcgtcaatatcgaccagaatgggaatgttgagtacatgtcttccttccaaaacatccgaatcgagaagccagttcaagaggcccactctacactcgtggagactctgtacaggtatcgcagtgatctggaaataatcttcaatgccatcgataccgatcatagcggtcttatctcagtagaagagtttagagcaatgtggaaactgttttcgtcccactacaatgtgcatattgacgacagtcaggtcaacaagctggctaatatcatggatctgaataaggatgggtcaatcgacttcaatgagtttttaaaagctttctacgtggtgcaccgctacgaggatctgatgaagccagatgtgaccaatcttgggtag

SEQ ID NO: 285199 - DNA, 1767 bp, Artificial Sequence
  derived and/or modified sequence
atgctcgagaactacacccatattcacaaagaggagctcgaactccgaaatcagtcattagaaagtgaacaagatatgcgagataggtgggactacgttgattcaatagatgtccctgattcgtacaacgggcctcgtttgcagtttccactgacatgtactgacattgatctgctcttagaggcttttaaggagcagcagatcctccacgcgcactatgtcctcgaggtcctttttgagacaaagaaggtcttgaaacagatgcctaattttactcatattcagacctctccaagcaaggaggtcacgatatgcggtgatttacacggtaaactcgacgacctgttcctgatcttctataaaaatggcctcccctccgagcgcaatccttatgtctttaatggagacttcgtggaccgtgggaaaaactctattgagattctgatgattttgtgtgttagttttcttgtctatcccaatgatctgcatttaaaccgcggcaaccacgaggacttcatgatgaatttgcgctacggcttcactaaggagatcctccataaatataaactccatggcaagagaatactccagatcttggaggaattttacgcctggttacctattgggacaatagtcgataacgaaattctcgtaattcatggtggcatttcagaaactacagacctgaatttgctccatcgggtcgagcgaaataaaatgaaatctgtcctaatcccaccgactgagaccaacagggatcacgacacagattctaaacacaataaggtgggcgtgacattcaatgcccacgggcgcattaaaacaaatggatcccctactgagcaccttactgagcacgagtgggagcagattatcgatatactctggagtgatcctcggggtaagaacgggtgtttcccaaacacatgcagaggtggcgggtgctatttcggacccgacgtcacctccaagatcctgaacaaataccagctgaagatgctgataagatcccacgagtgtaaaccagaggggtacgagatttgccatgatggcaaggtcgttacaatcttctctgccagtaactactatgaggaagggtctaatcgaggcgcctacatcaagttgtgtagcgggaccaccccacgcttcttccagtaccaggtcactaaggcaacttgctttcagcccctgagacagagagtcgacaccatggagaacagtgctatcaagatattgcgggagcgtgtcattagtcgaaagagcgatctgactcgggcctttcagctgcaggaccaccgcaaatccggaaaactgtctgtctctcaatgggcattctgcatggagaacatccttggactgaacctgccgtggaggtctctctcttctaatctggtgaatatagatcagaatgggaacgttgaatatatgtccagctttcaaaatattaggattgagaagcctgtccaagaagcccactctacattagttgaaacactctatcggtatagatctgatctcgagattattttcaatgccattgatacagaccactcaggtctgatctctgtggaagagtttcgggcaatgtggaagctcttttcgagtcactataatgtacatatagacgattcccaggtcaacaagctggccaatattatggacctgaacaaagatggctctatagacttcaacgagtttctgaaggcattttacgtagtccataggtatgaagacctgatgaagccagacgtgacaaacctgggatag

SEQ ID NO: 285200 - DNA, 1803 bp, Artificial Sequence
  derived and/or modified sequence
atgggctgcagcagcagcagcaccaagaccaggagaagtgacaccagcctgcgggccgccctgatcatccagaactggtaccggggctacaaggcccggctgaaggcccggcagcactacgccctgaccatcttccagagcattgaatatgcagatgagcagggccagatgcagctgagcaccttcttctccttcatgctggagaactacacccacatccacaaggaggagctggagatcctgcacgcccactacgtgctggaggtgctgtttgagaccaagaaggtgctgaagcagatgcccaacttcacccacatccagaccagccccagcaaggaggtgaccatctgtggggacctgcacggcaagctggatgacctcttcctgatcttctacaagaatggcctgcccagcgagaggaacccctacgtgttcaacggggactttgtggaccggggcaagaacagcattgagatcctgatgatcctgtgtgtgtccttcctggtgtacccaaatgacctgcacctgaacagaggcaaccacgaggacttcatgatgaacctgcgctatggcttcaccaaggagatcctgcacaagtacaagctgcacggcaagaggatcctgcagatcctggaggagttctacgcctggctgcccatcggcaccatcgtggacaatgagatcctggtgatccacggcggcatcagcgagaccacagacctgaacctgctgcaccgggtggagaggaacaagatgaagtctgtgctgatccccccaacagagaccaacagagaccatgacacagacagcaagcacaacaaggtgggcgtgaccttcaatgcccacggccgcatcaagaccaacggcagccccacagagcacctgacagagcacgagtgggagcagatcatcgacatcctgtggagcgacccccggggcaagaatggctgcttccccaacacctgccggggcggcggctgctactttggaccagatgtgaccagcaagatcctgaacaagtaccagctgaagatgctgatccgcagccatgagtgcaagccagagggctatgagatctgccatgatggcaaggtggtgaccatcttcagcgccagcaactactatgaggagggcagcaacagaggagcctacatcaagctgtgcagcggcaccaccccccgcttcttccagtaccaggtgaccaaggccacctgcttccagcccctgcggcagagggtggacaccatggagaacagcgccatcaagatcctgcgggagagggtcatcagcaggaagagtgacctgacccgggccttccagctgcaggaccacaggaagagcggcaagctgtctgtgtcccagtgggccttctgcatggagaacatcctgggcctgaacctgccctggaggagcctgagcagcaacctggtgaacatcgaccagaatggaaatgtggagtacatgagcagcttccagaacatccgcatcgagaagcctgtgcaggaggcccacagcaccctggtggagaccctgtaccgctacagaagtgacctggagatcatcttcaatgccatcgacacagaccacagcggcctcatctctgtggaggagttccgggccatgtggaagctgttcagcagccactacaacgtgcacattgatgacagccaggtgaacaagctggccaacatcatggacctgaacaaggatggcagcattgacttcaatgagttcctgaaggccttctacgtggtgcacagatatgaggacctgatgaagccagatgtgaccaacctgggctag

SEQ ID NO: 285201 - DNA, 1962 bp, Artificial Sequence
  derived and/or modified sequence
atgggctgcagcagcagcagcaccaagaccaggagaagtgacaccagcctgcgggccgccctgatcatccagaactggtaccggggctacaaggcccggctgaaggcccggcagcactacgccctgaccatcttccagagcattgaatatgcagatgagcagggccagatgcagctgagcaccttcttctccttcatgctggagaactacacccacatccacaaggaggagctggagctgaggaaccagagcctggagagcgagcaggacatgagggaccgctgggactatgtggacagcattgatgtgcctgacagctacaacggcccccggctgcagttccccctgacctgcacagacatcgacctgctgctggaggccttcaaggagcagcagatcctgcacgcccactacgtgctggaggtgctgtttgagaccaagaaggtgctgaagcagatgcccaacttcacccacatccagaccagccccagcaaggaggtgaccatctgtggggacctgcacggcaagctggatgacctcttcctgatcttctacaagaatggcctgcccagcgagaggaacccctacgtgttcaatggagactttgtggaccggggcaagaacagcattgagatcctgatgatcctgtgtgtgtccttcctggtgtacccaaatgacctgcacctgaacagaggcaaccacgaggacttcatgatgaacctgcgctatggcttcaccaaggagatcctgcacaagtacaagctgcacggcaagaggatcctgcagatcctggaggagttctacgcctggctgcccatcggcaccatcgtggacaatgagatcctggtgattcatggaggcatcagcgagaccacagacctgaacctgctgcaccgggtggagaggaacaagatgaagtctgtgctgatccccccaacagagaccaacagagaccatgacacagacagcaagcacaacaaggtgggcgtgaccttcaatgcccacggccgcatcaagaccaacggcagccccacagagcacctgacagaacatgagtgggagcagatcatcgacatcctgtggagcgacccccggggcaagaatggctgcttccccaacacctgccggggcggcggctgctacttcggcccagatgtgaccagcaagatcctgaacaagtaccagctgaagatgctgatccgcagccatgagtgcaagccagagggctatgagatctgccatgatggcaaggtggtgaccatcttcagcgccagcaactactatgaggagggcagcaacagaggagcctacatcaagctgtgcagcggcaccaccccccgcttcttccagtaccaggtgaccaaggccacctgcttccagcccctgcggcagagggtggacaccatggagaacagcgccatcaagatcctgcgggagagggtcatcagcaggaagagtgacctgacccgggccttccagctgcaggaccacaggaagagcggcaagctgtctgtgtcccagtgggccttctgcatggagaacatcctgggcctgaacctgccctggaggagcctgagcagcaacctggtgaacatcgaccagaatggaaatgtggagtacatgagcagcttccagaacatcagaattgagaagcctgtgcaggaggcccacagcaccctggtggagaccctgtaccgctacagaagtgacctggagatcatcttcaatgccatcgacacagaccacagcggcctcatctctgtggaggagttccgggccatgtggaagctgttcagcagccactacaacgtgcacattgatgacagccaggtgaacaagctggccaacatcatggacctgaacaaggatggcagcattgacttcaatgagttcctgaaggccttctacgtggtgcacagatatgaggacctgatgaagccagatgtgaccaacctgggctag

SEQ ID NO: 285202 - DNA, 1767 bp, Artificial Sequence
  derived and/or modified sequence
atgctggagaactacacccacatccacaaggaggagctggagctgaggaaccagagcctggagagcgagcaggacatgagggaccgctgggactatgtggacagcattgatgtgcctgacagctacaacggcccccggctgcagttccccctgacctgcacagacatcgacctgctgctggaggccttcaaggagcagcagatcctgcacgcccactacgtgctggaggtgctgtttgagaccaagaaggtgctgaagcagatgcccaacttcacccacatccagaccagccccagcaaggaggtgaccatctgtggggacctgcacggcaagctggatgacctcttcctgatcttctacaagaatggcctgcccagcgagaggaacccctacgtgttcaacggggactttgtggaccggggcaagaacagcattgagatcctgatgatcctgtgtgtgtccttcctggtgtacccaaatgacctgcacctgaacagaggcaaccacgaggacttcatgatgaacctgcgctatggcttcaccaaggagatcctgcacaagtacaagctgcacggcaagaggatcctgcagatcctggaggagttctacgcctggctgcccatcggcaccatcgtggacaatgagatcctggtgatccacggcggcatcagcgagaccacagacctgaacctgctgcaccgggtggagaggaacaagatgaagtctgtgctgatccccccaacagagaccaacagagaccatgacacagacagcaagcacaacaaggtgggcgtgaccttcaatgcccacggccgcatcaagaccaacggcagccccacagagcacctgacagagcacgagtgggagcagatcatcgacatcctgtggagcgacccccggggcaagaatggctgcttccccaacacctgccggggcggcggctgctactttggaccagatgtgaccagcaagatcctgaacaagtaccagctgaagatgctgatccgcagccatgagtgcaagccagagggctatgagatctgccatgatggcaaggtggtgaccatcttcagcgccagcaactactatgaggagggcagcaacagaggagcctacatcaagctgtgcagcggcaccaccccccgcttcttccagtaccaggtgaccaaggccacctgcttccagcccctgcggcagagggtggacaccatggagaacagcgccatcaagatcctgcgggagagggtcatcagcaggaagagtgacctgacccgggccttccagctgcaggaccacaggaagagcggcaagctgtctgtgtcccagtgggccttctgcatggagaacatcctgggcctgaacctgccctggaggagcctgagcagcaacctggtgaacatcgaccagaatggaaatgtggagtacatgagcagcttccagaacatccgcatcgagaagcctgtgcaggaggcccacagcaccctggtggagaccctgtaccgctacagaagtgacctggagatcatcttcaatgccatcgacacagaccacagcggcctcatctctgtggaggagttccgggccatgtggaagctgttcagcagccactacaacgtgcacattgatgacagccaggtgaacaagctggccaacatcatggacctgaacaaggatggcagcattgacttcaatgagttcctgaaggccttctacgtggtgcacagatatgaggacctgatgaagccagatgtgaccaacctgggctag

SEQ ID NO: 285203 - DNA, 1803 bp, Artificial Sequence
  derived and/or modified sequence
atgggctgcagcagcagcagcaccaagacccggcggagcgacacctcacttcgcgccgccttgattatccagaactggtacagaggatacaaggcacggctgaaggcacgccaacactatgccctcacaattttccagtccatagaatacgcagatgaacagggacagatgcaactgtctacatttttctcctttatgctcgaaaactatacccacattcataaggaggagctcgaaattcttcacgcacattacgttctggaagttttattcgagaccaagaaagttctgaagcaaatgcctaacttcactcatatccaaacctccccatctaaagaagtcacaatttgcggcgacttgcatggcaagctggatgatctcttccttattttttacaaaaacgggcttccctccgaaaggaacccatatgtctttaatggcgacttcgtggacagaggcaaaaacagcatcgagattttgatgatcctatgcgtttcttttctggtctatccaaacgatctgcacctcaaccgtggcaaccacgaggacttcatgatgaacctacgatatggtttcaccaaggagatcctgcataagtataagttacacggaaagagaattcttcagatccttgaagagttctatgcctggctaccaataggtacaatagtcgacaatgaaattttagtaattcacggtgggattagcgagactactgatctgaacctactgcacagggtcgagcgcaacaagatgaagagcgtcctgatccctcctacagagaccaaccgcgatcacgataccgactctaaacacaacaaggtgggcgtgacgttcaacgcgcacggcagaataaagacaaatgggagtcccactgaacacctgacggagcacgaatgggagcagataatcgacattctgtggagtgacccccgaggtaagaacggctgcttcccgaacacgtgtcgcggcgggggatgctactttggtccagacgtaacctccaagattctgaacaagtaccagcttaaaatgcttatacgttcacatgaatgtaagcctgaagggtacgagatctgccacgacgggaaggtggtgaccattttctctgcatcaaactattatgaggaagggtccaaccggggcgcgtatattaaactgtgctcaggtactacacctcgattcttccagtatcaggtgaccaaggccacctgcttccagcccctccgacagcgagttgacactatggagaatagcgccattaaaatccttcgcgagcgcgttattagcaggaagtcagacctgactagggcttttcaactacaggatcataggaagagcggcaagctatcagtgagccagtgggctttctgtatggagaatatcttagggctaaatctcccttggagatctctttcatctaatctcgtcaacatcgaccaaaacggtaatgtcgagtacatgtcatcttttcagaacattcgcattgaaaagcccgttcaggaagcgcatagcactctagtggaaactttatatcggtacagatcagatttggagattattttcaacgctattgacactgatcactctggtctgatcagcgtggaggagttccgggcgatgtggaagctgttctccagccactataatgtgcacatagatgacagccaagtgaataagcttgctaatataatggacctgaacaaagatggttccatcgattttaacgagtttttgaaagccttttacgtggtgcaccggtacgaggatctgatgaagcctgacgtgacgaatctcgggtag

SEQ ID NO: 285204 - DNA, 1962 bp, Artificial Sequence
  derived and/or modified sequence
atgggctgcagcagcagcagcaccaagacccggcggagcgacaccagcctaagggctgcccttattatccaaaattggtaccggggctataaggcaaggttgaaagccagacaacactacgcattgacaatctttcagagcatagagtatgccgacgagcagggccagatgcagctttcaacctttttctctttcatgctcgaaaactatacccacattcacaaggaagaactagagttgagaaatcaaagcctggagtcagaacaggacatgcgagaccggtgggactatgtagactcaatcgatgtccccgacagttataacggacctcgcttgcagtttcccttgacctgcaccgacatagacctgctgttagaggccttcaaagagcagcaaatcctccacgctcattacgtgttggaggtacttttcgaaacaaagaaagttttgaagcagatgcctaacttcactcatattcagacatctccatcaaaggaggttactatctgtggggacctgcacggaaagcttgatgatcttttcctgatattttataaaaacggcctgccctcagaaagaaatccatacgtctttaacggtgacttcgttgaccgcggcaaaaatagcattgagatcctgatgattctctgcgtgtcatttctggtgtaccccaatgacctacacctaaaccggggaaaccatgaagacttcatgatgaatttgagatatggctttactaaggaaatcctccacaagtataaactgcatggtaaacgcattctgcaaattcttgaggagttctacgcgtggttgcctatcgggaccatagtggacaacgaaatacttgtcatccacggaggcatcagcgagaccaccgacctgaatctgctgcatcgcgtcgagaggaataagatgaaatctgtgttgatccccccaacagaaacaaaccgcgatcacgataccgactccaaacacaataaggtcggagtgacatttaacgcccacggtcgcataaagacgaatgggagccccaccgagcacctgacggaacatgaatgggagcagattatcgacatactctggagtgaccctcgaggcaagaacggatgcttccctaacacctgtaggggcggaggctgttactttggtccggatgtcacctcaaagatcttaaataagtaccagttgaagatgctcattcgcagtcacgagtgcaagcctgagggttatgaaatttgccacgacggcaaagtggtaactatctttagcgcatccaattattatgaagaggggtccaatagaggagcatacatcaagttatgctccggaaccaccccccggtttttccagtatcaggtgaccaaggccacttgctttcaaccattacgccagcgggtcgacactatggaaaactccgccattaagatactgcgggagagagtcatttctcgcaagtccgatctcactcgggccttccagctgcaggaccacaggaaatctggtaaacttagtgtgagccagtgggccttttgcatggagaacattctgggcctgaatctaccttggcgttctctgtcgtcaaatctggtgaatatcgatcagaacggcaacgttgaatatatgtcctccttccaaaatatccggattgaaaaaccagtgcaagaggctcatagcacgctggtcgagactttatacagatatagaagcgatttagagattatctttaatgcgatagataccgaccactccggattgatttcggtcgaagaattccgagctatgtggaaactgttctcatctcactataacgtacatattgatgatagtcaggtcaacaagctggcaaacattatggatttaaacaaagatggctccattgacttcaacgaattcctgaaagccttctatgtggtacataggtacgaggatctgatgaagccagatgtaaccaacttgggatag

SEQ ID NO: 285205 - DNA, 1767 bp, Artificial Sequence
  derived and/or modified sequence
atgctggagaactacacccacatccacaaggaggagctggagctgcgaaaccagtctctcgagagtgaacaggacatgagggacagatgggattatgtcgactctatagacgtccccgacagctataatgggccacgcctgcagtttcccctgacatgtacggatatcgaccttctgctggaggccttcaaagaacagcagatacttcatgcccactatgtgctcgaagtgctgttcgagacaaaaaaagttcttaagcaaatgcccaattttacccatattcagacttctccaagcaaggaggtgactatctgcggcgatctccatggcaaactcgatgatctgttcttgatcttttacaagaatggattacctagcgagcggaacccatatgtgtttaacggcgactttgtcgaccgtggcaagaactccatcgagatcttgatgattttgtgtgtaagcttccttgtctaccccaacgatttgcatcttaatcgcggtaatcacgaggactttatgatgaaccttaggtacggatttactaaggaaattctgcataaatataagttacatggcaagaggattttgcagattttggaggaattctatgcctggttgccaatcgggaccattgtcgacaatgagattctggttattcatggcggcatatcagaaaccactgaccttaacctgctccacagagtcgagagaaacaaaatgaaatccgttctgatacccccaaccgagaccaaccgggatcacgacaccgacagcaaacataataaggtaggtgttacattcaacgcccacgggagaattaaaactaacggatctcccactgagcatcttaccgaacatgagtgggagcaaattatcgatatcctgtggtctgatcctaggggtaagaacggatgttttcccaacacatgtaggggcggaggctgctactttgggccagatgttacttcaaagatactgaacaaataccaactaaagatgctgatcaggtctcatgagtgtaaacctgaaggttacgagatttgccacgatggcaaagtcgtcacaatattttctgcttcaaactattatgaggagggtagcaacaggggcgcctacataaaactgtgtagtggaacaacacccagattcttccagtatcaggtaaccaaagccacctgttttcaaccactacgacagcgggttgatacgatggagaatagcgcgataaagatcctgagggagcgggttatcagtcgcaaatctgaccttacacgagcattccagctgcaagatcaccgcaagtcaggtaaactgagcgtctcccagtgggccttttgcatggagaacatcttagggctgaacttgccatggaggtctctgagctccaacttggtgaatattgatcagaacggcaacgtcgagtacatgtccagtttccagaatatcagaattgaaaaacccgtacaggaagcccattctactctggttgagaccctgtacaggtataggtccgatctggagatcatctttaatgctatcgatactgaccacagcgggctgatctctgtcgaggagtttcgagctatgtggaagctgttttccagtcactataatgtgcacattgatgattcacaagtaaacaagctggcaaacattatggacctcaataaagacgggagcatcgattttaacgagttcctcaaggccttttacgttgtgcatcggtatgaagacctgatgaagcctgacgtaaccaacttgggatag

SEQ ID NO: 285206 - DNA, 1803 bp, Artificial Sequence
  derived and/or modified sequence
atggggtgcagcagcagcagtacaaagaccagacggtccgatacatcactgcgggcagctctgatcattcagaattggtaccgtgggtacaaagcgaggttgaaggctaggcagcactatgctctgacaatcttccagagcatcgagtacgccgatgagcagggccaaatgcagttgtccaccttcttttcatttatgctcgagaattatactcacattcataaggaggagctggaaattctgcatgcccattacgttctggaagtgctgttcgagactaagaaggtgctaaaacagatgcctaatttcactcatattcagacttctccctcaaaggaagtcaccatatgcggtgatttacacggtaagctggacgatttgttcctgatcttttacaaaaacggactgcccagcgagaggaacccttacgtatttaacggagattttgtagataggggcaagaattctattgagatcttaatgatcctgtgtgtctcatttctggtttatcccaatgacctacatctgaatcgtggaaaccacgaggattttatgatgaacctccgttacggatttactaaggaaatcctccataaatacaagctccacgggaagcgtattctccagatactcgaggagttctatgcatggctgcccatcggtacaatcgtggacaacgaaatcctggtcattcatggtggcatttctgagacaactgatcttaatctgctacatcgtgtggaacgcaacaagatgaagagtgtactgatcccccctactgagaccaaccgcgaccacgacacagatagcaagcacaacaaggtaggcgtgaccttcaacgcgcacggcagaattaaaacaaatgggtctcctaccgagcacctcaccgagcacgagtgggaacagatcatcgatattctgtggagcgatccccgagggaaaaatgggtgctttccaaacacctgtcgaggagggggatgctactttggcccagacgtgacatcgaagatcctcaataagtatcagctgaagatgctcatccggtcgcatgagtgtaaacctgaaggttacgagatatgtcacgatgggaaagtggtgaccatatttagcgcttcgaattactatgaagagggctccaaccgcggtgcatatatcaaactgtgctcaggcacaacacccagattttttcagtaccaagtgacaaaggcaacatgcttccagccactccgacagcgcgtggatacaatggagaattcagccataaagatcctgagggagagggtcatttcccgcaagtctgacctcacaagggcgttccagttgcaagaccataggaaatcgggaaaactaagtgtcagtcagtgggctttctgcatggagaacatcctagggttgaacctgccttggcgtagcctctcttccaaccttgtcaacatagatcaaaatggcaacgttgagtacatgtcctccttccagaatattaggatagagaagccagtccaggaagcccactctactctggtggaaaccctgtacagatatagatcggatttagagattatatttaacgccatcgataccgatcatagtgggttgatatctgtcgaagaatttcgcgcaatgtggaagctcttctcctctcattacaatgtgcatatagatgactcacaggtgaataagctagccaacataatggacctgaacaaggatgggagcatcgactttaatgagttccttaaggcattttacgtggtgcatcgctacgaggatctgatgaaaccagatgtgactaaccttggctag

SEQ ID NO: 285207 - DNA, 1962 bp, Artificial Sequence
  derived and/or modified sequence
atgggctgtagctcttcgagtaccaaaacccggaggtccgatacctccttgagagcagccctcataatccagaattggtaccgtgggtataaggctaggctgaaggctcggcaacactatgccctgacaatcttccagagtattgaatacgccgatgagcaggggcagatgcagctgtcgacgttcttttcgttcatgctggagaattatacccatattcataaggaagaactggagctgaggaaccagagcctcgaaagtgaacaagacatgcgtgacaggtgggattatgtggattctatcgacgtccccgacagctacaacggtccacgactgcagtttcctcttacctgtaccgacattgacctcctgctggaagccttcaaggaacagcagattctgcacgcccactacgtgctcgaggtgctgtttgaaacaaaaaaagtgctgaagcagatgcccaatttcacccacatccagactagcccatctaaagaagtgactatttgcggtgatctgcacggcaagcttgatgatcttttcctaatattctataaaaacgggctgccaagtgaacgaaacccttacgtattcaacggggactttgttgatcgcggaaagaatagtatcgaaattctgatgatcctgtgtgttagtttcctcgtgtaccctaacgacctgcacctgaatcgcggaaaccacgaagacttcatgatgaacctgaggtacggatttactaaggaaattttgcataagtataaactgcatggaaagagaatactgcaaattctcgaggagttttatgcctggctgccaatcggaaccatagtggataacgagatcctggtgattcacggaggtatctcagagacaacggatttgaaccttctgcatagggttgaaagaaacaaaatgaaatccgtccttattccacctacggagaccaatagggaccatgacacagatagcaaacataacaaggtgggtgttacctttaacgctcacgggaggatcaaaactaatggcagccctactgagcacctcaccgagcatgagtgggaacagattattgatattctgtggtcagatcctaggggcaaaaacggctgctttccaaatacatgtcggggaggcggatgctacttcgggcctgacgttactagcaagattttaaataaatatcaactgaagatgctgatccgcagccacgaatgtaaacctgaaggatacgaaatctgccacgatgggaaggtggtgaccatcttctccgcctcaaactattacgaagaggggtctaataggggtgcctacattaaattgtgctccggaactacgccccgtttcttccagtatcaggtcacgaaagccacgtgttttcagcctctccggcagagagtggacacaatggagaattctgccatcaagatactccgagagcgggtgattagccgcaaatcagacttgacacgagctttccagctacaggaccaccgtaagtctggaaagctcagcgtgagccagtgggcattttgcatggagaacattctggggttgaacttgccatggcgctctctgagcagcaatctggtcaacatcgaccagaatgggaatgtcgagtacatgagctcatttcagaacatccgtatcgagaagcccgtgcaggaggcacatagtacccttgtcgagacattatatcggtacagaagcgatctcgaaatcatctttaacgcaatcgatacagaccattccggactaatctccgtggaggagtttagagctatgtggaagctattttcatcccattacaacgttcacattgatgattctcaggttaataagctggctaacattatggatctcaataaagacgggtccattgacttcaacgagttcctgaaggctttttatgtggtgcaccgctatgaagatttaatgaagcccgatgtgaccaacctcggctag

SEQ ID NO: 285208 - DNA, 1767 bp, Artificial Sequence
  derived and/or modified sequence
atgctcgagaactacacgcacatacacaaggaggaactagagcttcggaaccagagccttgaaagtgagcaagacatgcgtgatcgctgggattacgtggacagcattgacgtcccagactcatacaacggccctcgcctgcagtttcctctgacttgtaccgacatagatttgttgttggaggcgttcaaagagcagcagatcttgcacgcacattatgttctggaggtgctttttgaaacaaaaaaggtcttgaagcagatgccaaacttcacccatatacagacaagccctagcaaggaggtgaccatttgtggagatctacacggcaagttagacgacttgttcctgattttctacaaaaacggattgccttccgagcgcaacccgtacgtctttaatggcgacttcgtggacaggggaaagaattcgatcgagattctgatgatcctgtgtgtgagttttctggtatatcctaacgatctccatttgaatagaggaaaccacgaagactttatgatgaatttgcgctacggctttactaaagaaatactgcacaaatacaaactgcatgggaaacgcattctacagatcttggaggagttctacgcgtggctgcccattggcaccatcgtggacaacgagatactggtgatacacggaggaattagtgagacgacagacctgaatctccttcaccgcgttgaaagaaataaaatgaaatcagtgctgattcctccaacagagacaaatcgcgaccatgataccgacagtaagcacaacaaggtgggcgtaacctttaacgcccacggacgcatcaagacaaatggatccccgactgagcacctcaccgagcatgagtgggaacaaataattgatatcctctggagcgatccacgtggcaagaatggatgttttccaaatacatgcagggggggtggctgttactttggccctgacgttacttccaagatccttaataaatatcagcttaaaatgctgatccgaagccatgagtgcaaacctgaagggtatgagatttgccatgatgggaaagtcgtgaccatattttctgccagcaactattatgaagagggctccaacagaggggcttacattaagctgtgctctgggacaaccccacgcttttttcaataccaggtaaccaaggccacctgctttcagcctctgcgacagagggttgataccatggagaactccgcgattaagattctcagggaacgggtgatttcacgtaagtccgatctcacaagagcattccagctccaggaccatcgcaagagcggaaaattgtctgttagccagtgggctttctgtatggaaaatatccttggcttaaacctgccgtggagatcattgtcttcaaaccttgtcaacattgaccagaatggaaatgtcgagtacatgagttcctttcagaatattagaatcgagaagccggtacaggaagcacactctacacttgtggagaccctttatcgttatcgaagtgatctcgagatcatctttaacgcgatcgatacagatcacagcggtctcatttctgtcgaggagtttagggccatgtggaaactgtttagctcgcattataatgtgcatattgatgatagtcaagttaataaactggccaacatcatggatttaaacaaggatggcagcatcgatttcaacgagttcctgaaggccttttatgtcgttcaccgttatgaggatttaatgaaaccagatgtcacaaacctgggttag

SEQ ID NO: 285209 - DNA, 2717 bp, Artificial Sequence
  derived and/or modified sequence
gaagattacaaatgagactgggaaaccctcttcaataagacctgtgtgatgatagattgtgtcctgagcccgcaggtcaggctgaaagagtcaacaaccagcaaagtgaagatctaggagtctgttccccttgaacctgtgtggacctgatcaaacctcgagggaaaggctgggagaacacatccctggtcagctgtaggaaagccagagagcatttgagaagaggctgaagcttgaattttgcaaacacacaagccctctgcatttccccagagagaaggtttttttctcgtcttcatttcctttgaaacacctggggtgaggaaaaacctctacattggccaagcagaagaaacagaatctatgactgaagaggatcggctaagagtggttcctcgcagcttaaagggaggcacttttcacactctgtcttaaaatcagaagttgaattcatgaacacatatgatttagatagaagtcatgggatgcagcagttcttcaacgaaaaccaggagatctgacacatcactgagagctgcgttgatcatccagaactggtaccgaggttacaaagctcgactgaaggccagacaacactatgccctcaccatcttccagtccatcgaatatgctgatgaacaaggccaaatgcagttatccaccttcttttccttcatgttggaaaactacacacatatacataaggaagagctagagatacttcatgcccattatgtcttagaggtgctatttgaaaccaagaaagtcctgaagcaaatgccgaatttcactcacatacaaacttctccctccaaagaggtaacaatctgtggtgatttgcatgggaaactggatgatctttttttgatcttctacaagaatggtctcccctcagagaggaacccgtatgtttttaatggtgactttgtagatcgaggaaagaattccatagagatcctaatgatcctgtgtgtgagttttcttgtctaccccaatgacctgcacttgaacagagggaaccacgaagattttatgatgaatctgaggtatggcttcacgaaagaaattttgcataaatataagctacatggaaaaagaatcttacaaatcttggaagaattctatgcctggctcccaatcggtacaatcgttgacaatgaaatcctggtcatccatggtgggatatcagagaccacagacttgaatttactccaccgtgtagagaggaacaagatgaaatctgtgctgataccaccaacggaaacaaacagagaccatgacactgactcgaagcacaataaagtaggtgtgacttttaatgcacatggaagaatcaaaacaaatggatctcctactgaacacttaacagagcatgaatgggaacagattattgatattctgtggagtgatcccagaggcaaaaatggctgttttccaaatacgtgccgaggagggggctgctattttggaccagatgttacttccaagattcttaataaataccagttgaagatgctcatcaggtctcatgaatgtaagcccgaagggtatgaaatctgtcatgatgggaaggtggtgactatattttctgcttctaattattatgaagaaggcagcaatcgaggagcttacatcaaactatgttctggtacaactcctcgatttttccagtaccaagtaactaaagcaacgtgctttcagcctcttcgccaaagagtggatactatggaaaacagcgccatcaagatattaagagagagagtgatttcacgaaaaagtgaccttactcgtgctttccaacttcaagaccacagaaaatcaggaaaactttctgtgagccagtgggctttttgcatggagaacattttggggctgaacttaccatggagatccctcagttcgaatctggtaaacatagaccaaaatggaaacgttgaatacatgtccagcttccagaatatccgcattgaaaaacctgtacaagaggctcattctactctagttgaaactctgtacagatacagatctgacctggaaatcatatttaatgccattgacactgatcactcaggcctgatctccgtggaagaatttcgtgccatgtggaaactttttagttctcactacaatgttcacattgatgattcccaagtcaataagcttgccaacataatggacttgaacaaagatggaagcattgactttaatgagtttttaaaggctttctatgtagtgcatagatatgaagacttgatgaaacctgatgtcaccaaccttggctaaacacaaatgagagcttccctcaggctccctgaaacagctaggcccaaatcacaagtacagtcctttccaacacccctgaaattcatagtcagtagcagagaaaagcagatcccaattcatcccacaaacagatgcatagtatgggttttggaagtccctagcaagctgttattggtaagattaggttaaatgtcagtaataggatttggtttcagcattagtacctacatattgccagtgagaaactgggttggacctagtggtgttgtcgtgagtgccacctaaccaggaggccagagcggtttgaaaacatcctgaaaggaactcatacagcacaagagaaaactactaagcttgacatctgtgagtgactgagggagacaggaggaataccaggttattcatggaataaagtctttccatctttaaactgt

SEQ ID NO: 285210 - DNA, 2886 bp, Artificial Sequence
  derived and/or modified sequence
agaatctacctcttgaagattacaaatgagactgggaaaccctcttcaataagacctgtgtgatgatagattgtgtcctgagcccgcaggtcaggctgaaagagtcaacaaccagcaaagtgaagatctaggagtctgttccccttgaacctgtgtggacctgatcaaacctcgagggaaaggctgggagaacacatccctggtcagctgtaggaaagccagagagcatttgagaagaggctgaagcttgaattttgcaaacacacaagccctctgcatttccccagagagaaggtttttttctcgtcttcatttcctttgaaacacctggggtgaggaaaaacctctacattggccaagcagaagaaacagaatctatgactgaagaggatcggctaagagtggttcctcgcagcttaaagggaggcacttttcacactctgtcttaaaatcagaagttgaattcatgaacacatatgatttagatagaagtcatgggatgcagcagttcttcaacgaaaaccaggagatctgacacatcactgagagctgcgttgatcatccagaactggtaccgaggttacaaagctcgactgaaggccagacaacactatgccctcaccatcttccagtccatcgaatatgctgatgaacaaggccaaatgcagttatccaccttcttttccttcatgttggaaaactacacacatatacataaggaagagctagaattaagaaatcagtctcttgaaagcgaacaggacatgagggatagatgggattatgtggactcgatagatgtcccagactcctataatggtcctcggctacaatttcctctcacttgtacggatattgatttacttcttgaggccttcaaggaacaacagatacttcatgcccattatgtcttagaggtgctatttgaaaccaagaaagtcctgaagcaaatgccgaatttcactcacatacaaacttctccctccaaagaggtaacaatctgtggtgatttgcatgggaaactggatgatctttttttgatcttctacaagaatggtctcccctcagagaggaacccgtatgtttttaatggtgactttgtagatcgaggaaagaattccatagagatcctaatgatcctgtgtgtgagttttcttgtctaccccaatgacctgcacttgaacagagggaaccacgaagattttatgatgaatctgaggtatggcttcacgaaagaaattttgcataaatataagctacatggaaaaagaatcttacaaatcttggaagaattctatgcctggctcccaatcggtacaatcgttgacaatgaaatcctggtcatccatggtgggatatcagagaccacagacttgaatttactccaccgtgtagagaggaacaagatgaaatctgtgctgataccaccaacggaaacaaacagagaccatgacactgactcgaagcacaataaagtaggtgtgacttttaatgcacatggaagaatcaaaacaaatggatctcctactgaacacttaacagagcatgaatgggaacagattattgatattctgtggagtgatcccagaggcaaaaatggctgttttccaaatacgtgccgaggagggggctgctattttggaccagatgttacttccaagattcttaataaataccagttgaagatgctcatcaggtctcatgaatgtaagcccgaagggtatgaaatctgtcatgatgggaaggtggtgactatattttctgcttctaattattatgaagaaggcagcaatcgaggagcttacatcaaactatgttctggtacaactcctcgatttttccagtaccaagtaactaaagcaacgtgctttcagcctcttcgccaaagagtggatactatggaaaacagcgccatcaagatattaagagagagagtgatttcacgaaaaagtgaccttactcgtgctttccaacttcaagaccacagaaaatcaggaaaactttctgtgagccagtgggctttttgcatggagaacattttggggctgaacttaccatggagatccctcagttcgaatctggtaaacatagaccaaaatggaaacgttgaatacatgtccagcttccagaatatccgcattgaaaaacctgtacaagaggctcattctactctagttgaaactctgtacagatacagatctgacctggaaatcatatttaatgccattgacactgatcactcaggcctgatctccgtggaagaatttcgtgccatgtggaaactttttagttctcactacaatgttcacattgatgattcccaagtcaataagcttgccaacataatggacttgaacaaagatggaagcattgactttaatgagtttttaaaggctttctatgtagtgcatagatatgaagacttgatgaaacctgatgtcaccaaccttggctaaacacaaatgagagcttccctcaggctccctgaaacagctaggcccaaatcacaagtacagtcctttccaacacccctgaaattcatagtcagtagcagagaaaagcagatcccaattcatcccacaaacagatgcatagtatgggttttggaagtccctagcaagctgttattggtaagattaggttaaatgtcagtaataggatttggtttcagcattagtacctacatattgccagtgagaaactgggttggacctagtggtgttgtcgtgagtgccacctaaccaggaggccagagcggtttgaaaacatcctgaaaggaactcatacagcacaagagaaaactactaagcttgacatctgtgagtgactgagggagacaggaggaataccaggttattcatggaataaagtctttccatctttaaa

SEQ ID NO: 285211 - DNA, 2162 bp, Artificial Sequence
  derived and/or modified sequence
attagaatctatgactgaagaggatcggctaagagtggttcctcgcagcttaaagggaggcacttttcacactctgtcttaaaatcagaagttgaattcatgaacacatatgatttagatagaagtcatgggatgcagcagttcttcaacgaaaaccaggagatctgacacatttatccaccttcttttccttcatgttggaaaactacacacatatacataaggaagagctagaattaagaaatcagtctcttgaaagcgaacaggacatgagggatagatgggattatgtggactcgatagatgtcccagactcctataatggtcctcggctacaatttcctctcacttgtacggatattgatttacttcttgaggccttcaaggaacaacagatacttcatgcccattatgtcttagaggtgctatttgaaaccaagaaagtcctgaagcaaatgccgaatttcactcacatacaaacttctccctccaaagaggtaacaatctgtggtgatttgcatgggaaactggatgatctttttttgatcttctacaagaatggtctcccctcagagaggaacccgtatgtttttaatggtgactttgtagatcgaggaaagaattccatagagatcctaatgatcctgtgtgtgagttttcttgtctaccccaatgacctgcacttgaacagagggaaccacgaagattttatgatgaatctgaggtatggcttcacgaaagaaattttgcataaatataagctacatggaaaaagaatcttacaaatcttggaagaattctatgcctggctcccaatcggtacaatcgttgacaatgaaatcctggtcatccatggtgggatatcagagaccacagacttgaatttactccaccgtgtagagaggaacaagatgaaatctgtgctgataccaccaacggaaacaaacagagaccatgacactgactcgaagcacaataaagtaggtgtgacttttaatgcacatggaagaatcaaaacaaatggatctcctactgaacacttaacagagcatgaatgggaacagattattgatattctgtggagtgatcccagaggcaaaaatggctgttttccaaatacgtgccgaggagggggctgctattttggaccagatgttacttccaagattcttaataaataccagttgaagatgctcatcaggtctcatgaatgtaagcccgaagggtatgaaatctgtcatgatgggaaggtggtgactatattttctgcttctaattattatgaagaaggcagcaatcgaggagcttacatcaaactatgttctggtacaactcctcgatttttccagtaccaagtaactaaagcaacgtgctttcagcctcttcgccaaagagtggatactatggaaaacagcgccatcaagatattaagagagagagtgatttcacgaaaaagtgaccttactcgtgctttccaacttcaagaccacagaaaatcaggaaaactttctgtgagccagtgggctttttgcatggagaacattttggggctgaacttaccatggagatccctcagttcgaatctggtaaacatagaccaaaatggaaacgttgaatacatgtccagcttccagaatatccgcattgaaaaacctgtacaagaggctcattctactctagttgaaactctgtacagatacagatctgacctggaaatcatatttaatgccattgacactgatcactcaggcctgatctccgtggaagaatttcgtgccatgtggaaactttttagttctcactacaatgttcacattgatgattcccaagtcaataagcttgccaacataatggacttgaacaaagatggaagcattgactttaatgagtttttaaaggctttctatgtagtgcatagatatgaagacttgatgaaacctgatgtcaccaaccttggctaaacacaaatgagagcttccctcaggctccctgaaacagctaggcccaaatcacaagtacagtcctttccaacacccctgaaattcatagtcagtagcagagaaaagcagatcccaattcatcccacaaacagatgcatagtatgggttttggaagtccctagcaagctgttattggtaagattaggttaaatgtcagtaata

SEQ ID NO: 285212 - DNA, 1803 bp, Artificial Sequence
  derived and/or modified sequence
atgggctgcagcagcagcagcaccaagaccagaagaagcgacaccagcctgagagccgccctgatcatccagaactggtacagaggctacaaggccagactgaaggccagacagcactacgccctgaccatcttccagagcatcgagtacgccgacgagcagggccagatgcagctgagcaccttcttcagcttcatgctggagaactacacccacatccacaaggaggagctggagatcctgcacgcccactacgtgctggaggtgctgttcgagaccaagaaggtgctgaagcagatgcccaacttcacccacatccagaccagccccagcaaggaggtgaccatctgcggcgacctgcacggcaagctggacgacctgttcctgatcttctacaagaacggcctgcccagcgagagaaacccctacgtgttcaacggcgacttcgtggacagaggcaagaacagcatcgagatcctgatgatcctgtgcgtgagcttcctggtgtaccccaacgacctgcacctgaacagaggcaaccacgaggacttcatgatgaacctgagatacggcttcaccaaggagatcctgcacaagtacaagctgcacggcaagagaatcctgcagatcctggaggagttctacgcctggctgcccatcggcaccatcgtggacaacgagatcctggtgatccacggcggcatcagcgagaccaccgacctgaacctgctgcacagagtggagagaaacaagatgaagagcgtgctgatcccccccaccgagaccaacagagaccacgacaccgacagcaagcacaacaaggtgggcgtgaccttcaacgcccacggcagaatcaagaccaacggcagccccaccgagcacctgaccgagcacgagtgggagcagatcatcgacatcctgtggagcgaccccagaggcaagaacggctgcttccccaacacctgcagaggcggcggctgctacttcggccccgacgtgaccagcaagatcctgaacaagtaccagctgaagatgctgatcagaagccacgagtgcaagcccgagggctacgagatctgccacgacggcaaggtggtgaccatcttcagcgccagcaactactacgaggagggcagcaacagaggcgcctacatcaagctgtgcagcggcaccacccccagattcttccagtaccaggtgaccaaggccacctgcttccagcccctgagacagagagtggacaccatggagaacagcgccatcaagatcctgagagagagagtgatcagcagaaagagcgacctgaccagagccttccagctgcaggaccacagaaagagcggcaagctgagcgtgagccagtgggccttctgcatggagaacatcctgggcctgaacctgccctggagaagcctgagcagcaacctggtgaacatcgaccagaacggcaacgtggagtacatgagcagcttccagaacatcagaatcgagaagcccgtgcaggaggcccacagcaccctggtggagaccctgtacagatacagaagcgacctggagatcatcttcaacgccatcgacaccgaccacagcggcctgatcagcgtggaggagttcagagccatgtggaagctgttcagcagccactacaacgtgcacatcgacgacagccaggtgaacaagctggccaacatcatggacctgaacaaggacggcagcatcgacttcaacgagttcctgaaggccttctacgtggtgcacagatacgaggacctgatgaagcccgacgtgaccaacctgggctag

SEQ ID NO: 285213 - DNA, 1962 bp, Artificial Sequence
  derived and/or modified sequence
atgggctgcagcagcagcagcaccaagaccagaagaagcgacaccagcctgagagccgccctgatcatccagaactggtacagaggctacaaggccagactgaaggccagacagcactacgccctgaccatcttccagagcatcgagtacgccgacgagcagggccagatgcagctgagcaccttcttcagcttcatgctggagaactacacccacatccacaaggaggagctggagctgagaaaccagagcctggagagcgagcaggacatgagagacagatgggactacgtggacagcatcgacgtgcccgacagctacaacggccccagactgcagttccccctgacctgcaccgacatcgacctgctgctggaggccttcaaggagcagcagatcctgcacgcccactacgtgctggaggtgctgttcgagaccaagaaggtgctgaagcagatgcccaacttcacccacatccagaccagccccagcaaggaggtgaccatctgcggcgacctgcacggcaagctggacgacctgttcctgatcttctacaagaacggcctgcccagcgagagaaacccctacgtgttcaacggcgacttcgtggacagaggcaagaacagcatcgagatcctgatgatcctgtgcgtgagcttcctggtgtaccccaacgacctgcacctgaacagaggcaaccacgaggacttcatgatgaacctgagatacggcttcaccaaggagatcctgcacaagtacaagctgcacggcaagagaatcctgcagatcctggaggagttctacgcctggctgcccatcggcaccatcgtggacaacgagatcctggtgatccacggcggcatcagcgagaccaccgacctgaacctgctgcacagagtggagagaaacaagatgaagagcgtgctgatcccccccaccgagaccaacagagaccacgacaccgacagcaagcacaacaaggtgggcgtgaccttcaacgcccacggcagaatcaagaccaacggcagccccaccgagcacctgaccgagcacgagtgggagcagatcatcgacatcctgtggagcgaccccagaggcaagaacggctgcttccccaacacctgcagaggcggcggctgctacttcggccccgacgtgaccagcaagatcctgaacaagtaccagctgaagatgctgatcagaagccacgagtgcaagcccgagggctacgagatctgccacgacggcaaggtggtgaccatcttcagcgccagcaactactacgaggagggcagcaacagaggcgcctacatcaagctgtgcagcggcaccacccccagattcttccagtaccaggtgaccaaggccacctgcttccagcccctgagacagagagtggacaccatggagaacagcgccatcaagatcctgagagagagagtgatcagcagaaagagcgacctgaccagagccttccagctgcaggaccacagaaagagcggcaagctgagcgtgagccagtgggccttctgcatggagaacatcctgggcctgaacctgccctggagaagcctgagcagcaacctggtgaacatcgaccagaacggcaacgtggagtacatgagcagcttccagaacatcagaatcgagaagcccgtgcaggaggcccacagcaccctggtggagaccctgtacagatacagaagcgacctggagatcatcttcaacgccatcgacaccgaccacagcggcctgatcagcgtggaggagttcagagccatgtggaagctgttcagcagccactacaacgtgcacatcgacgacagccaggtgaacaagctggccaacatcatggacctgaacaaggacggcagcatcgacttcaacgagttcctgaaggccttctacgtggtgcacagatacgaggacctgatgaagcccgacgtgaccaacctgggctag

SEQ ID NO: 285214 - DNA, 1767 bp, Artificial Sequence
  derived and/or modified sequence
atgctggagaactacacccacatccacaaggaggagctggagctgagaaaccagagcctggagagcgagcaggacatgagagacagatgggactacgtggacagcatcgacgtgcccgacagctacaacggccccagactgcagttccccctgacctgcaccgacatcgacctgctgctggaggccttcaaggagcagcagatcctgcacgcccactacgtgctggaggtgctgttcgagaccaagaaggtgctgaagcagatgcccaacttcacccacatccagaccagccccagcaaggaggtgaccatctgcggcgacctgcacggcaagctggacgacctgttcctgatcttctacaagaacggcctgcccagcgagagaaacccctacgtgttcaacggcgacttcgtggacagaggcaagaacagcatcgagatcctgatgatcctgtgcgtgagcttcctggtgtaccccaacgacctgcacctgaacagaggcaaccacgaggacttcatgatgaacctgagatacggcttcaccaaggagatcctgcacaagtacaagctgcacggcaagagaatcctgcagatcctggaggagttctacgcctggctgcccatcggcaccatcgtggacaacgagatcctggtgatccacggcggcatcagcgagaccaccgacctgaacctgctgcacagagtggagagaaacaagatgaagagcgtgctgatcccccccaccgagaccaacagagaccacgacaccgacagcaagcacaacaaggtgggcgtgaccttcaacgcccacggcagaatcaagaccaacggcagccccaccgagcacctgaccgagcacgagtgggagcagatcatcgacatcctgtggagcgaccccagaggcaagaacggctgcttccccaacacctgcagaggcggcggctgctacttcggccccgacgtgaccagcaagatcctgaacaagtaccagctgaagatgctgatcagaagccacgagtgcaagcccgagggctacgagatctgccacgacggcaaggtggtgaccatcttcagcgccagcaactactacgaggagggcagcaacagaggcgcctacatcaagctgtgcagcggcaccacccccagattcttccagtaccaggtgaccaaggccacctgcttccagcccctgagacagagagtggacaccatggagaacagcgccatcaagatcctgagagagagagtgatcagcagaaagagcgacctgaccagagccttccagctgcaggaccacagaaagagcggcaagctgagcgtgagccagtgggccttctgcatggagaacatcctgggcctgaacctgccctggagaagcctgagcagcaacctggtgaacatcgaccagaacggcaacgtggagtacatgagcagcttccagaacatcagaatcgagaagcccgtgcaggaggcccacagcaccctggtggagaccctgtacagatacagaagcgacctggagatcatcttcaacgccatcgacaccgaccacagcggcctgatcagcgtggaggagttcagagccatgtggaagctgttcagcagccactacaacgtgcacatcgacgacagccaggtgaacaagctggccaacatcatggacctgaacaaggacggcagcatcgacttcaacgagttcctgaaggccttctacgtggtgcacagatacgaggacctgatgaagcccgacgtgaccaacctgggctag

SEQ ID NO: 285215 - protein, 140 aa, Artificial Sequence
  derived and/or modified sequence
MEEAGLCGLREKADMLCNSESHDILQHQDSNCSATSNKHLLEDEEGRDFITKNRSWVSPVHCTQESRRELPEQEVAPPSGQQALQCNRNKEKVLGNNLCSVVGCCHILVFLFYIFCSMSDYELGLFGGKCCLVNLFLHLV

SEQ ID NO: 285216 - protein, 131 aa, Artificial Sequence
  derived and/or modified sequence
MEEAGLCGLREKADMLCNSESHDILQHQDSNCSATSNKHLLEDEEGRDFITKNRSWVSPVHCTQESRRELPEQEVAPPSGQQALQCNRNKEKVLERQGLSLSPRLERGGTFMGHGSLKLPELVILSLQTLE

SEQ ID NO: 285217 - DNA, 543 bp, Artificial Sequence
  derived and/or modified sequence
atggaggaggccggcctgtgcggcctgagagagaaggccgacatgctgtgcaacagcgagagccacgacatcctgcagcaccaggacagcaactgcagcgccaccagcaacaagcacctgctggaggacgaggagggcagagacttcatcaccaagaacagaagctgggtgagccccgtgcactgcacccaggagagcagaagagagctgcccgagcaggaggtggccccccccagcggccagcaggccctgcagcagcaggagcagagaaagagcctgagaaagagaagcttcatcatcgacgccagccccaagcacttcagactgcagagaagaagctggcagctgagcgtgagaaacatgctgatcctggagatccacctgttctacagaagagtgtgcttcgagctgtacgacctgaagcagaacagcttcttcggcgactacggcaacatcctgaacagagagaccctgctggacttcgtgaagcagatcatggagaagatccagaacttcctgaagaaccacggcaagttcctgtag

SEQ ID NO: 285218 - DNA, 396 bp, Artificial Sequence
  derived and/or modified sequence
atggaggaggccggcctgtgcggcctgagagagaaggccgacatgctgtgcaacagcgagagccacgacatcctgcagcaccaggacagcaactgcagcgccaccagcaacaagcacctgctggaggacgaggagggcagagacttcatcaccaagaacagaagctgggtgagccccgtgcactgcacccaggagagcagaagagagctgcccgagcaggaggtggccccccccagcggccagcaggccctgcagtgcaacagaaacaaggagaaggtgctgggcaaggaggtgctgctgctgatgcaggccctgaacaccctgagcacccccgaggagaagctggccgccctgtgcaagaagtacgccgacctgggcaacagccccctgctgtag

SEQ ID NO: 285219 - DNA, 423 bp, Artificial Sequence
  derived and/or modified sequence
atggaggaggccggcctgtgcggcctgagagagaaggccgacatgctgtgcaacagcgagagccacgacatcctgcagcaccaggacagcaactgcagcgccaccagcaacaagcacctgctggaggacgaggagggcagagacttcatcaccaagaacagaagctgggtgagccccgtgcactgcacccaggagagcagaagagagctgcccgagcaggaggtggccccccccagcggccagcaggccctgcagtgcaacagaaacaaggagaaggtgctgggcaacaacctgtgcagcgtggtgggctgctgccacatcctggtgttcctgttctacatcttctgcagcatgagcgactacgagctgggcctgttcggcggcaagtgctgcctggtgaacctgttcctgcacctggtgtag

SEQ ID NO: 285220 - DNA, 513 bp, Artificial Sequence
  derived and/or modified sequence
tgaaccagctggagaagaggcgaggtgacccccagaagaggcagcggcggcggcgccaagaccatcggcgccaagcagggcagaacccagctgagcagcggcttcgtgaacagcaccatggaggaggccggcctgtgcggcctgagagagaaggccgacatgctgtgcaacagcgagagccacgacatcctgcagcaccaggacagcaactgcagcgccaccagcaacaagcacctgctggaggacgaggagggcagagacttcatcaccaagaacagaagctgggtgagccccgtgcactgcacccaggagagcagaagagagctgcccgagcaggaggtggccccccccagcggccagcaggccctgcagtgcaacagaaacaaggagaaggtgctgggcaaggaggtgctgctgctgatgcaggccctgaacaccctgagcacccccgaggagaagctggccgccctgtgcaagaagtacgccgacctgggcaacagccccctgctgtag

SEQ ID NO: 285221 - DNA, 396 bp, Artificial Sequence
  derived and/or modified sequence
atggaggaggccggcctgtgcggcctgagagagaaggccgacatgctgtgcaacagcgagagccacgacatcctgcagcaccaggacagcaactgcagcgccaccagcaacaagcacctgctggaggacgaggagggcagagacttcatcaccaagaacagaagctgggtgagccccgtgcactgcacccaggagagcagaagagagctgcccgagcaggaggtggccccccccagcggccagcaggccctgcagtgcaacagaaacaaggagaaggtgctggagagacagggcctgagcctgagccccagactggagagaggcggcaccttcatgggccacggcagcctgaagctgcccgagctggtgatcctgagcctgcagaccctggagtag

SEQ ID NO: 285222 - DNA, 543 bp, Artificial Sequence
  derived and/or modified sequence
atggaagaggccggactttgcggactccgtgagaaagccgacatgctgtgcaatagcgagtcacacgatatcctgcagcatcaggattcaaattgtagcgccactagcaacaagcacctgttggaagacgaagagggtcgcgacttcattaccaaaaatcgatcttgggtgagcccagtacactgtactcaagaatctcggagagaactacccgagcaggaggtggctccacccagcgggcaacaggccctccagcaacaagagcagaggaagtccttacgcaaacggagcttcattattgatgcaagcccaaagcactttcgactgcagcgtcgtagctggcagctctctgtccgaaatatgctcatactggagattcacttgttctatcgtagggtgtgcttcgagctgtatgatcttaagcagaacagtttttttggggactatggcaacatactgaatcgcgagacactgttggactttgtaaaacagatcatggagaaaattcagaatttcctgaagaaccacgggaagtttctctag

SEQ ID NO: 285223 - DNA, 396 bp, Artificial Sequence
  derived and/or modified sequence
atggaggaagctgggctctgtgggctccgcgagaaggccgacatgctctgtaactcggagagtcacgacatcctccagcaccaagatagcaattgctctgccacctccaacaagcacctgctggaagacgaagaaggaagggacttcattactaagaacaggagctgggtctccccagtgcattgcacccaggagagccgacgcgagcttcctgagcaagaggtcgcaccaccaagtggccagcaggccctccagtgcaatagaaataaagagaaggttttaggaaaggaggtccttcttttaatgcaagcacttaatactctcagcacacctgaagagaagctggcggccctctgcaagaaatatgctgaccttggaaacagcccactgctctag

SEQ ID NO: 285224 - DNA, 423 bp, Artificial Sequence
  derived and/or modified sequence
atggaggaggcaggactttgcggcctgcgcgaaaaggccgacatgctgtgcaatagcgagtcacatgacatcctacagcatcaagactctaactgtagcgccactagcaataagcatctgctggaagatgaagaaggccgcgactttatcaccaagaacagatcctgggtttctccagtgcactgtactcaggagagccgtcgggaactgcccgaacaagaggtcgcccccccttctggacagcaggctttgcaatgcaacaggaataaggaaaaagttctgggcaacaatctctgcagcgtggtcgggtgctgccatattttagtgttcctgttttacatattttgttcgatgtcagattacgagctcggtctgtttggaggaaagtgctgccttgtaaacctttttcttcatcttgtgtag

SEQ ID NO: 285225 - DNA, 513 bp, Artificial Sequence
  derived and/or modified sequence
tgaacgagttggagacggggagaggtcacccccagacgaggctccggaggaggtgctaaaacaattggcgccaagcaaggtcgaacccaactgtccagtggcttcgtgaactctactatggaggaagccgggctgtgcggtctgcgcgagaaggctgatatgctgtgtaattctgaatctcacgacatcctgcagcatcaggattccaactgctccgcaaccagtaacaagcacttattagaagacgaggaggggcgggactttattaccaaaaacaggagctgggtttctcctgtacactgcacccaggaatccagacgtgaacttcctgaacaagaagtggcaccaccttcggggcagcaggccctgcaatgtaatcggaataaagaaaaggtgctgggaaaggaagtgctgctgttaatgcaagctctgaatacattatctacacccgaggagaagctggccgccctgtgcaaaaagtatgccgatctcggcaactcccccctgttgtag

SEQ ID NO: 285226 - DNA, 396 bp, Artificial Sequence
  derived and/or modified sequence
atggaggaggcaggtctttgtggactacgagaaaaagccgatatgctctgcaattccgagtcccacgacatcctacagcaccaggattccaattgctccgccaccagtaataagcatctgctcgaggatgaagagggccgggacttcatcaccaagaatagatcctgggtgtctcctgttcactgcacccaggaaagtcggcgggagctgcccgaacaagaggttgccccccctagtggccagcaggctctccagtgcaaccggaataaggaaaaagtcctggaaaggcaaggactcagtctgtcacctcgactggagcgtggaggcaccttcatgggacacggatccctgaagctgccagagctcgtgatcctgtccctgcagacactggagtag

SEQ ID NO: 285227 - DNA, 543 bp, Artificial Sequence
  derived and/or modified sequence
atggaggaggccggcctgtgtggcctgcgggagaaggctgacatgctgtgcaacagcgagagccatgacatcctgcagcaccaggacagcaactgcagcgccaccagcaacaagcacctgctggaggatgaggagggccgggacttcatcaccaagaacagatcctgggtgtcccctgtgcactgcacccaggagagcagaagagagctgcctgagcaggaggtggcccctccttctggccagcaggccctgcagcagcaggagcagaggaagagcctgaggaagaggagcttcatcattgatgccagccccaagcacttccggctgcagaggaggtcctggcagctgtctgtgaggaacatgctgatcctggagatccacctgttctacagaagagtgtgctttgagctgtatgacctgaagcagaacagcttcttcggggactatggcaacatcctgaaccgggagaccctgctggactttgtgaagcagatcatggagaagatccagaacttcctgaagaaccacggcaagttcctgtag

SEQ ID NO: 285228 - DNA, 396 bp, Artificial Sequence
  derived and/or modified sequence
atggaggaggccggcctgtgtggcctgcgggagaaggctgacatgctgtgcaacagcgagagccatgacatcctgcagcaccaggacagcaactgcagcgccaccagcaacaagcacctgctggaggatgaggagggccgggacttcatcaccaagaacagatcctgggtgtcccctgtgcactgcacccaggagagcagaagagagctgcctgagcaggaggtggcccctccttctggccagcaggccctgcagtgcaacagaaacaaggagaaggtgctgggcaaggaggtgctgctgctgatgcaggccctgaacaccctgagcaccccagaggagaagctggccgccctgtgcaagaagtatgctgacctgggcaacagccccctgctgtag

SEQ ID NO: 285229 - DNA, 423 bp, Artificial Sequence
  derived and/or modified sequence
atggaggaggccggcctgtgtggcctgcgggagaaggctgacatgctgtgcaacagcgagagccatgacatcctgcagcaccaggacagcaactgcagcgccaccagcaacaagcacctgctggaggatgaggagggccgggacttcatcaccaagaacagatcctgggtgtcccctgtgcactgcacccaggagagcagaagagagctgcctgagcaggaggtggcccctccttctggccagcaggccctgcagtgcaacagaaacaaggagaaggtgctgggcaacaacctgtgcagcgtggtgggctgctgccacatcctggtgttcctgttctacatcttctgcagcatgtctgactatgagctgggcctgtttggaggcaagtgctgcctggtgaacctcttcctgcacctggtgtag

SEQ ID NO: 285230 - DNA, 513 bp, Artificial Sequence
  derived and/or modified sequence
tgaacatcctggaggagaggagaggtgaccccccggcggggcagcggcggcggggccaagaccatcggggccaagcagggccgcacccagctgagcagcggctttgtgaacagcaccatggaggaggccggcctgtgtggcctgcgggagaaggctgacatgctgtgcaacagcgagagccatgacatcctgcagcaccaggacagcaactgcagcgccaccagcaacaagcacctgctggaggatgaggagggccgggacttcatcaccaagaacagatcctgggtgtcccctgtgcactgcacccaggagagccggcgggagctgcctgagcaggaggtggccccacccagcggccagcaggccctgcagtgcaacagaaacaaggagaaggtgctgggcaaggaggtgctgctgctgatgcaggccctgaacaccctgagcaccccagaggagaagctggccgccctgtgcaagaagtatgctgacctgggcaacagccccctgctgtag

SEQ ID NO: 285231 - DNA, 396 bp, Artificial Sequence
  derived and/or modified sequence
atggaggaggccggcctgtgtggcctgcgggagaaggctgacatgctgtgcaacagcgagagccatgacatcctgcagcaccaggacagcaactgcagcgccaccagcaacaagcacctgctggaggatgaggagggccgggacttcatcaccaagaacagatcctgggtgtcccctgtgcactgcacccaggagagcagaagagagctgcctgagcaggaggtggcccctccttctggccagcaggccctgcagtgcaacagaaacaaggagaaggtgctggagcggcagggcctgagcctgagcccccggctggagcggggcggcaccttcatgggccacggcagcctgaagctgcctgagctggtgatcctgagcctgcagaccctggagtag

SEQ ID NO: 285232 - DNA, 543 bp, Artificial Sequence
  derived and/or modified sequence
atggaggaggccggcctgtgcggcctgcgggagaaggccgacatgctttgtaactcagaatctcatgatatcctgcaacatcaggatagtaactgcagtgccacttctaacaaacatctgttagaagacgaggaaggacgggattttatcaccaagaacaggtcctgggtctcccccgttcattgcacgcaagagtctcgaagagagctgccagagcaagaggtggcacccccttcgggacagcaggcactgcagcagcaagagcaacgcaaatcactgagaaagaggtccttcattatagacgcatctcccaagcattttcgccttcagcgaagatcatggcaactgtccgtcagaaacatgctgattctggagattcatctattttaccgacgtgtttgcttcgagctttatgatttgaagcagaacagcttcttcggagattacgggaacatcctaaatcgagagactttgttggattttgttaagcagatcatggaaaaaattcagaattttctgaagaatcatgggaagttcttgtag

SEQ ID NO: 285233 - DNA, 396 bp, Artificial Sequence
  derived and/or modified sequence
atggaggaggccggcctgtgcggcctgcgggagaaggccgacatgctttgtaactccgagtctcacgatatcctccagcatcaagactccaattgttccgccacctccaataagcacctcctcgaagatgaggaaggcagagattttattacgaagaacaggagctgggtgtcccccgtgcattgtacccaggagtctagaagagaactgcctgagcaggaggtggcaccaccttcgggccagcaggccctccagtgcaacaggaataaagagaaagtgctcggaaaggaggtcctgcttcttatgcaggccttaaatactctgtctaccccagaggagaagttggcggccctgtgcaaaaagtatgccgatctgggcaacagtccccttttgtag

SEQ ID NO: 285234 - DNA, 423 bp, Artificial Sequence
  derived and/or modified sequence
atggaggaggccggcctgtgcggcctgcgggagaaggccgacatgttgtgcaattccgaatcacacgacattctgcaacaccaggacagtaactgctccgccacaagtaacaagcacctgcttgaggacgaggagggacgggacttcatcaccaaaaacagatcgtgggtctcacctgtccattgtacccaggagtctcggagggaactgcctgagcaggaggtggcacccccaagcggtcagcaggctcttcagtgtaatcggaataaagaaaaggtgttgggaaacaatctctgttccgtggtcggttgttgtcacatcctggtgttcctcttttacattttttgcagcatgagtgattacgaactgggcctttttggaggcaagtgctgtctcgtaaacctttttcttcacctcgtttag

SEQ ID NO: 285235 - DNA, 513 bp, Artificial Sequence
  derived and/or modified sequence
tgaaccagctggcggcggggcgaggtgaccccccggcggggcagcggagggggcgccaagacaatcggcgcgaagcagggaaggacgcaactctcaagcgggtttgtcaacagtaccatggaggaagcgggcctgtgtggacttcgcgagaaagcggatatgctatgtaattcggagagtcatgacatcctgcagcaccaggactccaactgctccgcgacttccaacaagcatctcctcgaggacgaggaaggccgggacttcattacaaagaatagaagttgggttagtcccgttcattgcacacaggaatcccgacgggagctgcccgaacaggaggtcgcacctccctcaggccagcaagcgctccaatgcaatagaaacaaagagaaagtgctgggaaaggaagttcttctgctgatgcaggcgcttaacacgctcagcacaccagaggagaaactggcggctctctgcaagaagtacgcagacctcggaaactcacccctcttgtag

SEQ ID NO: 285236 - DNA, 396 bp, Artificial Sequence
  derived and/or modified sequence
atggaggaggccggcctgtgcggcctgcgggagaaggccgacatgctgtgtaactctgagtcacacgatatcctgcaacatcaggacagcaattgcagcgctacttcgaacaagcatttactggaagacgaggaggggcgggatttcattactaaaaacagatcgtgggtctcaccagtgcattgtactcaggagagtagacgcgaacttccagaacaagaggttgctcctccaagtggacaacaggctctgcagtgtaatcggaacaaggaaaaagtacttgaaaggcagggattgagtctatccccgaggttggagcgcggcggtaccttcatggggcacggctctctgaaattgcccgaactagtcatcttatcgctacagacgctggaatag

SEQ ID NO: 285237 - DNA, 543 bp, Artificial Sequence
  derived and/or modified sequence
atggaggaggcgggactctgcggactgagagagaaggcagacatgctttgcaattcagaaagccatgacatattgcagcaccaggacagtaactgctcggctactagcaataaacatctcttagaggatgaagagggaagggactttatcacaaagaatcgctcttgggtcagccccgtgcattgcacacaggagtcccggcgagaactgccagagcaggaggtcgcccctccaagtgggcagcaggccctgcagcagcaggagcagcggaaatccctgaggaaacggtcgttcatcatcgacgcgagcccaaaacattttcgcctgcaacgccgttcctggcaactgagtgtgagaaacatgttgatcctggagatacatttattttacagaagagtgtgctttgagctgtacgatctcaagcagaacagcttctttggagactacggaaatattctcaatcgagaaactctcctggattttgtgaagcaaattatggaaaaaatacaaaacttcctgaaaaaccacgggaagtttctgtag

SEQ ID NO: 285238 - DNA, 396 bp, Artificial Sequence
  derived and/or modified sequence
atggaagaggccggattgtgcggactgagagagaaggccgatatgttgtgcaattcagaaagccatgatatcctccagcaccaagatagcaactgcagtgctacatccaataaacacctgctcgaggatgaggaaggacgggactttatcaccaagaacagatcctgggtttcccccgtgcactgtacacaagaatcaaggagggaattacctgaacaagaagtggccccacccagtggtcagcaggctctacaatgcaatcgaaacaaagagaaggtgttgggtaaagaggtgctcctcttgatgcaggcgctgaacaccctgagtacaccggaggagaagttagcagccctttgcaagaagtacgccgatctcggcaacagtcctctgctgtag

SEQ ID NO: 285239 - DNA, 423 bp, Artificial Sequence
  derived and/or modified sequence
atggaagaagcgggtctctgtggtcttcgtgagaaggctgatatgctgtgcaattccgagtctcatgacattctccagcaccaggacagtaattgttctgccacaagtaataagcacttattggaggatgaggaaggccgagactttatcacaaagaacaggagctgggtgagccctgtccactgcacccaagagagccgcagggaacttccggaacaagaggtggcccctccatccgggcagcaggctttacagtgcaaccgaaacaaggaaaaagtactcggaaataatttatgctctgttgtggggtgttgccatattctcgtctttctcttttatatcttttgtagcatgtctgactacgagctaggattgtttggcggtaagtgctgcctggtgaatttatttctccatttagtgtag

SEQ ID NO: 285240 - DNA, 513 bp, Artificial Sequence
  derived and/or modified sequence
tgaaccagttggcggcgtggggaagtcacaccccgtcggggatccggtgggggtgctaaaactattggtgccaaacagggcagaacacagttatccagcggcttcgttaactccactatggaggaggcagggctgtgtggcctccgggagaaggccgacatgttatgcaactctgagagccacgatatcttgcagcaccaggattccaactgtagcgccacttcgaacaaacatctactggaagatgaagagggcagagacttcatcaccaagaaccgaagctgggtctcacccgtgcattgtacacaggagtctagacgagaactgcccgagcaggaagtggcgcctcctagtggccagcaggccctgcagtgcaatcgaaacaaggaaaaggtgctcggaaaagaagtgctcctattgatgcaggcattaaatacgctctccactcccgaggagaaactggccgcactgtgcaagaaatacgccgacctggggaactccccattactgtag

SEQ ID NO: 285241 - DNA, 396 bp, Artificial Sequence
  derived and/or modified sequence
atggaagaggcaggtctgtgtggtctgcgcgaaaaagccgatatgctttgtaactctgaatcccatgatatactgcagcaccaggactccaactgttctgctacatccaataagcacctgctggaggatgaggagggacgggattttattacaaaaaacagatcctgggtctcccccgtgcactgtacccaggaatcacggagggagctccctgagcaagaggtcgcacctcctagcggacagcaagctctacagtgcaacagaaacaaggagaaggtcttagaacggcagggcttgagcctgtcccctcgcttggaaaggggtggaacctttatgggtcacgggagcctcaagctgcccgaactggtcatactgtccctgcagacgctcgagtag

SEQ ID NO: 285242 - DNA, 864 bp, Artificial Sequence
  derived and/or modified sequence
cgtgagggtactctgccggttttgctgcggaagtcacctcgtggcgtaggggagaggtaacaccgagaagaggcagcggcggtggcgccaagacgattggtgccaaacagggcagaacgcaactcagctctgggtttgtgaatagcacaatggaagaagctggactttgtgggttaagagagaaagcagatatgttgtgtaactctgaatcacatgatattcttcaacatcaagactcaaattgcagtgccacaagtaataaacatttattggaagatgaagaaggccgtgactttataacaaagaacaggagttgggtgagcccagtgcactgcacacaagagtcaagaagggagcttcctgagcaagaagtagcccctccgtctggtcagcaagctttacaatgcaacaggaacaaagaaaaagtcttaggaaaagaagttttattattgatgcaagccctaaacactctttcgactccagaggagaagctggcagctctctgtaagaaatatgctgatcttggaaattcacctcttctatagaagagtttgttttgaactatacgatttgaaacaaaattctttttttggagactatggaaacattctcaacagggaaaccctactagactttgtaaagcaaataatggaaaagatacagaactttttgaagaatcatgggaaatttttataattaaataaatgctaaaattctgttttgtgaaacatttatgggaattatcactgacagtttttgtacactttcaaatagtgttaaagcagcaactccatgttgtaaatgcacaaaacaaatatttagttaataatcaactccaagaataaagctgtaacaataatagtt

SEQ ID NO: 285243 - DNA, 832 bp, Artificial Sequence
  derived and/or modified sequence
tcacctcgtggcgtaggggagaggtaacaccgagaagaggcagcggcggtggcgccaagacgattggtgccaaacagggcagaacgcaactcagctctgggtttgtgaatagcacaatggaagaagctggactttgtgggttaagagagaaagcagatatgttgtgtaactctgaatcacatgatattcttcaacatcaagactcaaattgcagtgccacaagtaataaacatttattggaagatgaagaaggccgtgactttataacaaagaacaggagttgggtgagcccagtgcactgcacacaagagtcaagaagggagcttcctgagcaagaagtagcccctccgtctggtcagcaagctttacaatgcaacaggaacaaagaaaaagtcttaggaaaagaagttttattattgatgcaagccctaaacactctttcgactccagaggagaagctggcagctctctgtaagaaatatgctgatcttggaaattcacctcttctatagaagagtttgttttgaactatacgatttgaaacaaaattctttttttggagactatggaaacattctcaacagggaaaccctactagactttgtaaagcaaataatggaaaagatacagaactttttgaagaatcatgggaaatttttataattaaataaatgctaaaattctgttttgtgaaacatttatgggaattatcactgacagtttttgtacactttcaaatagtgttaaagcagcaactccatgttgtaaatgcacaaaacaaatatttagttaataatcaactccaagaataaagctgtaacaataatagtta

SEQ ID NO: 285244 - DNA, 2016 bp, Artificial Sequence
  derived and/or modified sequence
gtagctgcagctgcgcattgcacccccagctacgcagtctcctttccttctcagtcacaggaccggatggcaagtggccgcagccagtcggtgagaccgactgagctctggggcttcagttcttgacgctacctacatggctacatctccagccaaggatgagaggatgcagaaataatatttgtgttgttttaaaaatcttagatcaattaaaaagaaaaatgactctgtcattctttgtttgtgaatagcacaatggaagaagctggactttgtgggttaagagagaaagcagatatgttgtgtaactctgaatcacatgatattcttcaacatcaagactcaaattgcagtgccacaagtaataaacatttattggaagatgaagaaggccgtgactttataacaaagaacaggagttgggtgagcccagtgcactgcacacaagagtcaagaagggagcttcctgagcaagaagtagcccctccgtctggtcagcaagctttacaatgcaacaggaacaaagaaaaagtcttagagagacaaggtctttccctgtcacccaggctggagcgcggtggtacattcatgggtcatggcagccttaaactccctgagctcgtgatcctgtctcttcagactctagagtagctggggctacaggcgtacaccaccacacatggctaattttttatttttcttttgttgtagagatgggctgtcattctcttgcccaggctggtcttggtatactgtcctgtagcagtatattttggctacctgtactggcattggcttttccaagtgtcaagattacaggtgtgagctagtataccctgcccagtgtttctttcttacttggctttggtgtgaatgagaaaagaatttagtactaaaattttatgtgcatacagaagcattatttgaagtcagcctgttttccctcaacctctagtactctgtaaagtataccaaaagtcaaggttttaaagaactgtgttacatattagagagaacaaatcaaaagttacctatctccatcgttaccagtagaacattagtatgtattttgaagcaccatttgactctttctatttcagctacttgcttgtcccttgcaaagttattatagtactcttttaaaacttttcttcaagggaagagctattttgacttccttttctttgatctaaacctaacacccagaatatgcttagcagatcatcccaaaacaatcataacttgtttaaattgttcatagcaaaagttacatattataaagagttatgagtgtcttaggcagtgaatagtaactgaatatccttttatagttgtccttcactagcaggaagccttattccctgcccttttacatatcttaacttagaatgttactgtctaaatagtggttaggcaagagtagttcttaaacgtgcagtaattatcttgcactacatttaagggctaaatagctagtagtggtgcttgataattgaagaaatttgtacagctggaggaagtacctgctaaattttcaaaagttacctgaatttaataggtaaatctgtttttaattagagctatatcattttactctgaatgtcttaacatagaagtttacataaaatttacagattggattgatttcagccttcttctggtactttttaaaatcttattaatcattaggaaaagaagttttattattgatgcaagccctaaacactctttcgactccagaggagaagctggcagctctctgtaagaaatatgctgatcttgtgagtatttatttaatggagcaaggaacacagaaaataaaatctatgtgtgcttgataagatttttaaatattattttgatgtaactttaaatgtaaaatgatattttatctcaaaattgaaaacaatctcctttctttagtacttatgattggtgtgtgtgacttcatcttatgaaatgatgtatagaacataataatacttttttaaatgtgaaataaatttcctaaaactt

SEQ ID NO: 285245 - protein, 77 aa, Artificial Sequence
  derived and/or modified sequence
MKAPGLAQAAVAEETPDWAPELCPSSEARSPEPPANRLQDFDTLVTVGKQLEAICVKKNVDLLARMQRRERLLIRCW

SEQ ID NO: 285246 - DNA, 234 bp, Artificial Sequence
  derived and/or modified sequence
atgaaggcccccggcctggcccaggccgccgtggccgaggagacccccgactgggcccccgagctgtgccccagcagcgaggccagaagccccgagccccccgccaacagactgcaggacttcgacaccctggtgaccgtgggcaagcagctggaggccatctgcgtgaagaagaacgtggacctgctggccagaatgcagagaagagagagactgctgatcagatgctggtag

SEQ ID NO: 285247 - DNA, 234 bp, Artificial Sequence
  derived and/or modified sequence
atgaaagcccccggactagcccaggccgccgtggccgaggagacccccgattgggctcctgagctttgcccctcatccgaggcacgaagccctgaaccgccggccaaccggctgcaagatttcgataccctggttactgtgggaaagcagcttgaagcaatctgcgtgaagaaaaacgtggatctccttgctaggatgcagaggagagagaggttgctgatcaggtgctggtag

SEQ ID NO: 285248 - DNA, 234 bp, Artificial Sequence
  derived and/or modified sequence
atgaaggcccctggcctggcccaggccgctgtggccgaggagaccccagactgggcccctgagctgtgccccagcagcgaggcccggagccctgagcccccagccaaccggctgcaggactttgacaccctggtgacagtgggcaagcagctggaggccatctgtgtgaagaagaatgtggacctgctggccaggatgcagaggcgggagcggctgctgatccgctgctggtag

SEQ ID NO: 285249 - DNA, 856 bp, Artificial Sequence
  derived and/or modified sequence
gcgcagggcccccgcctggctctacaagcccgggccgcggcccccgccttccccgccgcctcccggcgctccgtgcccgccccacgaggccggcggctgctgctacctggggccgttgctgcttgtgccgtgagcgacggccagccattgtccccgccgctccgtcagccgcgcccggccgcgcgcgcaccggaaggcgcattggcgtcttgcgggctccgggccgggtgggcaggatggcctccacaagccgcatggcgcgcatggggagcctccgttgatgccgccgcgccgccctccgaggctgcatccgcggaagcccggctccccgagcgctccggcccggcccggcgccccggacctgagtgcgtccccatgaaggcgcccgggctggcccaggcggccgtggcagaggagaccccggactgggcgcccgagctctgccccagctccgaggcgcggtcgccggagccgcctgccaaccgccttcaagacttcgacacgctggtcaccgtgggaaagcaactagaagccatttgtgtcaagaaaaacgttgacctcttggcgagaatgcaaagaagggaacgcttgcttatacgctgttggtgaactgtcacccctacaactcagcttgcaaccagccctggccaccagtttccccacactgagctgaatatcggacatgcccatctcagacattccagcccattctgaaattccacatcgattcacctgacaaagtctgaagttccagggcaatttatctggaaaagcttacctggaatcacgtgtcatttcaaccaacaactgttgaagaggacgtggcattaaaaccaagggtatcaattatttataa

SEQ ID NO: 285250 - DNA, 234 bp, Artificial Sequence
  derived and/or modified sequence
atgaaggcccccggcctggcccaggccgccgtggccgaggagaccccggactgggcaccagagctgtgcccctcctccgaagccagatcacctgaacctcccgcaaaccggctacaagactttgacacgctcgtgactgtcgggaaacaattggaggcgatatgcgtgaagaagaacgtagatctgctggcccggatgcaaaggcgagaacgcctgctgatacggtgctggtag

SEQ ID NO: 285251 - DNA, 234 bp, Artificial Sequence
  derived and/or modified sequence
atgaaagccccaggccttgcccaggccgctgtagccgaggagactccggactgggctcccgaattgtgtccgagtagtgaggcacggtcgccggagccccctgccaatcgactgcaggatttcgatactttggtcacagtgggcaagcaactcgaggcaatctgtgtcaaaaaaaatgtggacctgttggcacgaatgcagcggagagagcgattattgatcaggtgttggtag

SEQ ID NO: 285252 - protein, 711 aa, Artificial Sequence
  derived and/or modified sequence
MDEPMGEEEINPQTEEVSIKEIAITHHVKEGHEKADPSQFELLKVLGQGSFGKVFLVKKISGSDARQLYAMKVLKKATLKVRDRVRTKMERDILVEVNHPFIVKLHYAFQTEGKLYLILDFLRGGDLFTRLSKEVMFTEEDVKFYLAELALALDHLHSLGIIYRDLKPENILLDEEGHIKLTDFGLSKESIDHEKKAYSFCGTVEYMAPEVVNRRGHTQSADWWSFGVLMFEMLTGTLPFQGKDRKETMTMILKAKLGMPQFLSPEAQSLLRMLFKRNPANRLGAGPDGVEEIKRHSFFSTIDWNKLYRREIHPPFKPATGRPEDTFYFDPEFTAKTPKDSPGIPPSANAHQLFRGFSFVAITSDDESQAMQTVGVHSIVQLHRNSIQFTDGYEVKEDIGVGSYSVCKRCIHKATNMEFAVKIIDKSKRDPTEEIEILLRYGQHPNIITLKDVYDDGKYVYVVTELMKGGELLDKILRQKFFSEREASAVLFTITKTVEYLHAQGVVHRDLKPSNILYVDESGNPESIRICDFGFAKQLRAENGLLMTPCYTANFVAPEVLKRQGYDAACDIWSLGVLLYTMLTGYTPFANGPDDTPEEILARIGSGKFSLSGGYWNSVSDTAKDLVSKMLHVDPHQRLTAALVLRHPWIVHWDQLPQYQLNRQDAPHLVKGAMAATYSALNRNQSPVLEPVGRSTLAQRRGIKKITSTAL

SEQ ID NO: 285253 - DNA, 530 bp, Artificial Sequence
  derived and/or modified sequence
gggggggaagatgccgctggcgcagctggcggacccgtggcagaagatggctgtggagagcccgtccgacagcgctgaggataaatgaggagctgattcttaatcctgtcacattgaatggacagcaaattatggatgaacctatgggagaggaggagattaacccacaaactgaagaagtcagtatcaaagaaattgcaatcacacatcatgtaaaggaaggacatgaaaaggcagatccttcccagtttgaacttttaaaagtattagggcagggatcatttggaaaggttttcttagttaaaaaaatctcaggctctgatgctaggcagctttatgccatgaaggtattgaagaaggccacactgaaagttcgagaccgagttcggacaaaaatggaacgtgatatcttggtagaggttaatcatccttttattgtcaagttgcattatgcttttcaaactgaagggaagttgtatcttattttggattttctcaggggaggagatttgtttacacgcttatccaaa

SEQ ID NO: 285254 - DNA, 2425 bp, Artificial Sequence
  derived and/or modified sequence
aggattatatctttatccttgaaatttaaaaacatttgccaggacatgtcttggtgttgatgatctctgttgaaccttctcagtctccagtctcaggataaatgaggagctgattcttaatcctgtcacattgaatggacagcaaattatggatgaacctatgggagaggaggagattaacccacaaactgaagaagtcagtatcaaagaaattgcaatcacacatcatgtaaaggaaggacatgaaaaggcagatccttcccagtttgaacttttaaaagtattagggcagggatcatttggaaaggttttcttagttaaaaaaatctcaggctctgatgctaggcagctttatgccatgaaggtattgaagaaggccacactgaaagttcgagaccgagttcggacaaaaatggaacgtgatatcttggtagaggttaatcatccttttattgtcaagttgcattatgcttttcaaactgaagggaagttgtatcttattttggattttctcaggggaggagatttgtttacacgcttatccaaagaggtgatgttcacagaagaagatgtcaaattctacttggctgaacttgcacttgctttagaccatctacatagcctgggaataatttatagagacttaaaaccagaaaatatacttcttgatgaagaaggtcacatcaagttaacagatttcggcctaagtaaagagtctattgaccatgaaaagaaggcatattctttttgtggaactgtggagtatatggctccagaagtagttaatcgtcgaggtcatactcagagtgctgactggtggtcttttggtgtgttaatgtttgaaatgcttactggtacactccctttccaaggaaaagatcgaaaagaaacaatgactatgattcttaaagccaaacttggaatgccacagtttttgagtcctgaagcgcagagtcttttacgaatgcttttcaagcgaaatcctgcaaacagattaggtgcaggaccagatggagttgaagaaattaaaagacattcatttttctcaacgatagactggaataaactgtatagaagagaaattcatccgccatttaaacctgcaacgggcaggcctgaagatacattctattttgatcctgagtttactgcaaaaactcccaaagattcacctggcattccacctagtgctaatgcacatcagctttttcgggggtttagttttgttgctattacctcagatgatgaaagccaagctatgcagacagttggtgtacattcaattgttcagttacacaggaacagtattcagtttactgatggatatgaagtaaaagaagatattggagttggctcctactctgtttgcaagagatgtatacataaagctacaaacatggagtttgcagtgaagattattgataaaagcaagagagacccaacagaagaaattgaaattcttcttcgttatggacagcatccaaacattatcactctaaaggatgtatatgatgatggaaagtatgtgtatgtagtaacagaacttatgaaaggaggtgaattgctggataaaattcttagacaaaaatttttctctgaacgagaggccagtgctgtcctgttcactataactaaaaccgttgaatatcttcacgcacaaggggtggttcatagagacttgaaacctagcaacattctttatgtggatgaatctggtaatccggaatctattcgaatttgtgattttggctttgcaaaacagctgagagcggaaaatggtcttctcatgactccttgttacactgcaaattttgttgcaccagaggttttaaaaagacaaggctatgatgctgcttgtgatatatggagtcttggtgtcctactctatacaatgcttaccggttacactccatttgcaaatggtcctgatgatacaccagaggaaatattggcacgaataggtagcggaaaattctcactcagtggtggttactggaattctgtttcagacacagcaaaggacctggtgtcaaagatgcttcatgtagaccctcatcagagactgactgctgctcttgtgctcagacatccttggatcgtccactgggaccaactgccacaataccaactaaacagacaggatgcaccacatctagtaaagggtgccatggcagctacatattctgctttgaaccgtaatcagtcaccagttttggaaccagtaggccgctctactcttgctcagcggagaggtattaaaaaaatcacctcaacagccctgtgaagtgacctcagtgagatatttggtaccatggtgtaagctgatagcacaagttctggcgacaggtagcacgtatctgagagacacctgcaagcacacactgtcccagctggtacccataatgctgctgttcctgctgctgct

SEQ ID NO: 285255 - protein, 710 aa, Artificial Sequence
  derived and/or modified sequence
MFKFLSFRVRSIQEEVSIKEIAITHHVKEGHEKADPSQFELLKVLGQGSFGKVFLVKKISGSDARQLYAMKVLKKATLKVRDRVRTKMERDILVEVNHPFIVKLHYAFQTEGKLYLILDFLRGGDLFTRLSKEVMFTEEDVKFYLAELALALDHLHSLGIIYRDLKPENILLDEEGHIKLTDFGLSKESIDHEKKAYSFCGTVEYMAPEVVNRRGHTQSADWWSFGVLMFEMLTGTLPFQGKDRKETMTMILKAKLGMPQFLSPEAQSLLRMLFKRNPANRLGAGPDGVEEIKRHSFFSTIDWNKLYRREIHPPFKPATGRPEDTFYFDPEFTAKTPKDSPGIPPSANAHQLFRGFSFVAITSDDESQAMQTVGVHSIVQLHRNSIQFTDGYEVKEDIGVGSYSVCKRCIHKATNMEFAVKIIDKSKRDPTEEIEILLRYGQHPNIITLKDVYDDGKYVYVVTELMKGGELLDKILRQKFFSEREASAVLFTITKTVEYLHAQGVVHRDLKPSNILYVDESGNPESIRICDFGFAKQLRAENGLLMTPCYTANFVAPEVLKRQGYDAACDIWSLGVLLYTMLTGYTPFANGPDDTPEEILARIGSGKFSLSGGYWNSVSDTAKDLVSKMLHVDPHQRLTAALVLRHPWIVHWDQLPQYQLNRQDAPHLVKGAMAATYSALNRNQSPVLEPVGRSTLAQRRGIKKITSTAL

SEQ ID NO: 285256 - protein, 227 aa, Artificial Sequence
  derived and/or modified sequence
MFKFLSFRVRSIQEEVSIKEIAITHHVKEGHEKADPSQFELLKVLGQGSFGKVFLVKKISGSDARQLYAMKVLKKATLKVRDRVRTKMERDILVEVNHPFIVKLHYAFQTEGKLYLILDFLRGGDLFTRLSKEVMFTEEDVKFYLAELALALDHLHSLGIIYRDLKPENILLDEEGHIKLTDFGLSKESIDHEKKAYSFCGTVEYMAPEVVNRRGHTQSADWWSFGV

SEQ ID NO: 285257 - DNA, 2133 bp, Artificial Sequence
  derived and/or modified sequence
atgttcaagttcctgagcttcagagtgagaagcatccaggaggaggtgagcatcaaggagatcgccatcacccaccacgtgaaggagggccacgagaaggccgaccccagccagttcgagctgctgaaggtgctgggccagggcagcttcggcaaggtgttcctggtgaagaagatcagcggcagcgacgccagacagctgtacgccatgaaggtgctgaagaaggccaccctgaaggtgagagacagagtgagaaccaagatggagagagacatcctggtggaggtgaaccaccccttcatcgtgaagctgcactacgccttccagaccgagggcaagctgtacctgatcctggacttcctgagaggcggcgacctgttcaccagactgagcaaggaggtgatgttcaccgaggaggacgtgaagttctacctggccgagctggccctggccctggaccacctgcacagcctgggcatcatctacagagacctgaagcccgagaacatcctgctggacgaggagggccacatcaagctgaccgacttcggcctgagcaaggagagcatcgaccacgagaagaaggcctacagcttctgcggcaccgtggagtacatggcccccgaggtggtgaacagaagaggccacacccagagcgccgactggtggagcttcggcgtgctgatgttcgagatgctgaccggcaccctgcccttccagggcaaggacagaaaggagaccatgaccatgatcctgaaggccaagctgggcatgccccagttcctgagccccgaggcccagagcctgctgagaatgctgttcaagagaaaccccgccaacagactgggcgccggccccgacggcgtggaggagatcaagagacacagcttcttcagcaccatcgactggaacaagctgtacagaagagagatccacccccccttcaagcccgccaccggcagacccgaggacaccttctacttcgaccccgagttcaccgccaagacccccaaggacagccccggcatcccccccagcgccaacgcccaccagctgttcagaggcttcagcttcgtggccatcaccagcgacgacgagagccaggccatgcagaccgtgggcgtgcacagcatcgtgcagctgcacagaaacagcatccagttcaccgacggctacgaggtgaaggaggacatcggcgtgggcagctacagcgtgtgcaagagatgcatccacaaggccaccaacatggagttcgccgtgaagatcatcgacaagagcaagagagaccccaccgaggagatcgagatcctgctgagatacggccagcaccccaacatcatcaccctgaaggacgtgtacgacgacggcaagtacgtgtacgtggtgaccgagctgatgaagggcggcgagctgctggacaagatcctgagacagaagttcttcagcgagagagaggccagcgccgtgctgttcaccatcaccaagaccgtggagtacctgcacgcccagggcgtggtgcacagagacctgaagcccagcaacatcctgtacgtggacgagagcggcaaccccgagagcatcagaatctgcgacttcggcttcgccaagcagctgagagccgagaacggcctgctgatgaccccctgctacaccgccaacttcgtggcccccgaggtgctgaagagacagggctacgacgccgcctgcgacatctggagcctgggcgtgctgctgtacaccatgctgaccggctacacccccttcgccaacggccccgacgacacccccgaggagatcctggccagaatcggcagcggcaagttcagcctgagcggcggctactggaacagcgtgagcgacaccgccaaggacctggtgagcaagatgctgcacgtggacccccaccagagactgaccgccgccctggtgctgagacacccctggatcgtgcactgggaccagctgccccagtaccagctgaacagacaggacgccccccacctggtgaagggcgccatggccgccacctacagcgccctgaacagaaaccagagccccgtgctggagcccgtgggcagaagcaccctggcccagagaagaggcatcaagaagatcaccagcaccgccctgtag

SEQ ID NO: 285258 - DNA, 684 bp, Artificial Sequence
  derived and/or modified sequence
atgttcaagttcctgagcttcagagtgagaagcatccaggaggaggtgagcatcaaggagatcgccatcacccaccacgtgaaggagggccacgagaaggccgaccccagccagttcgagctgctgaaggtgctgggccagggcagcttcggcaaggtgttcctggtgaagaagatcagcggcagcgacgccagacagctgtacgccatgaaggtgctgaagaaggccaccctgaaggtgagagacagagtgagaaccaagatggagagagacatcctggtggaggtgaaccaccccttcatcgtgaagctgcactacgccttccagaccgagggcaagctgtacctgatcctggacttcctgagaggcggcgacctgttcaccagactgagcaaggaggtgatgttcaccgaggaggacgtgaagttctacctggccgagctggccctggccctggaccacctgcacagcctgggcatcatctacagagacctgaagcccgagaacatcctgctggacgaggagggccacatcaagctgaccgacttcggcctgagcaaggagagcatcgaccacgagaagaaggcctacagcttctgcggcaccgtggagtacatggcccccgaggtggtgaacagaagaggccacacccagagcgccgactggtggagcttcggcgtgtag

SEQ ID NO: 285259 - DNA, 2133 bp, Artificial Sequence
  derived and/or modified sequence
atgttcaagttcctgtcttttcgagtgcggagcattcaagaggaggtaagcataaaagagatagccattacccaccatgtgaaagaagggcatgagaaagccgatccaagtcagtttgagctactgaaggtgctgggccaggggtctttcgggaaagtattcctggtaaaaaaaatttccggcagcgatgcccgccagctctatgcgatgaaggttctcaaaaaagccactttgaaggtaagagatcgcgtcagaacaaaaatggagcgcgatattctcgtggaggttaaccacccatttatcgtgaagctacactacgcttttcagaccgagggtaagttgtatctgattttggacttccttcggggtggagacctgtttacgcggttgagcaaggaggttatgttcacagaggaagatgtcaagttctacctcgcggaactggcgttggcgctcgaccacctccactccctgggtataatctaccgggaccttaagcctgagaacattttactcgacgaagagggacatatcaagttaaccgacttcggactttccaaggagtctatcgatcacgagaagaaggcgtattccttctgcgggacagtcgagtacatggcgcctgaggtggtgaatcggcgtgggcacacccaaagtgcagattggtggagcttcggggtactgatgttcgagatgctaacaggcaccttgccttttcagggaaaggaccggaaggaaaccatgacaatgatcctgaaggccaagctcggcatgccccagtttctaagcccagaggcacagtctcttttgcgcatgctgttcaagaggaatccggcaaataggttgggtgccggacccgatggcgtcgaagaaatcaagagacactcctttttttccactatcgactggaacaaattatacagacgggaaatccatccccctttcaagccggccacaggacgacctgaagacaccttctacttcgatccggagtttaccgccaaaaccccaaaggatagccctgggattcctcctagtgcaaatgcccatcagttatttcgtggtttttcctttgttgcaattacatctgacgatgagagccaagccatgcagactgtcggggtgcacagcatagttcagctgcatcgaaactctattcagtttacggacgggtatgaagtcaaggaggatatcggtgtggggagctattctgtgtgtaaacgatgtatccacaaagccactaatatggagtttgccgttaagattatcgacaagagcaagcgtgatcccaccgaggaaatcgaaatactgttgcgttacggacaacatcctaacatcatcactcttaaagatgtgtatgacgatggcaaatatgtgtatgtcgtcaccgagctgatgaagggcggcgagctacttgataaaatcctccgtcaaaaattcttttccgagagggaggcatcagctgtgctcttcaccatcaccaagacagtggagtacctccacgcccagggggtggtacatagagatctcaaacctagcaatatcctgtatgtggacgagtctggtaacccagaatctatacgaatttgtgattttggcttcgccaagcaactccgggccgagaacggccttctgatgaccccctgctacactgctaactttgtggccccagaggtgctgaagcgacagggttacgacgcagcgtgtgatatctggtctcttggtgttctactgtatactatgttgacagggtatactccctttgcaaatggaccagacgatacacctgaggagattcttgcaagaataggcagtggcaagttctcccttagcggaggctactggaattccgtctctgacaccgccaaggacttggtgtcaaaaatgctacatgtcgatcctcatcagcgactgaccgctgcccttgtcctccggcacccttggatcgtccactgggatcagctgcctcagtaccaactcaaccggcaggacgccccgcacctggtaaagggggcaatggccgctacttatagcgcgctgaatcgcaaccaaagcccggtattggagcctgtggggagaagcacattggcacagcgcaggggcatcaaaaagataacctcaaccgctctctag

SEQ ID NO: 285260 - DNA, 684 bp, Artificial Sequence
  derived and/or modified sequence
atgttcaaattcctttctttcagagtcagatcaatccaggaagaggtatccatcaaggaaatagccattactcatcacgtcaaagagggccatgaaaaggctgatccctcgcagttcgaactgctgaaagtgctagggcagggctctttcggcaaagttttcctcgtaaagaaaattagcggctctgatgcaagacaactttacgccatgaaagtcctgaagaaggcaacactgaaggtccgggatcgagtgaggaccaagatggagagagatattctcgtggaggtgaatcaccctttcattgtcaagctccactatgcatttcagacggaaggaaagctgtacttaatcctggacttccttcgcgggggggatctgtttacgcggctatcaaaagaggtgatgttcaccgaggaggatgtaaagttttaccttgccgagctggccctggccctggaccatcttcattctttgggcataatatatagggatctgaaacctgagaacattctgctggatgaggaaggacacatcaaactgactgattttggcctaagcaaggaaagtatcgatcatgagaaaaaggcatactccttttgtgggaccgtggagtacatggcaccagaagtggtgaacaggcgcggccatacccagtccgcagactggtggtcattcggcgtctag

SEQ ID NO: 285261 - DNA, 2133 bp, Artificial Sequence
  derived and/or modified sequence
atgttcaagttcctgtccttccgggtgcgcagcatccaggaggaggtgtccatcaaggagatcgccatcacccaccacgtgaaggagggccacgagaaggctgaccccagccagtttgagctgctgaaggtgctgggccagggcagctttgggaaggtgttcctggtgaagaagatcagcggcagtgatgcccggcagctgtatgccatgaaggtgctgaagaaggccaccctgaaggtgcgggacagagtgaggaccaagatggagcgggacatcctggtggaggtgaaccaccccttcatcgtgaagctgcactacgccttccagacagagggcaagctgtacctgatcctggacttcctgcggggcggggacctcttcacccggctgagcaaggaggtgatgttcacagaagaagatgtgaagttctacctggccgagctggccctggccctggaccacctgcacagcctgggcatcatctacagagacctgaagccagagaacatcctgctggatgaggagggccacatcaagctgacagactttggcctgagcaaggagagcattgaccacgagaagaaggcctacagcttctgtggcaccgtggagtacatggcccctgaggtggtgaacagaagaggccacacccagagcgctgactggtggagctttggagtgctgatgtttgagatgctgaccggcaccctgcccttccagggcaaggacaggaaggagaccatgaccatgatcctgaaggccaagctgggcatgccccagttcctgagccctgaggcccagagcctgctgaggatgctgttcaagaggaacccagccaaccggctgggcgccggcccagatggagtggaggagatcaagaggcacagcttcttcagcaccatcgactggaacaagctgtaccgccgggagatccacccccccttcaagccagccaccggccggcctgaggacaccttctactttgatcctgagttcaccgccaagacccccaaggacagccctggcatcccccccagcgccaatgcccaccagctgttccggggcttctcctttgtggccatcaccagtgatgatgagagccaggccatgcagacagtgggcgtgcacagcatcgtgcagctgcacagaaattccatccagttcacagatggctatgaggtgaaggaggacatcggcgtgggcagctacagcgtgtgcaagcgctgcatccacaaggccaccaacatggagtttgctgtgaagatcatcgacaagagcaagagggaccccacagaggagattgagatcctgctgcgctatggccagcaccccaacatcatcaccctgaaggatgtgtatgatgatggcaagtatgtgtatgtggtgacagagctgatgaagggcggggagctgctggacaagatcctgcggcagaagttcttcagcgagcgggaggccagcgctgtgctcttcaccatcaccaagacagtggagtacctgcacgcccagggcgtggtgcaccgggacctgaagcccagcaacatcctgtatgtggatgaaagtggcaaccctgagagcatccgcatctgtgactttggatttgccaagcagctgcgggcagaaaatggcctgctgatgaccccctgctacacagccaactttgtggcccctgaggtgctgaagaggcagggctatgatgctgcctgtgacatctggagcctgggcgtgctgctgtacaccatgctgaccggctacaccccatttgccaacggcccagatgacaccccagaggagatcctggccagaattggcagcggcaagttcagcctgagcggcggctactggaacagcgtgtctgacacagccaaggacctggtgtccaagatgctgcacgtggacccccaccagaggctgacagctgccctggtgctgcggcacccctggatcgtgcactgggaccagctgccccagtaccagctgaaccggcaggatgccccccacctggtgaagggggccatggccgccacctacagcgccctgaacagaaaccagagccctgtgctggagcctgtgggccgcagcaccctggcccagaggcggggcatcaagaagatcaccagcacagccctgtag

SEQ ID NO: 285262 - DNA, 684 bp, Artificial Sequence
  derived and/or modified sequence
atgttcaagttcctgtccttccgggtgcgcagcatccaggaggaggtgtccatcaaggagatcgccatcacccaccacgtgaaggagggccacgagaaggctgaccccagccagtttgagctgctgaaggtgctgggccagggcagctttgggaaggtgttcctggtgaagaagatcagcggcagtgatgcccggcagctgtatgccatgaaggtgctgaagaaggccaccctgaaggtgcgggacagagtgaggaccaagatggagcgggacatcctggtggaggtgaaccaccccttcatcgtgaagctgcactacgccttccagacagagggcaagctgtacctgatcctggacttcctgcggggcggggacctcttcacccggctgagcaaggaggtgatgttcacagaagaagatgtgaagttctacctggccgagctggccctggccctggaccacctgcacagcctgggcatcatctacagagacctgaagccagagaacatcctgctggatgaggagggccacatcaagctgacagactttggcctgagcaaggagagcattgaccacgagaagaaggcctacagcttctgtggcaccgtggagtacatggcccctgaggtggtgaacagaagaggccacacccagagcgctgactggtggagctttggagtgtag

SEQ ID NO: 285263 - DNA, 2133 bp, Artificial Sequence
  derived and/or modified sequence
atgttcaagttcctgagcttccgggtgcggagcatccaggaggaggtgagcataaaggaaatagccattacacatcacgtgaaggaaggccacgaaaaggccgatccctcccagttcgaactcttgaaggtcctgggccaggggtcattcggtaaggtattcctggtgaaaaagatttcgggaagtgacgcacgtcagctgtacgccatgaaggttctgaagaaggccacgttaaaggttagagatagggttcgtaccaagatggagagagatattctggtggaagtaaatcaccccttcatcgttaagctccattacgcattccaaaccgagggaaaactgtacctgattctggatttcctcagggggggcgatctgtttacacgcctgtccaaggaagtaatgttcacagaggaagacgttaaattttatctcgcagagcttgcactagcactggatcatctgcacagcctgggcataatttatcgcgaccttaagcccgaaaacattcttctggacgaagaaggacacattaaactgaccgacttcggtttgtcaaaggagtctatcgaccacgaaaaaaaagcctattcgttctgcgggactgttgagtatatggcaccagaagttgtgaatcgccgaggacatacacaatctgccgactggtggtccttcggagtgctgatgttcgaaatgttaactggtaccctgccatttcaagggaaagacagaaaggaaactatgacaatgatcctgaaagcgaagctgggcatgccacagtttttaagccctgaagcccagtcgctccttcgcatgcttttcaagcgcaatccagccaatcgactgggcgctgggcctgatggcgtcgaggaaattaagaggcactccttcttttccacgattgactggaacaagctctatcgtagagagattcatccacccttcaagcccgccactgggcgccctgaggacaccttttactttgatcctgagtttacagcgaagacgcccaaggattccccagggatcccccctagtgcaaatgcgcaccaattgttccgaggtttttcttttgtcgcaattacaagtgatgatgagagtcaggcaatgcagacagtgggggtgcactctatcgttcaacttcacagaaacagcattcagttcaccgacggctacgaagtgaaagaggacatcggggtagggtcctattctgtgtgcaaacggtgcatccataaggccaccaacatggagtttgccgtgaagattattgataagtcaaaaagggatcctactgaagagattgagattctgttgcggtatggacaacatcctaacattatcactcttaaggacgtttacgacgacggcaaatacgtctacgtagtaaccgagcttatgaaaggaggtgaactcctcgacaagattctgaggcagaaatttttttcagaaagggaagcctccgccgtcttgttcactatcactaagaccgtggaatacctccatgctcagggcgtggtccatcgggatttgaaaccttccaacatcttgtacgtagacgagagtggcaaccccgaatctatcagaatttgtgattttggcttcgcaaaacagcttcgcgccgagaacgggttactgatgacaccttgctatactgcaaatttcgtggcccctgaggtgcttaaacgccagggttatgacgccgcctgcgatatttggtccctgggggtcctcctctacacaatgctcacaggatacacgccattcgcgaacgggcccgacgacactcctgaggagattttggcacggatcggcagcgggaaattttccctgagcgggggatattggaactcagtttctgatacggcaaaagatttggtctcaaaaatgctgcacgtagatccgcaccagaggctcacagccgcactagtgctgagacatccgtggatagtccactgggaccagctcccacaatatcagttgaaccggcaggatgctccacacctcgtaaagggagccatggcggccacctacagtgccctgaaccggaaccaatctcctgtgcttgaaccggtggggagatctacccttgcccaacgccggggtatcaagaaaatcacgtcaaccgcgctctag

SEQ ID NO: 285264 - DNA, 684 bp, Artificial Sequence
  derived and/or modified sequence
atgttcaagttcctgagcttccgggtgcggagcatccaggaggaggtttccatcaaggaaatcgccattacccatcacgtcaaggagggtcacgagaaggccgatccatcccagtttgagctgcttaaagtgctggggcaagggtcatttggaaaggtatttctggtgaagaaaatctccggctccgacgcccgtcaactgtacgccatgaaggtgctgaagaaagccaccctgaaagtacgtgaccgggtccggacaaagatggagcgtgacattttggtagaggtgaatcatccattcattgtgaaattacactacgcttttcagaccgaggggaagctgtatctgatcctcgactttctacgaggcggcgatctgtttactaggctcagcaaagaagtgatgttcaccgaggaggacgtgaagttttatttggccgaactagcactggccctcgatcacttgcactcactcggaatcatttaccgcgacttaaagcctgagaacatacttttagacgaagagggccacattaagctaactgatttcggactgagtaaagagagcatcgatcatgaaaaaaaggcttatagcttctgcggcaccgtcgagtacatggcccctgaagtcgtgaatagaaggggacacacgcaatccgctgactggtggagcttcggcgtgtag

SEQ ID NO: 285265 - DNA, 2133 bp, Artificial Sequence
  derived and/or modified sequence
atgtttaagtttctgagttttcgtgtgagatctatacaagaggaagtgtccattaaagagatcgccatcacccatcacgtgaaggagggacacgaaaaagccgatccttcacagttcgagctgcttaaagttctggggcagggttcgtttggcaaagtttttcttgtcaagaagatctcaggatcagatgccagacagctctacgctatgaaagtgcttaaaaaggccacccttaaagttcgcgatcgggtgagaacgaagatggagagggacattttagtggaagtaaaccacccgtttatagtgaaattgcattatgcgtttcagaccgagggtaagctgtacttgatcctagactttctacgcggaggcgacctttttacacgactttctaaggaagtgatgttcacggaggaggacgtgaaattctatctggctgagctggccctggcactggaccacctacatagcctgggcataatctatagggatcttaaacccgagaacatccttttggacgaggaaggccacatcaaactgacagattttggtctatccaaggaaagtattgaccacgagaaaaaggcctattccttttgtggcaccgtagagtatatggcacccgaggtggtgaatagacggggacacacacagagtgcggattggtggtcttttggggtgttgatgtttgaaatgcttaccggtacgcttcccttccagggaaaagacaggaaagagacgatgacaatgatcctgaaagcaaagctggggatgcctcaattcctctcccctgaggcacagtccttgctgcgaatgttatttaaaaggaatcccgctaatagactgggcgcaggtcctgacggagtggaagagattaaacgtcactcttttttctctactattgattggaacaaactgtaccggagagaaattcatccacctttcaaacctgctaccggcagacctgaggacaccttttacttcgacccagaattcaccgcaaagacccccaaggactcaccgggtattccaccctcagcaaacgcccaccaactgtttagaggtttctcctttgtagccatcacttcagacgacgagagtcaggctatgcaaacagtgggggtgcactccatcgtgcagcttcaccggaattctattcaattcacagatggctacgaggttaaagaggatatcggagtgggttcctatagcgtgtgcaagcgatgcatccataaagcaacgaacatggaattcgcggtcaaaatcatcgataagagcaagagggaccctaccgaggagatcgaaatcctgctgcgatacggtcagcacccaaatattatcaccctcaaggacgtttacgatgacgggaagtatgtgtatgtggtgactgaactgatgaaagggggagagttgctggataagatcctgcgtcagaagttcttttctgagcgcgaggcctcagccgtgctgttcacaataaccaagactgtggaatacttgcacgctcaaggcgttgtccacagggacctgaagccttctaacatcctttacgtggatgaatcaggcaatcccgaaagcatccgcatctgcgatttcggatttgccaagcaactgcgggcagaaaacggcctgctgatgaccccctgttacactgctaatttcgtggcacctgaagtgctcaagcgccaaggttacgatgccgcttgtgacatctggtcactgggcgttctgctttatactatgctgactggctataccccctttgccaatggcccagacgacacaccggaggaaatccttgctaggatcggatctggcaaattctcgctgagcggcggatattggaatagcgtcagtgatacggcaaaagacctggtgtccaaaatgctgcacgtcgatcctcaccaacgcctcacagcggcactggtcctccgacacccctggatcgtgcactgggaccaactgccgcagtatcagcttaacagacaggatgctccccacctggtgaaaggggcaatggcagcgacgtactccgctctcaatagaaatcagagccccgtgctagaaccagtaggcaggtcaacactggcgcaacgtaggggcattaaaaagatcacgagcaccgctctctag

SEQ ID NO: 285266 - DNA, 684 bp, Artificial Sequence
  derived and/or modified sequence
atgttcaagtttctgagcttccgggttagaagcattcaggaagaagtgtcaatcaaagaaatagctattacacaccacgtcaaggagggccacgagaaggccgatccctcacaattcgagctcctgaaagtgctgggtcaaggctcattcggcaaagtctttctcgttaagaagattagcggtagcgatgcacgtcagctgtacgccatgaaggtccttaaaaaagccacgctgaaggtgcgtgaccgcgtcaggaccaagatggaacgggatatacttgtggaagtgaatcacccgttcatagtgaaattacactacgctttccaaaccgagggaaagctatatctaattctggacttcctgcgaggcggtgatttgtttacacgcctgtccaaggaagtgatgttcactgaggaggatgtaaaattctatctggccgagctcgccttggctctcgatcacctgcactcccttggcataatttaccgagacctgaagccggagaacatcctactggacgaggagggccacattaagctcaccgatttcggcttgtcaaaggagtcgatcgaccatgaaaagaaggcctactccttctgcgggaccgttgaatacatggctcctgaagtggtgaacagaagaggtcatacgcagtctgccgactggtggagtttcggcgtgtag

SEQ ID NO: 285267 - DNA, 2410 bp, Artificial Sequence
  derived and/or modified sequence
atcaccatcatggtttcgtagccatgtttaaatttttgtcttttcgtgttcgctctatacaggaagaagtcagtatcaaagaaattgcaatcacacatcatgtaaaggaaggacatgaaaaggcagatccttcccagtttgaacttttaaaagtattagggcagggatcatttggaaaggttttcttagttaaaaaaatctcaggctctgatgctaggcagctttatgccatgaaggtattgaagaaggccacactgaaagttcgagaccgagttcggacaaaaatggaacgtgatatcttggtagaggttaatcatccttttattgtcaagttgcattatgcttttcaaactgaagggaagttgtatcttattttggattttctcaggggaggagatttgtttacacgcttatccaaagaggtgatgttcacagaagaagatgtcaaattctacttggctgaacttgcacttgctttagaccatctacatagcctgggaataatttatagagacttaaaaccagaaaatatacttcttgatgaagaaggtcacatcaagttaacagatttcggcctaagtaaagagtctattgaccatgaaaagaaggcatattctttttgtggaactgtggagtatatggctccagaagtagttaatcgtcgaggtcatactcagagtgctgactggtggtcttttggtgtgttaatgtttgaaatgcttactggtacactccctttccaaggaaaagatcgaaaagaaacaatgactatgattcttaaagccaaacttggaatgccacagtttttgagtcctgaagcgcagagtcttttacgaatgcttttcaagcgaaatcctgcaaacagattaggtgcaggaccagatggagttgaagaaattaaaagacattcatttttctcaacgatagactggaataaactgtatagaagagaaattcatccgccatttaaacctgcaacgggcaggcctgaagatacattctattttgatcctgagtttactgcaaaaactcccaaagattcacctggcattccacctagtgctaatgcacatcagctttttcgggggtttagttttgttgctattacctcagatgatgaaagccaagctatgcagacagttggtgtacattcaattgttcagttacacaggaacagtattcagtttactgatggatatgaagtaaaagaagatattggagttggctcctactctgtttgcaagagatgtatacataaagctacaaacatggagtttgcagtgaagattattgataaaagcaagagagacccaacagaagaaattgaaattcttcttcgttatggacagcatccaaacattatcactctaaaggatgtatatgatgatggaaagtatgtgtatgtagtaacagaacttatgaaaggaggtgaattgctggataaaattcttagacaaaaatttttctctgaacgagaggccagtgctgtcctgttcactataactaaaaccgttgaatatcttcacgcacaaggggtggttcatagagacttgaaacctagcaacattctttatgtggatgaatctggtaatccggaatctattcgaatttgtgattttggctttgcaaaacagctgagagcggaaaatggtcttctcatgactccttgttacactgcaaattttgttgcaccagaggttttaaaaagacaaggctatgatgctgcttgtgatatatggagtcttggtgtcctactctatacaatgcttaccggttacactccatttgcaaatggtcctgatgatacaccagaggaaatattggcacgaataggtagcggaaaattctcactcagtggtggttactggaattctgtttcagacacagcaaaggacctggtgtcaaagatgcttcatgtagaccctcatcagagactgactgctgctcttgtgctcagacatccttggatcgtccactgggaccaactgccacaataccaactaaacagacaggatgcaccacatctagtaaagggtgccatggcagctacatattctgctttgaaccgtaatcagtcaccagttttggaaccagtaggccgctctactcttgctcagcggagaggtattaaaaaaatcacctcaacagccctgtgaagtgacctcagtgagatatttggtaccatggtgtaagctgatagcacaagttctggcgacaggtagcacgtatctgagagacacctgcaagcacacactgtcccagctggtacccataatgctgctgttcctgctgctgctcctgctttcctctcttctcgctttaaatgattgttagcaagttagattttcctggagcttcggaagaaatgaaaatggaaacatgatgaagatatagtcactgaatcaatgag

SEQ ID NO: 285268 - DNA, 804 bp, Artificial Sequence
  derived and/or modified sequence
aggaaattttctaattgccggaacagctggtaggagaaaactttgcaggggcttggccttccctttctaacttaagttttaccgtcagaaattcttttatcaccatcatggtttcgtagccatgtttaaatttttgtcttttcgtgttcgctctatacaggaagaagtcagtatcaaagaaattgcaatcacacatcatgtaaaggaaggacatgaaaaggcagatccttcccagtttgaacttttaaaagtattagggcagggatcatttggaaaggttttcttagttaaaaaaatctcaggctctgatgctaggcagctttatgccatgaaggtattgaagaaggccacactgaaagttcgagaccgagttcggacaaaaatggaacgtgatatcttggtagaggttaatcatccttttattgtcaagttgcattatgcttttcaaactgaagggaagttgtatcttattttggattttctcaggggaggagatttgtttacacgcttatccaaagaggtgatgttcacagaagaagatgtcaaattctacttggctgaacttgcacttgctttagaccatctacatagcctgggaataatttatagagacttaaaaccagaaaatatacttcttgatgaagaaggtcacatcaagttaacagatttcggcctaagtaaagagtctattgaccatgaaaagaaggcatattctttttgtggaactgtggagtatatggctccagaagtagttaatcgtcgaggtcatactcagagtgctgactggtggtcttttggtgtgtt

SEQ ID NO: 285269 - protein, 805 aa, Artificial Sequence
  derived and/or modified sequence
MDEDGLELQQEPNSFFDATGADGTHMDGDQIVVEVQETVFVSDVVDSDITVHNFVPDDPDSVVIQDVIEDVVIEDVQCPDIMEEADVSETVIIPEQVLDSDVTEEVSLAHCTVPDDVLASDITSASMSMPEHVLTGDSIHVSDVGHVGHVGHVEHVVHDSVVEAEIVTDPLTTDVVSEEVLVADCASEAVIDANGIPVDQQDDDKGNCEDYLMISLDDAGKIEHDGSSGMTMDTESEIDPCKVDGTCPEVIKVYIFKADPGEDDLGGTVDIVESEPENDHGVELLDQNSSIRVPREKMVYMTVNDSQPEDEDLNVAEIADEVYMEVIVGEEDAAAAAAAAAVHEQQMDDNEIKTFMPIAWAAAYGNNSDGIENRNGTASALLHIDESAGLGRLAKQKPKKRRRPDSRQYQTAIIIGPDGHPLTVYPCMICGKKFKSRGFLKRHMKNHPEHLAKKKYRCTDCDYTTNKKISLHNHLESHKLTSKAEKAIECDECGKHFSHAGALFTHKMVHKEKGANKMHKCKFCEYETAEQGLLNRHLLAVHSKNFPHICVECGKGFRHPSELKKHMRIHTGEKPYQCQYCEYRSADSSNLKTHVKTKHSKEMPFKCDICLLTFSDTKEVQQHALIHQESKTHQCLHCDHKSSNSSDLKRHIISVHTKDYPHKCDMCDKGFHRPSELKKHVAAHKGKKMHQCRHCDFKIADPFVLSRHILSVHTKDLPFRCKRCRKGFRQQSELKKHMKTHSGRKVYQCEYCEYSTTDASGFKRHVISIHTKDYPHRCEYCKKGFRRPSEKNQHIMRHHKEVGLP

SEQ ID NO: 285270 - protein, 755 aa, Artificial Sequence
  derived and/or modified sequence
MDEDGLELQQEPNSFFDATGADGTHMDGDQIVVEVQETVFVSDVVDSDITVHNFVPDDPDSVVIQDVIEDVVIEDVQCPDIMEEADVSETVIIPEQVLDSDVTEEVSLAHCTVPDDVLASDITSASMSMPEHVLTGDSIHVSDVGHVGHVGHVEHVVHDSVVEAEIVTDPLTTDVVSEEVLVADCASEAVIDANGIPVDQQDDDKGNCEDYLMISCGTVDIVESEPENDHGVELLDQNSSIRVPREKMVYMTVNDSQPEDEDLNVAEIADEVYMEVIVGEEDAAAAAAAAAVHEQQMDDNEIKTFMPIAWAAAYGNNSDGIENRNGTASALLHIDESAGLGRLAKQKPKKRRRPDSRQYQTAIIIGPDGHPLTVYPCMICGKKFKSRGFLKRHMKNHPEHLAKKKYRCTDCDYTTNKKISLHNHLESHKLTSKAEKAIECDECGKHFSHAGALFTHKMVHKEKGANKMHKCKFCEYETAEQGLLNRHLLAVHSKNFPHICVECGKGFRHPSELKKHMRIHTGEKPYQCQYCEYRSADSSNLKTHVKTKHSKEMPFKCDICLLTFSDTKEVQQHALIHQESKTHQCLHCDHKSSNSSDLKRHIISVHTKDYPHKCDMCDKGFHRPSELKKHVAAHKGKKMHQCRHCDFKIADPFVLSRHILSVHTKDLPFRCKRCRKGFRQQSELKKHMKTHSGRKVYQCEYCEYSTTDASGFKRHVISIHTKDYPHRCEYCKKGFRRPSEKNQHIMRHHKEVGLP

SEQ ID NO: 285271 - protein, 135 aa, Artificial Sequence
  derived and/or modified sequence
MDEDGLELQQEPNSFFDATGADGTHMDGDQIVVEVQETVFVSDVVDSDITVHNFVPDDPDSVVIQDVIEDVVIEDVQCPDIMEEADVSETVIIPEQVLDSDVTEEVSLAHCTVPDDVLASDITSASMSMPEHVLT

SEQ ID NO: 285272 - protein, 262 aa, Artificial Sequence
  derived and/or modified sequence
MDEDGLELQQEPNSFFDATGADGTHMDGDQIVVEVQETVFVSDVVDSDITVHNFVPDDPDSVVIQDVIEDVVIEDVQCPDIMEEADVSETVIIPEQVLDSDVTEEVSLAHCTVPDDVLASDITSASMSMPEHVLTGDSIHVSDVGHVGHVGHVEHVVHDSVVEAEIVTDPLTTDVVSEEVLVADCASEAVIDANGIPVDQQDDDKGNCEDYLMISCNNSDGIENRNGTASALLHIDESAGLGRLAKQKPKKRRRPDSRQYQT

SEQ ID NO: 285273 - DNA, 5811 bp, Artificial Sequence
  derived and/or modified sequence
gtccgtccggttcttgctatattgccccaggctggtctcgaactcctgggctcaagccgttctcccgcctcccactgcccgcctgtcactgccgtctgttccctgagctgtgctttacgctgggaaagacatagaagaactattaagaagatagaattgttttgctgcgcagtacagcaacagtggatgttcaagattaagattagagtcaagttgtgtgattaagacaggagctgtgactgatgagaattaaaggccatggatgaagatgggcttgaattacaacaagagccaaactcattttttgatgcaacaggagctgatggtacacacatggatggtgatcaaattgttgtggaagtacaagaaactgtttttgtttcagatgttgtggattcagacataactgtgcataactttgttcctgatgacccagattcagttgtaatccaagatgttattgaggacgttgttatagaagatgttcagtgcccagatatcatggaagaagcagatgtgtctgaaacggtcatcattcctgagcaagtgctggactcagatgtaactgaagaagtttctttagcacattgcacagtcccagatgatgttttagcttctgacattacttcagcctcaatgtctatgccagaacacgtcttgacgggtgattctatacatgtgtctgacgttggacatgttggacatgttggacatgttgaacatgtggttcatgatagtgtagtggaagcagaaattgtcactgatcctctgactaccgacgtagtttcagaagaagtattggtagcagactgtgcctctgaagcagtcatagatgccaatgggatccctgtggaccagcaggatgatgacaaaggcaactgtgaggactaccttatgatttccttggatgatgctggcaaaatagaacacgatggttcttctggaatgaccatggacacagagtcggaaattgatccttgtaaagtggatggcacttgccctgaggtcatcaaggtgtacatttttaaagctgaccctggagaagatgacttaggtggaactgtagacattgtggagagtgagcctgagaatgatcatggagttgaactgcttgatcagaacagcagtattcgtgttcccagggaaaagatggtttatatgactgtcaatgactctcagccagaagatgaagatttaaatgttgctgaaatcgctgacgaagtttatatggaagtgatcgtaggagaggaggatgctgcagcagcagcggcagccgccgccgtgcacgagcagcaaatggatgacaatgaaatcaaaaccttcatgccgattgcatgggcagcagcttatggtaataattctgatggaattgaaaaccggaatggcactgcaagtgccctcttgcacatagatgagtctgctggcctcggcagactggctaaacaaaaaccaaagaaaaggagaagacctgattccaggcagtaccaaacagcaataattattggccctgatggacatcctttgactgtctatccttgcatgatttgtgggaagaagtttaagtcgagaggttttttgaaaaggcacatgaaaaaccatcccgaacaccttgccaagaagaaataccgctgtactgactgtgattacactaccaacaagaagataagtttacacaaccacctggagagccacaagctgaccagcaaggcagagaaggccattgaatgcgatgagtgtgggaagcatttctctcatgcaggggctttgtttactcacaaaatggtgcataaggaaaaaggagccaacaaaatgcacaagtgtaaattctgtgaatacgagacagctgaacaagggttattgaatcgccacctcttggcagtccacagcaagaactttcctcatatttgtgtggagtgtggtaagggttttcgtcacccgtcagagctcaaaaagcacatgagaatccatactggggagaagccgtaccaatgccagtactgcgaatataggtctgcagactcttctaacttgaaaacgcatgtcaaaactaagcatagtaaagagatgccattcaagtgtgacatttgtcttctgactttctcggataccaaagaggtgcagcaacatgctcttatccaccaagaaagcaaaacacaccagtgtttgcattgcgaccacaagagttcgaactcaagtgatttgaaacgacacataatttcagttcacacgaaagactacccccataagtgtgacatgtgtgataaaggctttcacaggccttcagaactcaagaaacacgtggctgcccacaagggcaaaaaaatgcaccagtgtagacattgtgactttaagattgcagatccatttgttctaagtcgccatattctctcagttcacacaaaggatcttccatttaggtgcaagagatgtagaaagggatttaggcaacagagtgagcttaaaaagcatatgaagacacacagtggcaggaaagtgtatcagtgtgagtactgtgagtatagcactacagatgcctcaggctttaaacggcacgttatttccattcacacgaaagactatcctcaccggtgtgagtactgcaagaaaggcttccgaagaccttcagaaaagaaccagcacataatgcgacatcataaagaagttggcctgccctaacaatacttctacagaacgtttgtagagatattggccttgaagcagaaaattcattttaaagccaatcagtctcattcacatacaatactgtatattgatttatgctgtgtacaaatagaattattacttctagttgacttttttttaaatatacattttgctcagtagtgtgttctgaattctattcagtttgtttaataaatagggaaaactggcaacatgctagttacttttaataaagtaatccctgattctataccgaagttttatatcttagaattttatatttatttaaatatttaccttgcttaccttgatggtactcttctaagaccattaacttaaggtaactttatattggtaactctgaaagtattcatgttgactcatttttttccccatacatttctcacaataaaattgtcagagacatctactaatataaatgggagattttacagtcaggtctaattatcataacatggaagtcatttacttgtcttgcttaatattttcagaccacttgacagtgaaagtttccatttgagctgttgcgtccctggctttgctgagtaaagagcagtggctgggttcgtgtttacttttcaaatatacttcttttggctttctttggattatttacatcttttgtcagcgtagcaaacttttagaaaaccttattgaaaaactgtgcttgctcatgttgtattttgattattctgtctgtgcggcttcatcttggaatggttgtgtgctacaaatgacacttactgaggactgcattttggaatctcctagaggtaactcatggcttataggatcttttgcaactttatgtatgtaaatgtaccctgaattatatatatacacatatatatcatgtacctgtgtgtattgcttattttacatatttatacacacaaccccaagtagtagttgtttaaaatctataatgaaaagtattaaatttacaataacatgaaagatccagggatgcatgagagagcattttgtaagtcatgctcttcagagagactactcaggtgaagaattagaaggaaaataaggacactagtatttttaaagagtaaagatattttcttttaaatatctttggtaattgaaacatagaggttaagatgtttctaggtagaatgttttcatacaatttcacctccatgtctttatgtttttctgaaaagcaaatgagtatccagacatgactcccacagttctctttgagaagcctgagagggaactctgtcttacctagtgagggggatggaaaagaagtgatggctctgtggaccagagaacgggtgctaattatgacttcacactcggcaagttcaggctgatctgttatttctcagttacagttagcaaactttaaaaacttaacactcaagttggctttgattaaaaggtaaagatgtgttttaagtggataaggaaagtctgaggccttatttggaacatcactaagtcttccacaggttttttgtttgtttgtttttttttgttgtttttttttcttaagacggagtcttgctctgttgcccaggctggactgcagtggtgtgatcactgcaacctctgcagctcactgcaacctctgcttcctgggttcaagcaattatctgcctcagcctctcgagtagctgggattacaggcgcccaccaccacgcccggctaattttttgtatttttaatagagatggggtttcaccatcttggccaggctggtcttgaaccctgacctcgtgatccacctgcctcggccttccatagtgctgggtttacaggcgtgagccaccgtgcccagacaccacataggtctgaatcagtgtcatacattcataaaacaaactcggttaattagaacttggttatgttaagacgaatctgggagaacagaaaacagtttttggggtcccttcagttggctattggtccgtatgcatctagcacattgtaggagatttagaaattgtcttcccacccgatagctgccttgtcacctcattatggtgctccatcccctgtgtgcttaggtttttacctttcatctttctctttgccattgatgtttgtattcaagagttatatttttagggttagaaatcaaaatatttggtgtttggcaaacctctgaagtgctagactgatttagtctagttttaaaccaagtgctttaggcaggtgtgaactccagcccaaatgccagtcaaagtcaaggcatgggttttcctagcctatcttataggaaattcctgtaccttcttggcccccataatgtgttttttttttttttttttttttaaactaacttacaattttgtgatccgtgattcattgccctgcgattcttgaaagctctgtctgtttttttgtgagaacctttaaaatctcccttaatttttattttcccagaaataatgtaaaaacacttaaatgaaagtggaaatgtattaattttaaatcctataaaattaatacagaaaatataaatgattgggtcatttaactatatttttttaaataaactgaaagataaagaacacaacacttcacacattttatatttctcttacatactccggaatcatacacagttctttttaaagcacaacattaaaacctttaaaaggtatttaagggtttggtcaagtgaatatgataaaacatacttgtctgtataaagagaaaatgaaattgtagtcactgttatgtactgacattagttacaacctagttttaattcttaaaacaattttgattagcaaagctaaaaaaaaatggatgtttcagttaaatgttttaaagaggtacagatttttacaaggacataatataagttattgttctgtagaaatatcctattaaatattgtatgtccctccctctgtacactttgtaaagaaagtaaaatacataaaaagaaaatcatatagggatgtgtgacattattgtaattgtgtacttgagaataacgtgcaaaaataaaaatcagaatattttcctgttattgaatgtttagtctatttgataccagtactaagttaatgctttttctcaaggaaaaaaaatgtacagtttttgtaaacctaataaacatcaaaagcagtggatta

SEQ ID NO: 285274 - DNA, 2418 bp, Artificial Sequence
  derived and/or modified sequence
atggacgaggacggcctggagctgcagcaggagcccaacagcttcttcgacgccaccggcgccgacggcacccacatggacggcgaccagatcgtggtggaggtgcaggagaccgtgttcgtgagcgacgtggtggacagcgacatcaccgtgcacaacttcgtgcccgacgaccccgacagcgtggtgatccaggacgtgatcgaggacgtggtgatcgaggacgtgcagtgccccgacatcatggaggaggccgacgtgagcgagaccgtgatcatccccgagcaggtgctggacagcgacgtgaccgaggaggtgagcctggcccactgcaccgtgcccgacgacgtgctggccagcgacatcaccagcgccagcatgagcatgcccgagcacgtgctgaccggcgacagcatccacgtgagcgacgtgggccacgtgggccacgtgggccacgtggagcacgtggtgcacgacagcgtggtggaggccgagatcgtgaccgaccccctgaccaccgacgtggtgagcgaggaggtgctggtggccgactgcgccagcgaggccgtgatcgacgccaacggcatccccgtggaccagcaggacgacgacaagggcaactgcgaggactacctgatgatcagcctggacgacgccggcaagatcgagcacgacggcagcagcggcatgaccatggacaccgagagcgagatcgacccctgcaaggtggacggcacctgccccgaggtgatcaaggtgtacatcttcaaggccgaccccggcgaggacgacctgggcggcaccgtggacatcgtggagagcgagcccgagaacgaccacggcgtggagctgctggaccagaacagcagcatcagagtgcccagagagaagatggtgtacatgaccgtgaacgacagccagcccgaggacgaggacctgaacgtggccgagatcgccgacgaggtgtacatggaggtgatcgtgggcgaggaggacgccgccgccgccgccgccgccgccgccgtgcacgagcagcagatggacgacaacgagatcaagaccttcatgcccatcgcctgggccgccgcctacggcaacaacagcgacggcatcgagaacagaaacggcaccgccagcgccctgctgcacatcgacgagagcgccggcctgggcagactggccaagcagaagcccaagaagagaagaagacccgacagcagacagtaccagaccgccatcatcatcggccccgacggccaccccctgaccgtgtacccctgcatgatctgcggcaagaagttcaagagcagaggcttcctgaagagacacatgaagaaccaccccgagcacctggccaagaagaagtacagatgcaccgactgcgactacaccaccaacaagaagatcagcctgcacaaccacctggagagccacaagctgaccagcaaggccgagaaggccatcgagtgcgacgagtgcggcaagcacttcagccacgccggcgccctgttcacccacaagatggtgcacaaggagaagggcgccaacaagatgcacaagtgcaagttctgcgagtacgagaccgccgagcagggcctgctgaacagacacctgctggccgtgcacagcaagaacttcccccacatctgcgtggagtgcggcaagggcttcagacaccccagcgagctgaagaagcacatgagaatccacaccggcgagaagccctaccagtgccagtactgcgagtacagaagcgccgacagcagcaacctgaagacccacgtgaagaccaagcacagcaaggagatgcccttcaagtgcgacatctgcctgctgaccttcagcgacaccaaggaggtgcagcagcacgccctgatccaccaggagagcaagacccaccagtgcctgcactgcgaccacaagagcagcaacagcagcgacctgaagagacacatcatcagcgtgcacaccaaggactacccccacaagtgcgacatgtgcgacaagggcttccacagacccagcgagctgaagaagcacgtggccgcccacaagggcaagaagatgcaccagtgcagacactgcgacttcaagatcgccgaccccttcgtgctgagcagacacatcctgagcgtgcacaccaaggacctgcccttcagatgcaagagatgcagaaagggcttcagacagcagagcgagctgaagaagcacatgaagacccacagcggcagaaaggtgtaccagtgcgagtactgcgagtacagcaccaccgacgccagcggcttcaagagacacgtgatcagcatccacaccaaggactacccccacagatgcgagtactgcaagaagggcttcagaagacccagcgagaagaaccagcacatcatgagacaccacaaggaggtgggcctgccctag

SEQ ID NO: 285275 - DNA, 2268 bp, Artificial Sequence
  derived and/or modified sequence
atggacgaggacggcctggagctgcagcaggagcccaacagcttcttcgacgccaccggcgccgacggcacccacatggacggcgaccagatcgtggtggaggtgcaggagaccgtgttcgtgagcgacgtggtggacagcgacatcaccgtgcacaacttcgtgcccgacgaccccgacagcgtggtgatccaggacgtgatcgaggacgtggtgatcgaggacgtgcagtgccccgacatcatggaggaggccgacgtgagcgagaccgtgatcatccccgagcaggtgctggacagcgacgtgaccgaggaggtgagcctggcccactgcaccgtgcccgacgacgtgctggccagcgacatcaccagcgccagcatgagcatgcccgagcacgtgctgaccggcgacagcatccacgtgagcgacgtgggccacgtgggccacgtgggccacgtggagcacgtggtgcacgacagcgtggtggaggccgagatcgtgaccgaccccctgaccaccgacgtggtgagcgaggaggtgctggtggccgactgcgccagcgaggccgtgatcgacgccaacggcatccccgtggaccagcaggacgacgacaagggcaactgcgaggactacctgatgatcagctgcggcaccgtggacatcgtggagagcgagcccgagaacgaccacggcgtggagctgctggaccagaacagcagcatcagagtgcccagagagaagatggtgtacatgaccgtgaacgacagccagcccgaggacgaggacctgaacgtggccgagatcgccgacgaggtgtacatggaggtgatcgtgggcgaggaggacgccgccgccgccgccgccgccgccgccgtgcacgagcagcagatggacgacaacgagatcaagaccttcatgcccatcgcctgggccgccgcctacggcaacaacagcgacggcatcgagaacagaaacggcaccgccagcgccctgctgcacatcgacgagagcgccggcctgggcagactggccaagcagaagcccaagaagagaagaagacccgacagcagacagtaccagaccgccatcatcatcggccccgacggccaccccctgaccgtgtacccctgcatgatctgcggcaagaagttcaagagcagaggcttcctgaagagacacatgaagaaccaccccgagcacctggccaagaagaagtacagatgcaccgactgcgactacaccaccaacaagaagatcagcctgcacaaccacctggagagccacaagctgaccagcaaggccgagaaggccatcgagtgcgacgagtgcggcaagcacttcagccacgccggcgccctgttcacccacaagatggtgcacaaggagaagggcgccaacaagatgcacaagtgcaagttctgcgagtacgagaccgccgagcagggcctgctgaacagacacctgctggccgtgcacagcaagaacttcccccacatctgcgtggagtgcggcaagggcttcagacaccccagcgagctgaagaagcacatgagaatccacaccggcgagaagccctaccagtgccagtactgcgagtacagaagcgccgacagcagcaacctgaagacccacgtgaagaccaagcacagcaaggagatgcccttcaagtgcgacatctgcctgctgaccttcagcgacaccaaggaggtgcagcagcacgccctgatccaccaggagagcaagacccaccagtgcctgcactgcgaccacaagagcagcaacagcagcgacctgaagagacacatcatcagcgtgcacaccaaggactacccccacaagtgcgacatgtgcgacaagggcttccacagacccagcgagctgaagaagcacgtggccgcccacaagggcaagaagatgcaccagtgcagacactgcgacttcaagatcgccgaccccttcgtgctgagcagacacatcctgagcgtgcacaccaaggacctgcccttcagatgcaagagatgcagaaagggcttcagacagcagagcgagctgaagaagcacatgaagacccacagcggcagaaaggtgtaccagtgcgagtactgcgagtacagcaccaccgacgccagcggcttcaagagacacgtgatcagcatccacaccaaggactacccccacagatgcgagtactgcaagaagggcttcagaagacccagcgagaagaaccagcacatcatgagacaccacaaggaggtgggcctgccctag

SEQ ID NO: 285276 - DNA, 2418 bp, Artificial Sequence
  derived and/or modified sequence
atggacgaggacggattggaactgcagcaagagcccaattccttcttcgacgccactggggccgacggaacccatatggatggtgaccagatcgtcgtagaagttcaagagacagtcttcgtgtccgatgttgtggatagtgatataaccgtccataactttgtgcccgatgatccagattccgttgttatccaagacgttattgaggatgtggtcatcgaggatgtacaatgcccggacatcatggaggaggccgacgtctccgagaccgtaattattcccgaacaggtactggacagtgatgttactgaggaggtctcactggctcattgtactgtaccggatgacgttcttgccagtgatatcactagtgcttccatgagcatgccagaacatgtgcttaccggcgattccatccacgtttcagacgtcgggcacgttggccacgtaggacatgtcgagcacgtagtgcacgattccgtcgtagaggctgagatagttacagatccactcaccaccgatgtcgtctccgaggaggtgctggttgccgactgtgcctcggaagccgtcatcgacgccaacgggattccggtcgaccagcaagatgacgataaaggaaactgtgaggattacctgatgatttcgctcgacgacgccgggaagattgagcacgacggttccagcggaatgacaatggacaccgagagtgagatcgacccatgtaaggtcgacgggacatgccctgaggttatcaaggtatacatcttcaaggctgaccccggtgaagacgatttgggaggcactgtcgacatcgtagagtcagaaccggaaaatgaccacggcgtggagcttcttgaccagaactcatctatcagggtgcctcgagagaaaatggtttacatgacagttaatgacagccaacccgaagatgaggacctaaatgtcgcggagatcgctgatgaagtttacatggaagtgatcgtcggcgaggaggacgcggcggccgctgccgcagctgccgcagtgcacgagcaacaaatggacgacaacgagataaagacatttatgcctatcgcctgggcagccgcctatggaaataactctgatggcatcgagaatcgaaacggcaccgcgagcgcactgttgcatatcgacgagagtgcaggactcggaaggcttgcaaagcaaaaacctaagaagcggcgaaggcccgattcgcggcaataccaaactgcaattatcattgggccagatgggcaccctctgactgtctatccatgcatgatctgcgggaagaaattcaagtctagggggtttctcaagaggcatatgaagaaccatccagagcatctggccaaaaagaagtaccggtgcacggattgtgactatacaactaacaagaagatcagtcttcataaccacctcgagtctcacaagctgaccagtaaggccgagaaggctatcgaatgtgacgaatgtgggaagcacttcagccacgccggggctctgttcacacacaaaatggtgcacaaggagaagggtgcaaataagatgcacaaatgcaaattctgcgaatatgaaacagcagaacagggcttgctgaacagacacctgctggcagtgcatagtaagaattttccgcatatctgcgttgaatgtggcaaagggtttagacacccctctgaattgaaaaagcacatgaggattcatacaggcgagaagccctaccaatgccagtactgcgaatatcggagcgccgattcttctaatctgaaaacccacgtcaaaactaagcacagtaaagagatgccttttaaatgtgacatctgcctgctcacattctccgacaccaaagaggtgcagcagcatgcgttaattcaccaggaatctaaaactcatcagtgcctgcactgtgaccataagtcgtccaattcatctgacctgaagagacacataatttccgttcacactaaggactatccacacaagtgtgacatgtgcgataaaggttttcatagaccctcagaattaaagaaacacgtcgccgcccacaaggggaagaaaatgcatcagtgtcgccactgtgattttaagatcgcggatccattcgtgctgtcaagacacatactgtctgtgcataccaaggacctgccttttaggtgtaagaggtgccgaaaaggatttcggcaacagagcgagttaaaaaagcacatgaagacgcactcaggacgaaaggtgtaccagtgtgagtattgtgagtatagcaccacggatgcctcggggttcaaaagacacgtgatcagtattcacaccaaggattacccacacaggtgcgagtactgtaagaaaggcttccggaggccgtccgagaaaaaccagcacatcatgcgacatcacaaggaggtaggattgccctag

SEQ ID NO: 285277 - DNA, 2268 bp, Artificial Sequence
  derived and/or modified sequence
atggatgaagatggactggagctacagcaggaaccaaatagctttttcgacgccacaggggcagacggcacccatatggacggggaccagatagtcgtagaagtgcaggaaacagtctttgtgagtgatgtcgttgactcagacatcacagttcacaacttcgttccagacgaccctgattccgtggtgattcaggacgtaatcgaggatgttgtgatcgaagacgtgcagtgcccagacatcatggaggaggccgacgtctcagagacagtgattatacctgagcaggtcctcgattctgatgtgactgaggaagtgtctctggctcattgtactgtgccagatgatgtgctcgctagtgacatcacctctgcttctatgagcatgcctgaacatgttttgacaggtgattccatccacgtaagcgatgtgggccacgtaggtcacgttgggcacgtcgagcatgtcgtccacgactccgttgttgaggcggagatcgttactgatccactgaccaccgacgtggtttcagaggaagtgctggtcgcagactgtgcttccgaggctgtcattgatgccaacggcatcccagtcgaccaacaggacgacgataagggcaactgtgaggactatctgatgattagctgcggtaccgtcgacattgttgagtcggagccagaaaatgatcatggcgtagagttgctggatcagaacagtagcatccgtgtgcctagggaaaagatggtctacatgacagttaatgattcgcagcccgaggatgaagatctcaatgtagcagaaattgccgacgaggtgtatatggaagtaattgttggagaggaggacgccgcagccgccgccgctgcggcagcagtacatgagcaacagatggacgacaatgagatcaaaaccttcatgcctatcgcctgggcagccgcttacgggaacaatagcgatgggatcgaaaatcgcaacggcacagcgagtgcattactgcacattgatgagagcgccgggctcggtaggttagccaaacaaaagcctaagaaacggcggaggccagactctcgtcagtaccagacagccataattatagggccagacggccaccctttgaccgtttacccgtgcatgatttgtggcaaaaaattcaagagccggggctttttgaagcgtcacatgaaaaatcaccctgagcatttggctaagaaaaaatataggtgcaccgactgcgattacacgaccaacaaaaagatctctctccacaaccacctggagtcacacaaattaacttctaaggctgagaaagctattgaatgcgacgaatgtgggaaacacttttcacacgcgggggcattgttcacccataagatggttcacaaggagaagggggctaataagatgcataaatgcaagttttgcgagtacgagaccgctgagcagggactgctgaataggcatcttctagccgtgcattccaaaaacttccctcatatctgtgtcgaatgtggcaagggatttagacaccccagtgaactcaaaaagcatatgaggatccatactggagagaaaccgtaccagtgccaatactgcgagtacagatctgccgattcctcaaatctgaagacccacgtgaagaccaagcactccaaagaaatgcccttcaaatgcgacatttgtttattaacgttttcggacacaaaggaggttcaacagcacgcactgatccaccaggaaagtaagacacaccagtgcctgcactgcgatcataaaagtagtaattcttccgatctaaaacgtcacatcattagcgtgcatacgaaggattacccacacaagtgcgatatgtgcgataaaggcttccacaggccaagcgagctcaagaaacatgtcgccgcccataagggcaaaaagatgcaccagtgtagacactgtgacttcaagatagccgaccctttcgtactgtcacggcatatattgtccgttcatactaaggatttaccctttagatgtaaaaggtgccgcaaagggtttcgtcaacaatctgaactgaagaagcacatgaagacccactctgggcggaaggtctaccagtgtgagtattgtgagtattctacgaccgatgccagtgggttcaagcgccacgtgatttcaatccacactaaagactatcctcaccgctgcgaatactgtaagaaaggttttcgaaggccttctgaaaaaaatcagcacataatgcgccatcataaggaagtgggcctgccctag

SEQ ID NO: 285278 - DNA, 2418 bp, Artificial Sequence
  derived and/or modified sequence
atggatgaggacggtctcgagctccagcaggagccaaatagctttttcgacgctactggagccgacggcactcacatggatggcgatcaaattgtcgtggaggtgcaagaaactgtgtttgtctccgatgtagtggactcagatatcacagtgcataattttgtgccagatgacccagacagcgtggtgatacaggacgtgatcgaggacgtggtgatcgaagacgttcagtgtccagatatcatggaagaggccgacgtctcagagactgtgatcattccagagcaagtgttagacagcgacgtcaccgaggaggtaagcctcgcccactgcactgtgcctgacgacgttcttgcgagcgacattactagcgcttctatgagtatgcccgaacatgtgttaaccggggattccattcacgtcagcgatgtagggcacgtggggcatgtgggacacgtggagcatgtggtacatgacagcgtagtggaagcggaaatagtcaccgaccctctgaccactgacgtagtgagtgaagaagtgttggtcgccgattgcgccagtgaagccgtcatagatgctaatggcatacctgttgaccaacaggacgatgataagggcaactgtgaagactatctgatgatctctctggacgacgctggcaagattgagcatgacgggtcttctggcatgacaatggacactgaaagcgagatcgacccgtgcaaagtagacgggacctgtcccgaggtcattaaagtgtatattttcaaggccgaccccggagaagatgatcttggcgggaccgtagatatcgtcgagtccgagcccgagaatgaccatggagttgagctgttggatcagaactcatctattagagtgccccgcgagaaaatggtctatatgaccgtcaacgactcccagccagaggacgaagaccttaatgtggcagagattgccgatgaagtctatatggaggtgatcgttggggaggaagacgctgccgcagcagcggccgccgctgccgttcatgaacagcagatggacgataacgaaatcaagacattcatgcctatagcctgggccgccgcctacggcaataactcagacggcattgaaaatagaaacggtaccgcctcagctcttcttcacattgatgaatctgcagggctcggcaggcttgcaaagcagaagccgaaaaaacggagacgacccgactcaagacagtatcaaactgccatcatcatcggacccgatgggcaccccttgacggtatacccatgcatgatctgcggcaagaaatttaagtcaagagggtttttgaaacggcatatgaagaatcatcctgaacacctggccaaaaaaaaatatcggtgcaccgactgcgattacacaacaaataagaaaatcagtttgcacaatcaccttgaaagtcacaaactcacatccaaggcagagaaggctattgagtgtgacgaatgtggaaagcatttctcacacgctggagccctgttcacacacaaaatggtccacaaggagaaaggagctaataagatgcacaaatgtaagttttgcgagtacgagaccgccgaacaggggctactgaatagacacctgctagcggtccatagcaagaattttccacatatttgtgtcgagtgtggtaaggggtttcggcatccctcagaactgaagaaacatatgaggatccacaccggggagaagccttaccaatgccagtactgtgaataccgaagtgccgactccagtaacctgaagacacacgtgaagacgaaacattccaaagagatgccatttaagtgtgacatctgcctcctgaccttttcagacaccaaggaggttcagcagcatgcactgatccaccaagaatctaagactcaccagtgtctgcactgtgatcacaagagcagtaattctagcgacttgaagcgccacatcatatcggtccataccaaggactacccccacaagtgcgatatgtgtgacaaaggctttcaccggccctccgaactgaaaaaacatgtggcagcccacaagggtaagaagatgcaccagtgtcggcactgtgatttcaaaattgctgaccccttcgtgctgtccagacatatcctttctgtacacaccaaagatctgcccttcaggtgtaaacgatgtaggaaagggttccggcagcagtctgaactcaaaaagcacatgaaaacacactccgggagaaaggtgtaccaatgtgaatattgtgaatattctactacagacgcatccggcttcaagcgccatgtgatctccatccatacaaaggactaccctcaccggtgtgaatattgtaaaaagggtttccgtcgcccgtcagagaagaatcagcatataatgagacatcacaaagaggttgggctcccatag

SEQ ID NO: 285279 - DNA, 2418 bp, Artificial Sequence
  derived and/or modified sequence
atggatgaggatggactggagctgcagcaagaacctaattcgttcttcgacgcaactggagcagacggtacccatatggatggggaccagattgttgtggaggtacaggagaccgtgtttgtgtccgacgtggtggattccgatattaccgtgcacaattttgtgcccgacgatcccgacagcgtagtgatccaggacgtaattgaagacgtcgttatcgaggatgttcagtgcccggatatcatggaggaagctgatgtcagcgaaacagtgataatcccggagcaagtattagactccgacgtgaccgaggaggtgtcccttgcccattgtaccgttccagacgacgtcctggcctctgatatcacgagcgcgtccatgtccatgcccgaacatgttctgacaggtgattccattcacgtgagcgacgttggccatgtggggcacgttgggcacgtcgagcacgtcgttcacgactccgtcgtcgaggccgagattgtgacagatcctctgacaactgacgtggtctccgaagaggttttagtagccgactgcgcaagcgaagccgttattgatgctaatggtatccccgtggaccagcaggatgatgataaagggaactgcgaagactacttaatgatttctcttgacgatgccggcaaaatcgagcacgatggcagttctggcatgactatggataccgagtcagaaattgacccttgtaaagtggatgggacctgccctgaggtgataaaggtttacatttttaaggcggatcctggcgaagacgatctcggcggcactgttgatatcgtggagtcggagcctgaaaatgaccatggcgtcgaacttctggaccagaactcatcgattagagtgcctagggagaagatggtgtacatgacagttaacgattcacagcccgaggacgaggatttgaatgtggcggagattgcggatgaggtgtatatggaagtgattgtgggtgaggaggacgctgctgctgctgctgcagctgcagctgtccatgagcaacagatggacgataatgaaattaagactttcatgcctatcgcctgggcagcagcttatgggaacaattccgacggaatcgaaaatcgcaatgggaccgcatccgcactgctccacattgatgaatctgctggccttggacgtttggcaaagcaaaagccaaaaaaacggcgtagacccgacagccggcagtatcagactgccataattatcggtcctgacggccatccactgactgtctatccatgtatgatctgtggtaagaagtttaagtcccggggattcttgaaaaggcacatgaagaaccaccctgagcacttagctaagaaaaagtatagatgcacagattgtgactacacaactaacaaaaagatttcactgcacaatcatctggagagtcataagctgacatcaaaggccgagaaggccattgagtgcgacgagtgtggcaagcactttagccacgccggtgccctgttcacgcacaaaatggtacataaggaaaagggtgccaataagatgcacaagtgcaaattctgcgaatacgagaccgccgaacagggactgctgaatcgtcatctgcttgcagttcatagcaaaaatttcccccacatctgcgttgagtgtggaaaagggtttagacacccaagcgaattgaagaagcacatgcggatacacaccggtgagaaaccatatcagtgtcagtattgcgagtaccgatccgcagatagcagcaacttaaagacacacgtgaaaaccaagcatagcaaagagatgcctttcaagtgtgatatttgtcttcttactttcagcgatactaaagaagtgcagcaacacgctttgatccatcaagaaagcaagacacaccagtgcctgcactgcgaccataaatcttctaattcttctgacctgaagagacacattatttccgtacacactaaggattacccccacaagtgcgacatgtgtgacaagggattccatcgcccttctgaactcaaaaaacatgttgccgcacacaagggcaagaaaatgcatcagtgtcggcactgcgacttcaagattgcagacccatttgtgctctccagacacattctgtccgtgcacacaaaagatttgcctttcaggtgcaagaggtgtagaaaaggttttaggcaacaaagcgaattaaagaaacacatgaagactcacagcgggaggaaagtttatcaatgcgagtattgcgagtatagcactactgacgccagcggttttaagagacatgtcatttctattcacacgaaggactacccacaccgttgtgagtactgcaagaaaggcttccgacgccctagcgaaaagaaccagcacatcatgcgacaccataaggaggtgggcctcccctag

SEQ ID NO: 285280 - DNA, 2418 bp, Artificial Sequence
  derived and/or modified sequence
atggatgaagatggcctggagctgcagcaggagcccaacagcttctttgatgccactggagcagatggcacccacatggatggagaccagatcgtggtggaggtgcaggagaccgtgtttgtgtctgatgtggtggacagcgacatcaccgtgcacaactttgtgcctgatgatcctgattctgtggtgatccaggatgtgattgaagatgtggtgattgaagatgtgcagtgcccagacatcatggaggaggctgatgtgtctgagaccgtcatcatccctgagcaggtgctggacagtgatgtgacagaggaggtgtccctggcccactgcaccgtgcctgatgatgtgctggccagtgacatcaccagcgcctccatgtccatgcctgagcacgtgctgactggagacagcatccacgtgtctgatgtgggccacgtgggccacgtgggccacgtggagcacgtggtgcatgacagcgtggtggaggccgagatcgtgacagaccccctgaccacagatgtggtgtctgaggaggtgctggtggccgactgtgccagcgaggccgtgattgatgccaacggcatccctgtggaccagcaggatgatgacaagggcaactgtgaggactacctgatgatcagcctggatgatgctgggaagattgaacatgatggcagcagcggcatgaccatggacacagagagcgagattgacccctgcaaggtggatggcacctgcccagaggtgatcaaggtgtacatcttcaaggctgaccccggggaggatgacctgggcggcaccgtggacatcgtggagagcgagccagaaaatgaccacggcgtggagctgctggaccagaacagcagcatccgggtgccccgggagaagatggtgtacatgacagtgaatgacagccagccagaagatgaggacctgaatgtggccgagattgctgatgaggtgtacatggaggtgattgtgggggaggaggatgctgctgctgctgctgctgctgctgctgtgcatgagcagcagatggatgacaatgagatcaagaccttcatgcccatcgcctgggccgccgcctacggcaacaacagtgatggcatcgagaacagaaatggaacagccagcgccctgctgcacattgatgaatctgctggcctgggccgcctggccaagcagaagcccaagaagagaagaagaccagacagccggcagtaccagacagccatcatcattggaccagatggccaccccctgactgtgtacccctgcatgatctgtgggaagaagttcaagagccggggcttcctgaagaggcacatgaagaaccaccctgagcacctggccaagaagaagtaccgctgcacagactgtgactacaccaccaacaagaagatcagcctgcacaaccacctggagagccacaagctgaccagcaaggccgagaaggccattgaatgtgatgaatgtgggaagcacttcagccacgccggggccctcttcacccacaagatggtgcacaaggagaagggggccaacaagatgcacaagtgcaagttctgtgaatatgaaacagctgagcagggcctgctgaacagacacctgctggccgtgcacagcaagaacttcccccacatctgtgtggagtgtgggaagggcttccgccaccccagcgagctgaagaagcacatgaggatccacactggagagaagccctaccagtgccagtactgtgagtacagatctgctgacagcagcaacctgaagacccacgtgaagaccaagcacagcaaggagatgcccttcaagtgtgacatctgcctgctgaccttcagtgacaccaaggaggtgcagcagcacgccctgatccaccaggagagcaagacccaccagtgcctgcactgtgaccacaagagcagcaacagcagtgacctgaagaggcacatcatctctgtgcacaccaaggactacccccacaagtgtgacatgtgtgacaagggcttccaccggcccagcgagctgaagaagcacgtggccgcccacaagggcaagaagatgcaccagtgccgccactgtgacttcaagattgctgacccctttgtgctgagccgccacatcctgtctgtgcacaccaaggacctgcccttccgctgcaagcgctgcaggaagggcttccggcagcagagcgagctgaagaagcacatgaagacccacagcggcaggaaggtgtaccagtgtgagtactgtgagtacagcaccacagatgccagcggcttcaagagacatgtgatcagcatccacaccaaggactacccccaccgctgtgagtactgcaagaagggcttccggcggcccagcgagaagaaccagcacatcatgaggcaccacaaggaggtgggcctgccctag

SEQ ID NO: 285281 - DNA, 2268 bp, Artificial Sequence
  derived and/or modified sequence
atggatgaagatggcctggagctgcagcaggagcccaacagcttctttgatgccactggagcagatggcacccacatggatggagaccagatcgtggtggaggtgcaggagaccgtgtttgtgtctgatgtggtggacagcgacatcaccgtgcacaactttgtgcctgatgatcctgattctgtggtgatccaggatgtgattgaagatgtggtgattgaagatgtgcagtgcccagacatcatggaggaggctgatgtgtctgagaccgtcatcatccctgagcaggtgctggacagtgatgtgacagaggaggtgtccctggcccactgcaccgtgcctgatgatgtgctggccagtgacatcaccagcgcctccatgtccatgcctgagcacgtgctgactggagacagcatccacgtgtctgatgtgggccacgtgggccacgtgggccacgtggagcacgtggtgcatgacagcgtggtggaggccgagatcgtgacagaccccctgaccacagatgtggtgtctgaggaggtgctggtggccgactgtgccagcgaggccgtgattgatgccaacggcatccctgtggaccagcaggatgatgacaagggcaactgtgaggactacctgatgatcagctgtggcaccgtggacatcgtggagagcgagccagaaaatgaccacggcgtggagctgctggaccagaacagcagcatccgggtgccccgggagaagatggtgtacatgacagtgaatgacagccagccagaagatgaggacctgaatgtggccgagattgctgatgaggtgtacatggaggtgattgtgggggaggaggatgctgctgctgctgctgctgctgctgctgtgcatgagcagcagatggatgacaatgagatcaagaccttcatgcccatcgcctgggccgccgcctacggcaacaacagtgatggcatcgagaacagaaatggaacagccagcgccctgctgcacattgatgaatctgctggcctgggccgcctggccaagcagaagcccaagaagagaagaagaccagacagccggcagtaccagacagccatcatcattggaccagatggccaccccctgactgtgtacccctgcatgatctgtgggaagaagttcaagagccggggcttcctgaagaggcacatgaagaaccaccctgagcacctggccaagaagaagtaccgctgcacagactgtgactacaccaccaacaagaagatcagcctgcacaaccacctggagagccacaagctgaccagcaaggccgagaaggccattgaatgtgatgaatgtgggaagcacttcagccacgccggggccctcttcacccacaagatggtgcacaaggagaagggggccaacaagatgcacaagtgcaagttctgtgaatatgaaacagctgagcagggcctgctgaacagacacctgctggccgtgcacagcaagaacttcccccacatctgtgtggagtgtgggaagggcttccgccaccccagcgagctgaagaagcacatgaggatccacactggagagaagccctaccagtgccagtactgtgagtacagatctgctgacagcagcaacctgaagacccacgtgaagaccaagcacagcaaggagatgcccttcaagtgtgacatctgcctgctgaccttcagtgacaccaaggaggtgcagcagcacgccctgatccaccaggagagcaagacccaccagtgcctgcactgtgaccacaagagcagcaacagcagtgacctgaagaggcacatcatctctgtgcacaccaaggactacccccacaagtgtgacatgtgtgacaagggcttccaccggcccagcgagctgaagaagcacgtggccgcccacaagggcaagaagatgcaccagtgccgccactgtgacttcaagattgctgacccctttgtgctgagccgccacatcctgtctgtgcacaccaaggacctgcccttccgctgcaagcgctgcaggaagggcttccggcagcagagcgagctgaagaagcacatgaagacccacagcggcaggaaggtgtaccagtgtgagtactgtgagtacagcaccacagatgccagcggcttcaagagacatgtgatcagcatccacaccaaggactacccccaccgctgtgagtactgcaagaagggcttccggcggcccagcgagaagaaccagcacatcatgaggcaccacaaggaggtgggcctgccctag

SEQ ID NO: 285282 - DNA, 2418 bp, Artificial Sequence
  derived and/or modified sequence
atggacgaggacggcctggagctgcagcaggagcccaacagcttcttcgacgctactggcgctgatggtacccacatggacggggaccagattgtggttgaagttcaggagacagtattcgtctctgacgtcgtggatagcgacatcaccgtgcataatttcgtacccgacgatcccgatagcgtggtcatccaggacgtgattgaagacgtcgtgatcgaggacgtccaatgcccagacattatggaggaggcagacgtgtccgagacagttattattccggagcaagttctagatagtgacgtcacagaggaggttagtctggcccactgtacagtcccagatgacgtgctggcctcggatatcactagtgccagcatgagcatgcctgagcacgtcctgactggggattccattcatgtgagcgacgtgggccacgtcgggcatgttggccatgttgagcacgtggtgcatgattcagtagtcgaagcagagattgttacggaccccctgactaccgacgtggtcagcgaagaggtcttggtggcggactgtgcctcggaggcggtgatagacgctaatggaattcccgtggaccagcaggacgatgataagggtaactgcgaggactatctcatgatcagtttggatgacgccgggaaaattgagcacgacgggtcttcaggaatgactatggatacagaatcagaaatcgacccttgcaaggtcgacggcacatgtcctgaggtgattaaggtgtacatctttaaggccgatcctggcgaagacgacctggggggtacagtggatatcgtggagagtgagcccgagaacgaccatggggtggaattgttggaccagaattcttcaatccgggtgccacgcgagaagatggtctacatgactgtaaacgatagtcagcccgaagacgaggatttgaacgtcgctgagattgccgacgaggtgtacatggaggtgattgtgggcgaagaggacgccgctgccgccgcagccgctgccgccgtccacgaacagcaaatggacgataacgaaattaaaacctttatgcccatagcctgggcagccgcatatggaaacaactcggatgggatagaaaatcggaatggaactgctagtgctctgcttcatattgatgaatccgctggacttggtcgtctggctaagcagaagcccaaaaaacgacggaggccggatagcaggcagtatcagacagctatcattatcggcccagatgggcaccccttaacggtgtacccttgcatgatctgcggcaagaagtttaaaagcagaggctttctgaagcgccacatgaagaatcacccggagcatttggctaaaaaaaaataccgttgtacggattgcgattacactactaacaagaagatctctctgcataatcacctggagtcacacaagttaacttctaaagcagagaaggccatagaatgcgacgagtgcggcaagcactttagccatgcaggcgccttatttactcacaagatggttcataaagagaagggtgccaacaagatgcacaaatgcaagttctgtgagtacgaaactgcggaacaaggcctcctgaacaggcacctgttagccgttcatagcaagaacttcccccacatctgcgtggagtgcggaaagggctttagacaccctagcgagctgaagaaacacatgaggatccacaccggcgagaagccttatcagtgccagtactgcgagtatagatccgctgattcctccaatctcaaaactcacgtgaaaacaaaacacagcaaggagatgcctttcaagtgtgatatatgcctactgactttttccgataccaaggaggtccagcagcatgctctgatacaccaggaaagtaaaacgcaccagtgtctgcactgcgatcataagagcagcaactccagtgaccttaagcgtcatatcatttccgtgcacacaaaggattacccccataagtgtgacatgtgcgacaagggattccaccgcccgtccgagctgaaaaaacatgtagctgcccacaaaggaaaaaaaatgcaccagtgtcggcattgtgatttcaagatcgctgacccatttgtgctgtccagacacatcttgtccgtgcatacgaaggacctccccttccgatgcaagcggtgtagaaaaggattcaggcagcagtcggagctgaagaaacacatgaagacgcactctggccgtaaagtgtaccagtgtgagtattgcgaatactcaacaacagacgcctcaggcttcaaacggcacgtgatctcaatccacaccaaagattaccctcataggtgtgaatactgcaagaaagggttcagacggcccagtgaaaagaaccaacacattatgcgccaccacaaggaggtggggctgccatag

SEQ ID NO: 285283 - DNA, 2268 bp, Artificial Sequence
  derived and/or modified sequence
atggacgaggacggcctggagctgcagcaggagcccaacagcttcttcgatgcgactggggcagacggcacacatatggatggagatcagatcgttgtagaggtgcaagagaccgtcttcgtgagcgatgtagtcgacagtgatatcactgtgcataacttcgtgcccgatgaccccgactccgtagtgatacaagacgtcatagaggatgtggtgattgaagacgtgcagtgtcctgacatcatggaggaagccgacgtgagcgaaaccgtaatcatccctgagcaggtgttagactcagatgtaacggaagaagtctctttggcccactgtacggtgcccgatgacgtactcgcgtctgacatcaccagtgccagcatgtcaatgcccgaacatgttctcactggtgatagtatacacgtgtcagacgtaggtcacgtcggccatgtgggacatgtggaacatgtggtgcacgatagtgtcgtggaggcagaaattgttacagatcctttgaccacagatgtggtcagcgaagaggtgctcgtggcagattgcgcgtctgaggccgtcattgatgctaatggtatccccgtggaccagcaggatgacgacaaggggaattgcgaggactacctgatgatctcctgtgggaccgtcgacattgtggaatccgaaccagaaaacgatcatggagtggagttattagatcaaaactcaagcatcagggtcccacgggagaagatggtctatatgacagtgaacgactcccagccggaggatgaggacctgaacgttgccgaaattgccgatgaagtctacatggaggtgattgtgggcgaggaggatgccgctgcagcagctgcagccgcagctgtgcacgaacagcagatggacgacaatgagatcaagaccttcatgccaatcgcttgggccgctgcttatggcaataactctgacgggatcgagaaccggaacgggacggcatccgcattactgcatatcgatgaatctgcaggcctcgggcgattggcaaagcagaagccaaagaaacggaggcggccagactcccgccagtaccagactgctattatcatcggacccgacggacaccctctaactgtgtacccctgcatgatttgtggcaaaaaatttaagagcaggggtttcctgaagcgccacatgaagaatcatcctgagcatctggccaagaagaaataccggtgcaccgactgtgattacacaacgaataagaagatcagcctacataaccacttggagagccataaactcacatccaaggccgagaaagccattgagtgtgacgaatgcggcaaacatttctcacacgccggggctctgttcacacacaaaatggtgcataaagagaaaggagcgaacaaaatgcacaaatgcaagttctgcgaatatgaaacggctgagcagggattgctgaatcggcacctgctcgctgttcacagtaaaaattttccacatatatgcgtagagtgtggcaagggcttccgtcacccatctgagctgaaaaagcacatgcgtatccacaccggcgaaaagccttaccagtgtcaatattgcgagtatcgctcagcagacagcagcaatcttaaaactcatgtgaagactaagcacagcaaagaaatgccctttaagtgtgacatttgcttgctcaccttttccgacacgaaagaagttcagcagcacgccctgatccaccaggaaagtaaaactcaccaatgcctgcactgcgaccacaagtcgagcaactcttccgacctgaagcgacacatcatatctgtgcacaccaaagattatccacacaagtgtgatatgtgcgacaaaggattccatagacctagtgaactgaaaaaacatgtagccgcccataaaggaaagaagatgcaccaatgtagacactgtgatttcaagatagccgacccattcgtgctaagccggcacattctgtcggtccacaccaaagacctgccctttagatgtaagagatgtagaaaaggattccggcagcagtcggagttgaaaaagcacatgaaaacacattcaggccggaaagtttatcagtgtgaatactgtgagtacagcacgacagatgcatctggctttaaaaggcatgtcatttctattcatactaaagactatcctcaccgatgcgaatactgcaagaaaggatttcgcaggccctcagagaaaaatcagcatatcatgcggcaccacaaggaagtggggttgccttag

SEQ ID NO: 285284 - DNA, 2418 bp, Artificial Sequence
  derived and/or modified sequence
atggacgaggacggcctggagctgcagcaggagcccaacagcttcttcgacgccacaggggcggacggaactcacatggacggggaccagattgtggtagaggtgcaagaaacagttttcgtctctgatgtggtggatagcgatattacagttcataacttcgttcctgacgatccagactctgttgtgatccaggacgtgatcgaggacgtggtgattgaggacgtccaatgtcctgatataatggaagaggccgacgtctccgaaactgttataatcccagaacaggtcctggattccgacgtcactgaagaagtaagcctggcgcactgtacagttccagatgacgtgctggcctccgacattacctcagctagcatgtcaatgccagaacatgttctgactggggacagtatccatgtatcagacgtgggccatgtaggccacgttgggcacgtggagcacgtagtccatgattccgtcgtcgaggcagagatagtcacggatccgttgacgaccgatgtcgtgtccgaggaggtcctggtagctgactgtgcttctgaagccgtgatcgacgctaacggtatacctgtggaccagcaggatgacgataaaggcaattgtgaggattaccttatgatatcacttgatgacgccggcaagattgaacacgacgggagcagcgggatgaccatggataccgaatccgaaattgatccttgtaaagtggacggtacgtgcccagaggtcattaaagtgtacattttcaaagctgaccctggtgaagatgacctgggagggactgtggatatcgtggagtccgagcctgaaaacgaccatggcgtggagctgttggatcagaattctagcatacgcgtcccccgggagaagatggtgtatatgactgttaatgattcccagccagaagatgaagacctgaatgttgccgagatagccgacgaggtgtatatggaggttatagttggggaggaggatgccgccgccgcagcagctgccgccgccgtacatgaacagcagatggatgacaatgaaattaagaccttcatgccaatcgcctgggccgcagcttacggcaacaacagcgacggcatcgagaatagaaatggcacagcgtcagcactgctgcatatcgatgagtctgcgggccttggacggcttgccaaacagaagcctaagaagcgtcggaggcctgactctagacagtatcagaccgccattatcatcggccctgatgggcatccattgacagtttacccttgtatgatctgtggcaagaagttcaaaagcagagggtttttgaagcgtcacatgaagaaccaccccgagcacctagccaaaaaaaaatatcggtgcaccgactgcgactacacaacaaataaaaaaatttcgcttcataaccacctggagtcccataagctcaccagtaaagccgagaaggcaatagaatgcgacgagtgcggaaagcatttttcacacgccggagccctgtttacccacaagatggtccacaaagaaaaaggcgctaataaaatgcacaaatgtaaattttgtgagtacgagaccgccgaacaggggctactgaatagacatctcctggctgtacattctaaaaattttccacacatctgcgttgagtgcgggaaaggctttcggcacccaagtgagttaaaaaagcacatgagaattcacacgggggagaagccatatcaatgccaatattgtgagtatcggtcagctgatagcagcaacctcaaaacccacgtaaaaaccaaacactcgaaggaaatgcccttcaaatgtgacatctgcctcctgacattcagtgataccaaagaggtgcagcaacatgcgctgatacaccaggaatcaaagacccatcagtgcttgcactgcgaccacaagagctctaactcctctgacctgaaaagacatataatatcggtacataccaaggactaccctcacaagtgtgacatgtgtgacaaaggcttccacagacccagtgagttaaagaagcacgttgctgcacacaaaggcaagaaaatgcaccagtgtaggcattgcgatttcaagattgccgacccattcgtgctgagccggcatatactgagcgttcacaccaaggaccttccattccggtgtaagcgatgcaggaaaggtttcagacagcagagcgagctgaaaaaacacatgaaaacacattctggaaggaaggtttatcagtgcgaatactgtgaatatagtactactgatgcatccggattcaaacggcacgtaatctccattcacactaaggactacccccaccgatgcgaatactgcaagaagggatttagaaggccctctgaaaaaaatcagcacatcatgcggcaccacaaggaagtcggtcttccctag

SEQ ID NO: 285285 - DNA, 2418 bp, Artificial Sequence
  derived and/or modified sequence
atggacgaggacggcctggagctgcagcaggagcccaacagcttcttcgatgcaactggagccgacggaacacacatggatggcgaccagatagtggtagaagtacaggaaaccgtgttcgtctcagatgtcgtggactctgatattacggtgcacaatttcgtgcctgacgaccctgactctgttgtgattcaggacgttatagaagatgtggtgattgaggacgtccaatgtccagacatcatggaggaagccgacgtgtcagagacggtcattatcccagaacaggtgctggacagtgatgttaccgaggaggtcagcttagcacactgcacagtacctgacgacgtgctggccagcgacatcacctccgccagcatgtcaatgcccgaacatgttctgaccggcgactcaattcacgtttcagatgtggggcacgttggccacgtagggcacgttgagcatgttgtgcacgacagcgtggtggaagctgagatcgtgactgatcctcttaccactgatgtggtctcagaggaagtattggtggctgactgcgcctccgaggccgtcatcgatgcaaacggaatcccggtcgaccaacaagacgatgataagggcaactgtgaggattatttgatgatcagcctggatgatgccgggaaaattgagcacgacgggtcatccggaatgactatggacaccgaatcggagatcgatccttgcaaagttgacggtacatgccccgaggttatcaaagtgtatatctttaaagcagatccaggtgaggacgatctcggaggtaccgtcgatatagtggagagtgagccagaaaatgatcacggcgtagagctacttgaccagaactcctccattagagttcctagagagaagatggtgtatatgacagtgaatgactctcagccggaagatgaagaccttaacgtcgctgagattgccgatgaagtctacatggaggtcatagtcggggaagaggatgccgcagccgctgccgccgccgctgcagtgcatgaacaacagatggacgacaacgaaattaaaaccttcatgcctatcgcctgggccgcagcatatgggaacaactctgacggaattgagaaccgcaatgggactgcctccgctcttcttcatatcgatgaatcagctggcctcgggaggctggctaagcagaagccaaagaagaggcgacgaccagattctcggcagtatcagaccgccatcatcattggccctgacgggcatcctttaactgtttatccatgcatgatttgcggcaaaaagttcaagagtcgggggttcttgaagagacatatgaagaatcatcctgagcatcttgctaagaaaaaatacagatgtacggattgcgactacaccacaaacaagaagatatctctgcacaaccacctggagtctcacaagctgacctccaaggcagagaaggcgattgaatgcgacgaatgtggaaaacacttttcccatgccggggcactattcacccacaagatggtgcacaaagagaagggcgctaacaagatgcacaaatgcaaattttgcgaatatgaaactgctgagcaggggctgctaaaccggcacctactggccgtacactcgaagaacttcccacacatttgtgtggaatgcgggaaaggttttcggcaccctagcgaactcaagaaacatatgagaattcacactggggaaaagccctatcaatgccagtattgtgaataccgttcagccgattcttccaacctgaaaacacacgtgaaaacaaagcattcgaaggaaatgccattcaaatgtgacatatgcttgttgaccttcagcgatactaaggaggttcaacagcacgctctgattcatcaggagtcaaaaactcatcagtgcttacattgtgatcacaagtctagtaattcttcagatttaaaacggcacattatctctgtgcacacaaaagactatccccacaaatgtgacatgtgtgataaaggcttccatcgcccaagcgaactgaagaagcacgtggccgcacataaaggaaagaaaatgcaccagtgtcggcattgcgacttcaaaattgccgatccttttgtgttatccagacatatactgtccgtccacaccaaagacttgccatttcgatgcaagagatgcagaaagggattccggcagcagtcggaattgaaaaaacacatgaaaacccattcaggccggaaagtgtaccagtgtgaatactgtgaatactccaccacagacgcgagcggcttcaagcggcacgttataagcattcatactaaggattaccctcaccgttgtgagtactgcaaaaaaggttttcggcgcccttctgagaaaaaccagcacattatgaggcaccataaggaggtaggattaccttag

SEQ ID NO: 285286 - DNA, 2418 bp, Artificial Sequence
  derived and/or modified sequence
atggatgaggatggactcgaacttcagcaggaaccaaactctttctttgatgcaacaggcgcagatggcacgcacatggacggggatcagatcgtcgtagaggtgcaggaaaccgtctttgtatctgacgtggtagactcagatattacagtgcataactttgttccagacgatccggatagcgtggtgattcaagatgtaatcgaagacgtcgtcatcgaggacgtgcagtgtcccgacattatggaggaagctgacgttagcgaaacagtgataatcccagagcaggtgctggattccgacgtcaccgaagaggttagtcttgcacactgtacagtacccgatgacgtattagcctcagatataaccagcgcctccatgagcatgcctgaacatgtcctaaccggcgattccattcacgtgtccgacgtcggacacgtgggccacgtcggtcatgtggagcacgtcgttcatgattctgtggttgaggccgaaatagtgaccgatcctttgacaaccgatgtagtttctgaggaggtcctggtggctgactgtgcttccgaggcggtgattgacgcaaatggcatccccgtggatcagcaggacgacgataaaggcaactgcgaggattaccttatgatctctttggacgatgcaggcaagattgaacatgatggaagctctggaatgacaatggataccgaaagcgaaatcgacccctgcaaggtggatgggacctgtccagaagtcattaaagtgtatatcttcaaagcagaccccggtgaggacgatctcggaggaacggtggacatcgtcgagtcagaacccgaaaatgaccatggagtggagctgctggaccaaaactcttccattcgcgtcccacgtgaaaagatggtatacatgaccgttaatgactcgcagcctgaggatgaagacttaaacgtcgcagagatcgccgacgaggtttatatggaggtgattgtcggagaggaggatgccgcagccgcagcggctgccgctgctgtgcatgagcaacagatggatgacaacgaaatcaagacgttcatgccgatcgcttgggccgcagcatacgggaataactccgacgggatcgagaatcgtaacggcacagcatcagccctgttgcacatcgacgagtccgcaggactgggtaggctcgcgaagcagaaaccaaaaaagaggcggcgacccgactctagacaataccagactgcaatcatcatcggtcctgacggtcatccgcttacagtgtacccttgcatgatctgcggaaaaaagttcaaaagtcggggtttcctaaaacggcacatgaagaatcatcctgaacatctcgccaagaagaaataccggtgcaccgattgcgactatactacaaacaagaaaatcagtcttcataatcatctggaatctcacaaactgacatctaaggccgagaaggcaatagagtgcgatgagtgtgggaagcatttttctcacgccggagccctctttacacacaagatggtacacaaggagaaaggagcaaataagatgcacaagtgtaagttctgtgaatacgagacagcagaacaaggtctgttaaatcgacatctgttggcggtgcacagcaaaaacttccctcatatctgtgtggagtgcgggaagggcttcagacacccatctgagctgaagaaacacatgcgaattcacactggagaaaagccctaccagtgccaatattgtgaatataggagtgctgattcttccaacctcaaaacacacgtgaagacaaaacactcgaaggagatgcccttcaagtgcgacatctgcctgctcacattttccgataccaaggaagtccaacaacatgccttaattcaccaagagagcaaaacacaccagtgccttcactgcgatcataaaagttctaattcttctgacttaaaaaggcacatcatcagcgtgcacaccaaggattatccacacaaatgcgacatgtgcgacaagggattccacaggccaagcgagctcaagaaacacgtggctgctcataagggcaaaaagatgcatcagtgtagacactgcgatttcaaaatcgctgatccattcgtgctgagcaggcatatcctgagcgtccatacaaaagaccttccattccgctgtaaacgctgccgcaagggctttaggcagcaatctgaactgaagaagcatatgaaaactcattctggcagaaaagtttaccagtgcgaatattgtgaatactccacaacagacgcttcaggattcaaacgccacgtgatttccattcatacaaaagattaccctcacagatgcgaatattgcaagaaaggattcagaaggcccagcgaaaaaaatcagcacatcatgcgtcaccataaagaggtgggcttgccctag

SEQ ID NO: 285287 - DNA, 2268 bp, Artificial Sequence
  derived and/or modified sequence
atggacgaagatggactggagctgcagcaagaaccgaattcatttttcgacgcgaccggagccgacggaacacacatggacggcgatcagatagtcgtagaggtccaggagactgtcttcgtgtctgacgtggtagactctgacatcacagtccacaatttcgtaccagacgaccccgactccgtcgtcatccaggatgtgattgaggatgtagtgattgaagacgtgcagtgtcctgatattatggaagaggctgatgtatcggagactgtgatcatacccgagcaggtgttggactccgacgtcaccgaagaggtgtcgctagctcactgtaccgttccagacgacgttctggcatccgacattaccagtgcctctatgtcaatgccagaacacgttcttaccggggatagcatccatgttagtgacgtaggccatgtggggcacgttgggcacgtggagcatgtggttcacgatagcgtagtggaggccgaaatcgtcaccgatcccctcaccaccgacgtcgtgtctgaggaagtgcttgtggcagactgtgctagcgaggcggtcattgatgcaaacggtatccctgtcgaccaacaagatgacgacaaaggcaattgcgaggattatctaatgatatcttgtggcactgtcgacattgtggagtccgaaccagaaaatgaccacggcgtggagctcttggaccagaactcgtcaatcagggttccccgagagaagatggtgtacatgaccgttaacgactcacagcccgaggacgaggacctaaacgttgccgagattgccgacgaggtgtacatggaagtgatcgttggggaggaggatgcggctgccgcagccgcagctgctgcggtacatgagcagcagatggatgataacgaaatcaagactttcatgcctatcgcttgggccgctgcctacggcaataacagtgatggcatagagaaccggaatggaaccgcgagtgctttgctgcacattgacgaatcagcaggcctggggagactggccaagcagaagccgaaaaagaggcgaaggcccgactcaagacagtaccagacagccattataataggacccgatggccatccgttgactgtgtatccatgtatgatttgcgggaaaaagttcaagtcaagaggatttttaaagaggcatatgaaaaaccaccccgaacaccttgctaaaaagaaataccggtgtacagactgcgattacacaaccaataagaaaatcagccttcacaatcatctggagtctcataagttgacctcaaaggcggaaaaggcaatagaatgcgacgaatgtgggaaacacttctcacacgctggtgccctgtttacccacaagatggtgcataaggagaaaggtgcaaataagatgcacaaatgcaaattctgtgagtatgagacagcggaacaggggctcctgaatagacatctactggccgtccactctaaaaactttccccacatttgtgtggagtgcggaaaggggttccggcacccttctgaactgaagaaacacatgagaatccatacgggagagaaaccatatcagtgccagtactgcgagtatcggtcagccgacagctctaacctgaagacacacgtcaagacaaaacattcaaaagaaatgccttttaaatgcgacatctgcctcttaaccttctcagatacaaaggaagtgcagcaacacgccttgattcatcaggaatcgaagactcaccaatgcctgcattgtgaccataaaagtagcaactcttctgacctgaagaggcatatcatttctgtccataccaaggattatccacacaagtgtgatatgtgtgataaaggctttcatcgcccaagcgagctaaagaaacacgtcgctgcccacaagggaaagaagatgcatcagtgccgacactgcgattttaagatagcagaccccttcgtcttatcccggcatatattgtccgtgcacactaaggacctgcctttcagatgcaagaggtgccgcaaaggttttaggcagcagtctgagctgaaaaaacatatgaagacccactccgggaggaaggtctatcagtgtgaatactgcgaatattctaccactgacgcatccggatttaagcgtcatgtcatctctatacatacaaaggattacccacacaggtgcgaatattgcaagaaaggcttcagaaggccaagtgaaaagaaccagcacatcatgaggcaccataaggaagtgggcctcccttag

SEQ ID NO: 285288 - DNA, 2418 bp, Artificial Sequence
  derived and/or modified sequence
atggacgaagacgggctcgaattgcagcaggaaccaaacagtttttttgatgcaaccggggcagatggaacgcacatggatggggaccagattgtggtagaagtgcaggagactgtgtttgtctccgacgttgtggacagtgacatcacagtgcacaatttcgtccccgacgatcctgacagcgtagtgattcaggacgtgatagaagatgtggtcatcgaagatgtccaatgcccggacataatggaggaggccgatgtcagcgaaacagtgatcatcccagagcaggtgcttgacagcgacgtcacagaggaagtgtcgcttgcgcactgtactgttcccgacgacgtgcttgcttctgatataacatctgccagcatgagcatgcctgagcacgtgcttaccggggactccattcatgtgagcgatgttggccatgtgggccacgtggggcatgtagagcatgttgtccacgatagtgtggtcgaagcggagatcgtaactgaccctttgaccaccgatgtcgtaagtgaggaagttctggtggctgattgtgcatccgaagctgtcattgatgcaaatggtatccctgttgatcagcaggacgatgacaagggtaattgtgaggactacctcatgatctccctggatgacgccggaaagattgagcatgacggaagttctggaatgacaatggatacagaatctgagatcgatccatgcaaggtggatggtacctgtcctgaggtcatcaaagtatatatcttcaaggccgaccctggagaagacgaccttgggggtacagttgatattgtggagagcgaacccgagaatgaccatggagttgaactacttgatcagaatagcagcatccgagtgcctcgcgaaaagatggtttatatgacagtgaatgacagccaacctgaggatgaagatctcaacgtggccgaaatagccgacgaggtgtacatggaggtcatagtaggcgaggaggacgcagcagccgctgcagcagccgcagccgttcatgagcaacaaatggatgataatgaaatcaagacattcatgccaattgcctgggctgcggcatacgggaataattctgacggcattgagaacagaaacggcacagcaagcgccctgttgcacatcgatgagtcggccggtttagggaggctagccaaacaaaagcccaagaaacgccgaagaccagacagcagacaataccagacagccatcatcattggcccagacggtcatcccctgaccgtctacccctgcatgatatgcggaaaaaagtttaagagccgcggtttcctaaagcgacatatgaagaatcatcctgaacacctggccaagaagaagtaccgctgcaccgattgcgactacaccactaacaaaaagatttcgttgcacaaccacttagaaagccataagctgacgtctaaggccgagaaagcaattgaatgtgatgagtgtggaaaacatttctcacacgcaggcgctctctttacccacaaaatggtgcataaggaaaagggtgctaacaagatgcacaagtgtaaattttgtgagtacgaaactgccgaacaaggactcctgaaccggcaccttcttgccgttcacagcaagaatttcccccatatctgcgtagagtgcggaaagggatttagacatcccagcgaactgaagaaacatatgaggattcacaccggtgaaaaaccgtaccagtgccagtattgcgagtatagaagcgcagattccagtaatctcaaaacacatgtgaaaaccaagcattcaaaagaaatgccgttcaagtgtgatatctgcctgctcacattctccgatacgaaggaggtccagcagcatgcgttaatccatcaggaaagcaagacccaccagtgcctgcattgcgaccacaagtcttcaaactcgtcagatctgaagaggcacataatcagtgtccatactaaggattacccacacaagtgcgatatgtgcgataaaggatttcaccgcccttcagagctaaaaaagcatgtcgcagcccacaagggtaaaaagatgcaccagtgcaggcattgcgatttcaagatagccgatccattcgtgctctctcgacatattctgtccgtgcacacgaaagatttaccctttagatgcaaacggtgtagaaagggcttccgacagcagtctgagcttaaaaagcatatgaagacacactcaggacggaaggtctaccagtgcgagtattgcgagtattccacaaccgatgctagcggatttaagcgtcatgtcattagcattcataccaaggactatccacaccgttgtgagtactgcaagaagggattcagacgcccatccgagaagaaccaacatataatgaggcaccacaaggaagtcggtctcccttag

SEQ ID NO: 285289 - DNA, 2418 bp, Artificial Sequence
  derived and/or modified sequence
atggatgaagacggactggagctgcagcaagagcccaactcattttttgatgctaccggtgcagacggtacccacatggacggcgaccagattgtggtggaggttcaagagactgtcttcgtctccgatgtagttgacagtgatatcacagtgcataactttgtgcctgatgatccagactccgtggtcatccaagacgtcatcgaggacgtggtgattgaagacgtccagtgtcccgacattatggaagaagctgatgtaagcgaaacggtgatcatacctgaacaggtgctggattctgatgtcaccgaggaagtctctcttgctcactgcaccgtcccagacgacgtcctggcctcagatattacctccgccagtatgtcaatgcctgaacacgtcctgacaggtgacagcatccatgtaagcgatgtgggacatgtaggccacgtcggtcacgtcgaacatgtcgtccatgatagcgtagtggaggcagagatagtgactgatccattgactactgacgtggtgtctgaggaggtattagttgctgactgtgcttccgaagccgtgatagatgccaacggcatccccgttgatcagcaggacgatgataaagggaactgcgaggactacctgatgatatcgctggacgacgcaggcaaaatcgaacatgatggctcatcggggatgaccatggacacggaatccgaaattgatccatgtaaggtagatggtacttgtcccgaagttataaaggtgtatatcttcaaggccgatcccggagaggacgatctcggcggaacagtggacatcgtcgaatcagagccagaaaatgaccacggagtcgagctgctagatcagaatagtagcatcagggtaccgagggagaagatggtgtatatgactgtgaacgacagtcagcctgaggacgaagacttaaatgtcgccgaaatagccgatgaggtatatatggaggtgattgtgggtgaagaagatgccgcagctgccgctgcggcagcagccgttcatgaacagcagatggacgataatgagataaaaacgtttatgcctattgcgtgggccgcagcctatggcaacaacagtgacgggatagagaacagaaatggcacagcctccgcactcctgcatatagatgagtcagccggtctcggacggctcgcgaagcagaaaccaaaaaaaaggcgcaggcctgactctagacagtatcagacagccattataattggaccagacggtcaccctctcactgtgtacccttgcatgatttgcggcaaaaaatttaaatctcgcggttttcttaagaggcatatgaaaaaccatccggaacacctggcaaaaaagaaataccgctgcacagattgcgattacacaaccaacaagaagattagccttcataatcacctagagtcccacaaactgacatccaaagccgagaaggctatcgagtgcgatgaatgtgggaagcactttagccacgctggtgctttatttacacataagatggtccataaggaaaagggtgcgaataaaatgcataagtgtaagttttgtgaatatgagaccgcggagcagggtctgctcaataggcatctcctggcggtgcattctaagaatttccctcatatctgcgttgaatgtggtaagggctttcgccaccccagcgaactgaagaaacatatgcgcatccatactggagaaaaaccttaccaatgccagtactgcgaatatagaagtgccgactcttccaatctgaagactcatgttaagactaagcattctaaagaaatgccttttaagtgcgatatctgcctgctgacgttctcggataccaaggaggttcagcagcatgcgctgatccatcaggaatcaaagactcatcaatgtctccactgtgaccataaatccagcaatagttctgatctgaaaagacatattattagcgtgcacactaaggattatccgcataagtgcgatatgtgcgacaaaggattccacagaccatccgaacttaagaagcatgttgcagcacataagggcaaaaaaatgcaccaatgccgccactgtgactttaaaatcgctgatccctttgtgctatcacgtcacatcctgtccgtccataccaaagatctcccatttagatgcaaacgctgtagaaagggctttcgccagcaaagtgagttgaagaaacatatgaagactcacagcggccgaaaggtgtaccaatgcgaatactgtgaatactctacgactgatgcgtctggcttcaagcgacatgttatatccattcataccaaagattacccccaccgatgcgaatactgtaaaaagggtttcagacgtccctctgagaaaaaccaacacataatgaggcatcacaaggaggtggggctgccttag

SEQ ID NO: 285290 - DNA, 2996 bp, Artificial Sequence
  derived and/or modified sequence
gtccggttcttgctatattgccccaggctggtctcgaactcctgggctcaagccgttctcccgcctcccactgcccgcctgtcactgccgtctgttccctgagctgtgctttacgctgggaaagacatagaagaactattaagaagatagaattgttttgctgcgcagtacagcaacagtggatgttcaagattaagattagagtcaagttgtgtgattaagacaggagctgtgactgatgagaattaaaggccatggatgaagatgggcttgaattacaacaagagccaaactcattttttgatgcaacaggagctgatggtacacacatggatggtgatcaaattgttgtggaagtacaagaaactgtttttgtttcagatgttgtggattcagacataactgtgcataactttgttcctgatgacccagattcagttgtaatccaagatgttattgaggacgttgttatagaagatgttcagtgcccagatatcatggaagaagcagatgtgtctgaaacggtcatcattcctgagcaagtgctggactcagatgtaactgaagaagtttctttagcacattgcacagtcccagatgatgttttagcttctgacattacttcagcctcaatgtctatgccagaacacgtcttgacgggtgattctatacatgtgtctgacgttggacatgttggacatgttggacatgttgaacatgtggttcatgatagtgtagtggaagcagaaattgtcactgatcctctgactaccgacgtagtttcagaagaagtattggtagcagactgtgcctctgaagcagtcatagatgccaatgggatccctgtggaccagcaggatgatgacaaaggcaactgtgaggactaccttatgatttccttggatgatgctggcaaaatagaacacgatggttcttctggaatgaccatggacacagagtcggaaattgatccttgtaaagtggatggcacttgccctgaggtcatcaaggtgtacatttttaaagctgaccctggagaagatgacttaggtggaactgtagacattgtggagagtgagcctgagaatgatcatggagttgaactgcttgatcagaacagcagtattcgtgttcccagggaaaagatggtttatatgactgtcaatgactctcagccagaagatgaagatttaaatgttgctgaaatcgctgacgaagtttatatggaagtgatcgtaggagaggaggatgctgcagcagcagcggcagccgccgccgtgcacgagcagcaaatggatgacaatgaaatcaaaaccttcatgccgattgcatgggcagcagcttatggtaataattctgatggaattgaaaaccggaatggcactgcaagtgccctcttgcacatagatgagtctgctggcctcggcagactggctaaacaaaaaccaaagaaaaggagaagacctgattccaggcagtaccaaacagcaataattattggccctgatggacatcctttgactgtctatccttgcatgatttgtgggaagaagtttaagtcgagaggttttttgaaaaggcacatgaaaaaccatcccgaacaccttgccaagaagaaataccgctgtactgactgtgattacactaccaacaagaagataagtttacacaaccacctggagagccacaagctgaccagcaaggcagagaaggccattgaatgcgatgagtgtgggaagcatttctctcatgcaggggctttgtttactcacaaaatggtgcataaggaaaaaggagccaacaaaatgcacaagtgtaaattctgtgaatacgagacagctgaacaagggttattgaatcgccacctcttggcagtccacagcaagaactttcctcatatttgtgtggagtgtggtaagggttttcgtcacccgtcagagctcaaaaagcacatgagaatccatactggggagaagccgtaccaatgccagtactgcgaatataggtctgcagactcttctaacttgaaaacgcatgtcaaaactaagcatagtaaagagatgccattcaagtgtgacatttgtcttctgactttctcggataccaaagaggtgcagcaacatgctcttatccaccaagaaagcaaaacacaccagtgtttgcattgcgaccacaagagttcgaactcaagtgatttgaaacgacacataatttcagttcacacgaaagactacccccataagtgtgacatgtgtgataaaggctttcacaggccttcagaactcaagaaacacgtggctgcccacaagggcaaaaaaatgcaccagtgtagacattgtgactttaagattgcagatccatttgttctaagtcgccatattctctcagttcacacaaaggatcttccatttaggtgcaagagatgtagaaagggatttaggcaacagagtgagcttaaaaagcatatgaagacacacagtggcaggaaagtgtatcagtgtgagtactgtgagtatagcactacagatgcctcaggctttaaacggcacgttatttccattcacacgaaagactatcctcaccggtgtgagtactgcaagaaaggcttccgaagaccttcagaaaagaaccagcacataatgcgacatcataaagaagttggcctgccctaacaatacttctacagaacgtttgtagagatattggccttgaagcagaaaattcattttaaagccaatcagtctcattcacatacaatactgtatattgatttatgctgtgtacaaatagaattattacttctagttgacttttttttaaatatacattttgctcagtagtgtgttctgaattctattcagtttgtttaataaatagggaaaactggcaacatgctagttacttttaataaagtaatccctgattctataccgaagttttatatcttagaattttatatttatttaaatatttaccttgcttaccttgatggtact

SEQ ID NO: 285291 - DNA, 2906 bp, Artificial Sequence
  derived and/or modified sequence
gagctgtgactgatgagaattaaaggccatggatgaagatgggcttgaattacaacaagagccaaactcattttttgatgcaacaggagctgatggtacacacatggatggtgatcaaattgttgtggaagtacaagaaactgtttttgtttcagatgttgtggattcagacataactgtgcataactttgttcctgatgacccagattcagttgtaatccaagatgttattgaggacgttgttatagaagatgttcagtgcccagatatcatggaagaagcagatgtgtctgaaacggtcatcattcctgagcaagtgctggactcagatgtaactgaagaagtttctttagcacattgcacagtcccagatgatgttttagcttctgacattacttcagcctcaatgtctatgccagaacacgtcttgacgggtgattctatacatgtgtctgacgttggacatgttggacatgttggacatgttgaacatgtggttcatgatagtgtagtggaagcagaaattgtcactgatcctctgactaccgacgtagtttcagaagaagtattggtagcagactgtgcctctgaagcagtcatagatgccaatgggatccctgtggaccagcaggatgatgacaaaggcaactgtgaggactaccttatgatttcctgtggaactgtagacattgtggagagtgagcctgagaatgatcatggagttgaactgcttgatcagaacagcagtattcgtgttcccagggaaaagatggtttatatgactgtcaatgactctcagccagaagatgaagatttaaatgttgctgaaatcgctgacgaagtttatatggaagtgatcgtaggagaggaggatgctgcagcagcagcggcagccgccgccgtgcacgagcagcaaatggatgacaatgaaatcaaaaccttcatgccgattgcatgggcagcagcttatggtaataattctgatggaattgaaaaccggaatggcactgcaagtgccctcttgcacatagatgagtctgctggcctcggcagactggctaaacaaaaaccaaagaaaaggagaagacctgattccaggcagtaccaaacagcaataattattggccctgatggacatcctttgactgtctatccttgcatgatttgtgggaagaagtttaagtcgagaggttttttgaaaaggcacatgaaaaaccatcccgaacaccttgccaagaagaaataccgctgtactgactgtgattacactaccaacaagaagataagtttacacaaccacctggagagccacaagctgaccagcaaggcagagaaggccattgaatgcgatgagtgtgggaagcatttctctcatgcaggggctttgtttactcacaaaatggtgcataaggaaaaaggagccaacaaaatgcacaagtgtaaattctgtgaatacgagacagctgaacaagggttattgaatcgccacctcttggcagtccacagcaagaactttcctcatatttgtgtggagtgtggtaagggttttcgtcacccgtcagagctcaaaaagcacatgagaatccatactggggagaagccgtaccaatgccagtactgcgaatataggtctgcagactcttctaacttgaaaacgcatgtcaaaactaagcatagtaaagagatgccattcaagtgtgacatttgtcttctgactttctcggataccaaagaggtgcagcaacatgctcttatccaccaagaaagcaaaacacaccagtgtttgcattgcgaccacaagagttcgaactcaagtgatttgaaacgacacataatttcagttcacacgaaagactacccccataagtgtgacatgtgtgataaaggctttcacaggccttcagaactcaagaaacacgtggctgcccacaagggcaaaaaaatgcaccagtgtagacattgtgactttaagattgcagatccatttgttctaagtcgccatattctctcagttcacacaaaggatcttccatttaggtgcaagagatgtagaaagggatttaggcaacagagtgagcttaaaaagcatatgaagacacacagtggcaggaaagtgtatcagtgtgagtactgtgagtatagcactacagatgcctcaggctttaaacggcacgttatttccattcacacgaaagactatcctcaccggtgtgagtactgcaagaaaggcttccgaagaccttcagaaaagaaccagcacataatgcgacatcataaagaagttggcctgccctaacaatacttctacagaacgtttgtagagatattggccttgaagcagaaaattcattttaaagccaatcagtctcattcacatacaatactgtatattgatttatgctgtgtacaaatagaattattacttctagttgacttttttttaaatatacattttgctcagtagtgtgttctgaattctattcagtttgtttaataaatagggaaaactggcaacatgctagttacttttaataaagtaatccctgattctataccgaagttttatatcttagaattttatatttatttaaatatttaccttgcttaccttgatggtactcttctaagaccattaacttaaggtaactttatattggtaactctgaaagtattcatgttgactcatttttttccccatacatttctcacaataaaattgtcagagacatctactaatataaatgggagattttacagtcaggtctaattatcataacatggaagtcatttacttgtcttgcttaatattttcagaccacttgacagtgaaagtttccatttgagctgttgcgtccctggctttgctgagtaaagagcagtggctgggttcgtgtttacttttcaaa

SEQ ID NO: 285292 - DNA, 7558 bp, Artificial Sequence
  derived and/or modified sequence
gccggcctgcagcacccgccaccgtcgccggccgcccgcacgtccgtccggttcttgctatattgccccaggctggtctcgaactcctgggctcaagccgttctcccgcctcccactgcccgcctgtcactgccgtctgttccctgagctgtgctttacgctgggaaagacatagaagaactattaagaagatagaattgttttgctgcgcagtacagcaacagtggatgttcaagattaagattagagtcaagttgtgtgattaagacagacagtcttcctctgtcatccaggctggaatgcagtgcagtggtgcaaatttggctcactgcagcctctgccttctgtgttcaagtgattcttcttctgcctcagcctctcgagtagctgggattacaggagctgtgactgatgagaattaaaggccatggatgaagatgggcttgaattacaacaagagccaaactcattttttgatgcaacaggagctgatggtacacacatggatggtgatcaaattgttgtggaagtacaagaaactgtttttgtttcagatgttgtggattcagacataactgtgcataactttgttcctgatgacccagattcagttgtaatccaagatgttattgaggacgttgttatagaagatgttcagtgcccagatatcatggaagaagcagatgtgtctgaaacggtcatcattcctgagcaagtgctggactcagatgtaactgaagaagtttctttagcacattgcacagtcccagatgatgttttagcttctgacattacttcagcctcaatgtctatgccagaacacgtcttgacgggtgattctatacatgtgtctgacgttggacatgttggacatgttggacatgttgaacatgtggttcatgatagtgtagtggaagcagaaattgtcactgatcctctgactaccgacgtagtttcagaagaagtattggtagcagactgtgcctctgaagcagtcatagatgccaatgggatccctgtggaccagcaggatgatgacaaaggcaactgtgaggactaccttatgatttccttggatgatgctggcaaaatagaacacgatggttcttctggaatgaccatggacacagagtcggaaattgatccttgtaaagtggatggcacttgccctgaggtcatcaaggtgtacatttttaaagctgaccctggagaagatgacttaggtggaactgtagacattgtggagagtgagcctgagaatgatcatggagttgaactgcttgatcagaacagcagtattcgtgttcccagggaaaagatggtttatatgactgtcaatgactctcagccagaagatgaagatttaaatgttgctgaaatcgctgacgaagtttatatggaagtgatcgtaggagaggaggatgctgcagcagcagcggcagccgccgccgtgcacgagcagcaaatggatgacaatgaaatcaaaaccttcatgccgattgcatgggcagcagcttatggtaataattctgatggaattgaaaaccggaatggcactgcaagtgccctcttgcacatagatgagtctgctggcctcggcagactggctaaacaaaaaccaaagaaaaggagaagacctgattccaggcagtaccaaacagcaataattattggccctgatggacatcctttgactgtctatccttgcatgatttgtgggaagaagtttaagtcgagaggttttttgaaaaggcacatgaaaaaccatcccgaacaccttgccaagaagaaataccgctgtactgactgtgattacactaccaacaagaagataagtttacacaaccacctggagagccacaagctgaccagcaaggcagagaaggccattgaatgcgatgagtgtgggaagcatttctctcatgcaggggctttgtttactcacaaaatggtgcataaggaaaaaggagccaacaaaatgcacaagtgtaaattctgtgaatacgagacagctgaacaagggttattgaatcgccacctcttggcagtccacagcaagaactttcctcatatttgtgtggagtgtggtaagggttttcgtcacccgtcagagctcaaaaagcacatgagaatccatactggggagaagccgtaccaatgccagtactgcgaatataggtctgcagactcttctaacttgaaaacgcatgtcaaaactaagcatagtaaagagatgccattcaagtgtgacatttgtcttctgactttctcggataccaaagaggtgcagcaacatgctcttatccaccaagaaagcaaaacacaccagtgtttgcattgcgaccacaagagttcgaactcaagtgatttgaaacgacacataatttcagttcacacgaaagactacccccataagtgtgacatgtgtgataaaggctttcacaggccttcagaactcaagaaacacgtggctgcccacaagggcaaaaaaatgcaccagtgtagacattgtgactttaagattgcagatccatttgttctaagtcgccatattctctcagttcacacaaaggatcttccatttaggtgcaagagatgtagaaagggatttaggcaacagagtgagcttaaaaagcatatgaagacacacagtggcaggaaagtgtatcagtgtgagtactgtgagtatagcactacagatgcctcaggctttaaacggcacgttatttccattcacacgaaagactatcctcaccggtgtgagtactgcaagaaaggcttccgaagaccttcagaaaagaaccagcacataatgcgacatcataaagaagttggcctgccctaacaatacttctacagaacgtttgtagagatattggccttgaagcagaaaattcattttaaagccaatcagtctcattcacatacaatactgtatattgatttatgctgtgtacaaatagaattattacttctagttgacttttttttaaatatacattttgctcagtagtgtgttctgaattctattcagtttgtttaataaatagggaaaactggcaacatgctagttacttttaataaagtaatccctgattctataccgaagttttatatcttagaattttatatttatttaaatatttaccttgcttaccttgatggtactcttctaagaccattaacttaaggtaactttatattggtaactctgaaagtattcatgttgactcatttttttccccatacatttctcacaataaaattgtcagagacatctactaatataaatgggagattttacagtcaggtctaattatcataacatggaagtcatttacttgtcttgcttaatattttcagaccacttgacagtgaaagtttccatttgagctgttgcgtccctggctttgctgagtaaagagcagtggctgggttcgtgtttacttttcaaatatacttcttttggctttctttggattatttacatcttttgtcagcgtagcaaacttttagaaaaccttattgaaaaactgtgcttgctcatgttgtattttgattattctgtctgtgcggcttcatcttggaatggttgtgtgctacaaatgacacttactgaggactgcattttggaatctcctagaggtaactcatggcttataggatcttttgcaactttatgtatgtaaatgtaccctgaattatatatatacacatatatatcatgtacctgtgtgtattgcttattttacatatttatacacacaaccccaagtagtagttgtttaaaatctataatgaaaagtattaaatttacaataacatgaaagatccagggatgcatgagagagcattttgtaagtcatgctcttcagagagactactcaggtgaagaattagaaggaaaataaggacactagtatttttaaagagtaaagatattttcttttaaatatctttggtaattgaaacatagaggttaagatgtttctaggtagaatgttttcatacaatttcacctccatgtctttatgtttttctgaaaagcaaatgagtatccagacatgactcccacagttctctttgagaagcctgagagggaactctgtcttacctagtgagggggatggaaaagaagtgatggctctgtggaccagagaacgggtgctaattatgacttcacactcggcaagttcaggctgatctgttatttctcagttacagttagcaaactttaaaaacttaacactcaagttggctttgattaaaaggtaaagatgtgttttaagtggataaggaaagtctgaggccttatttggaacatcactaagtcttccacaggttttttgtttgtttgtttttttttgttgtttttttttcttaagacggagtcttgctctgttgcccaggctggactgcagtggtgtgatcactgcaacctctgcagctcactgcaacctctgcttcctgggttcaagcaattatctgcctcagcctctcgagtagctgggattacaggcgcccaccaccacgcccggctaattttttgtatttttaatagagatggggtttcaccatcttggccaggctggtcttgaaccctgacctcgtgatccacctgcctcggccttccatagtgctgggtttacaggcgtgagccaccgtgcccagacaccacataggtctgaatcagtgtcatacattcataaaacaaactcggttaattagaacttggttatgttaagacgaatctgggagaacagaaaacagtttttggggtcccttcagttggctattggtccgtatgcatctagcacattgtaggagatttagaaattgtcttcccacccgatagctgccttgtcacctcattatggtgctccatcccctgtgtgcttaggtttttacctttcatctttctctttgccattgatgtttgtattcaagagttatatttttagggttagaaatcaaaatatttggtgtttggcaaacctctgaagtgctagactgatttagtctagttttaaaccaagtgctttaggcaggtgtgaactccagcccaaatgccagtcaaagtcaaggcatgggttttcctagcctatcttataggaaattcctgtaccttcttggcccccataatgtgttttttttttttttttttttttaaactaacttacaattttgtgatccgtgattcattgccctgcgattcttgaaagctctgtctgtttttttgtgagaacctttaaaatctcccttaatttttattttcccagaaataatgtaaaaacacttaaatgaaagtggaaatgtattaattttaaatcctataaaattaatacagaaaatataaatgattgggtcatttaactatatttttttaaataaactgaaagataaagaacacaacacttcacacattttatatttctcttacatactccggaatcatacacagttctttttaaagcacaacattaaaacctttaaaaggtatttaagggtttggtcaagtgaatatgataaaacatacttgtctgtataaagagaaaatgaaattgtagtcactgttatgtactgacattagttacaacctagttttaattcttaaaacaattttgattagcaaagctaaaaaaaaatggatgtttcagttaaatgttttaaagaggtacagatttttacaaggacataatataagttattgttctgtagaaatatcctattaaatattgtatgtccctccctctgtacactttgtaaagaaagtaaaatacataaaaagaaaatcatatagggatgtgtgacattattgtaattgtgtacttgagaataacgtgcaaaaataaaaatcagaatattttcctgttattgaatgtttagtctatttgataccagtactaagttaatgctttttctcaaggaaaaaaaatgtacagtttttgtaaacctaataaacatcaaaagcagtggattattttcatccccccatttcttaatttctttttcacagcagtggaatgcaaagtgcttgattgctttgaattttgtgactcggatgcaaatactggtaatatttcagttctgtgaatttgcaagtaatatttcagagaagttaagaggtgattggtgagtcctttgatgagcatgtccttggaattcattttttcttttatcttcataaaggatttgttttattagcatctccaattcccctgagataaattactcatgcataaagtggtttttgagagcacttaaagttcatttcagtattaatttacagcatatttaatcagtggggactgttaccacctccacaacagaaatcatgccctcgagttaccccactgcgcccagtttagaggactagtagatgctaacatactagggaatggtcattgccacagttaaaaatcggcagttaagtaaatgtcaggagtcaaaagagatagagttgtgccatctttgattttatagacaagattctgcagttcttccaactgtatgaacaaacgtttgcctaatagttgaaacaataaattaaaattttaggtaaatgacgaagggaatgtggtgaatgtcactgtccagagccataaatcagacaaaaccatacatagcatgctgaaaaacttttgtaatggaacacccaacaaatgacacctaacctgtctgtgatccaacaagtccgataacatgctgctgtatttgtattctctgggaatctcagtattaataatttcatttcccacaaattctagcattcatgtaaggaaaaacatggctaatcaatatcttaaaggggcaatctttcagagcagtggttttcaaagtatggccggacagcattggcagcatcttaatctcctgggactttgttaaaaatgcaaattctcagccccaccctagtcctactgaattgggaaactggcgtgggacccagcagtctttgttttaacatgttctccaagtgattctgatgcctgttcaaacttgggaaacacttttagagcacttgaggaacctaaaagatgactggttcagcattttgtgtggtagataagaaagaaattatcacaaaaaatcagaaatgaacagtgagagaaaaataggaccccagacagtttataccttccatttgctgttttaaaagtgtgagcctgccaagtcaacaagtatgcctttagcgcacatgtaaatagcctgcacttcctaaatctcgtgtggcctcccatggttacattcttcaaaggtaaactgagttgagaggaagattcagcatttaaaagagaagggttgaaaaagattgtgtgtgtgtgtgtgtgtgtttaattggcccagggttacttaaataaatcataaccattttgccacattctgtaactgtttagctaaggtcaaattaagtttaccctatggattttgtttcatcttttgtttcgtgtatatactgtttgcctttttcataaaaatcttggatttgttatatattgttcctgttatttttgacatctttgctattgtaaataaattactattttgttttaagtta

SEQ ID NO: 285293 - DNA, 7396 bp, Artificial Sequence
  derived and/or modified sequence
ggcccagtgctccagagaaaggccggcctgcagcacccgccaccgtcgccggccgcccgcacgtccgtccggagctgtgactgatgagaattaaaggccatggatgaagatgggcttgaattacaacaagagccaaactcattttttgatgcaacaggagctgatggtacacacatggatggtgatcaaattgttgtggaagtacaagaaactgtttttgtttcagatgttgtggattcagacataactgtgcataactttgttcctgatgacccagattcagttgtaatccaagatgttattgaggacgttgttatagaagatgttcagtgcccagatatcatggaagaagcagatgtgtctgaaacggtcatcattcctgagcaagtgctggactcagatgtaactgaagaagtttctttagcacattgcacagtcccagatgatgttttagcttctgacattacttcagcctcaatgtctatgccagaacacgtcttgacgggtgattctatacatgtgtctgacgttggacatgttggacatgttggacatgttgaacatgtggttcatgatagtgtagtggaagcagaaattgtcactgatcctctgactaccgacgtagtttcagaagaagtattggtagcagactgtgcctctgaagcagtcatagatgccaatgggatccctgtggaccagcaggatgatgacaaaggcaactgtgaggactaccttatgatttccttggatgatgctggcaaaatagaacacgatggttcttctggaatgaccatggacacagagtcggaaattgatccttgtaaagtggatggcacttgccctgaggtcatcaaggtgtacatttttaaagctgaccctggagaagatgacttaggtggaactgtagacattgtggagagtgagcctgagaatgatcatggagttgaactgcttgatcagaacagcagtattcgtgttcccagggaaaagatggtttatatgactgtcaatgactctcagccagaagatgaagatttaaatgttgctgaaatcgctgacgaagtttatatggaagtgatcgtaggagaggaggatgctgcagcagcagcggcagccgccgccgtgcacgagcagcaaatggatgacaatgaaatcaaaaccttcatgccgattgcatgggcagcagcttatggtaataattctgatggaattgaaaaccggaatggcactgcaagtgccctcttgcacatagatgagtctgctggcctcggcagactggctaaacaaaaaccaaagaaaaggagaagacctgattccaggcagtaccaaacagcaataattattggccctgatggacatcctttgactgtctatccttgcatgatttgtgggaagaagtttaagtcgagaggttttttgaaaaggcacatgaaaaaccatcccgaacaccttgccaagaagaaataccgctgtactgactgtgattacactaccaacaagaagataagtttacacaaccacctggagagccacaagctgaccagcaaggcagagaaggccattgaatgcgatgagtgtgggaagcatttctctcatgcaggggctttgtttactcacaaaatggtgcataaggaaaaaggagccaacaaaatgcacaagtgtaaattctgtgaatacgagacagctgaacaagggttattgaatcgccacctcttggcagtccacagcaagaactttcctcatatttgtgtggagtgtggtaagggttttcgtcacccgtcagagctcaaaaagcacatgagaatccatactggggagaagccgtaccaatgccagtactgcgaatataggtctgcagactcttctaacttgaaaacgcatgtcaaaactaagcatagtaaagagatgccattcaagtgtgacatttgtcttctgactttctcggataccaaagaggtgcagcaacatgctcttatccaccaagaaagcaaaacacaccagtgtttgcattgcgaccacaagagttcgaactcaagtgatttgaaacgacacataatttcagttcacacgaaagactacccccataagtgtgacatgtgtgataaaggctttcacaggccttcagaactcaagaaacacgtggctgcccacaagggcaaaaaaatgcaccagtgtagacattgtgactttaagattgcagatccatttgttctaagtcgccatattctctcagttcacacaaaggatcttccatttaggtgcaagagatgtagaaagggatttaggcaacagagtgagcttaaaaagcatatgaagacacacagtggcaggaaagtgtatcagtgtgagtactgtgagtatagcactacagatgcctcaggctttaaacggcacgttatttccattcacacgaaagactatcctcaccggtgtgagtactgcaagaaaggcttccgaagaccttcagaaaagaaccagcacataatgcgacatcataaagaagttggcctgccctaacaatacttctacagaacgtttgtagagatattggccttgaagcagaaaattcattttaaagccaatcagtctcattcacatacaatactgtatattgatttatgctgtgtacaaatagaattattacttctagttgacttttttttaaatatacattttgctcagtagtgtgttctgaattctattcagtttgtttaataaatagggaaaactggcaacatgctagttacttttaataaagtaatccctgattctataccgaagttttatatcttagaattttatatttatttaaatatttaccttgcttaccttgatggtactcttctaagaccattaacttaaggtaactttatattggtaactctgaaagtattcatgttgactcatttttttccccatacatttctcacaataaaattgtcagagacatctactaatataaatgggagattttacagtcaggtctaattatcataacatggaagtcatttacttgtcttgcttaatattttcagaccacttgacagtgaaagtttccatttgagctgttgcgtccctggctttgctgagtaaagagcagtggctgggttcgtgtttacttttcaaatatacttcttttggctttctttggattatttacatcttttgtcagcgtagcaaacttttagaaaaccttattgaaaaactgtgcttgctcatgttgtattttgattattctgtctgtgcggcttcatcttggaatggttgtgtgctacaaatgacacttactgaggactgcattttggaatctcctagaggtaactcatggcttataggatcttttgcaactttatgtatgtaaatgtaccctgaattatatatatacacatatatatcatgtacctgtgtgtattgcttattttacatatttatacacacaaccccaagtagtagttgtttaaaatctataatgaaaagtattaaatttacaataacatgaaagatccagggatgcatgagagagcattttgtaagtcatgctcttcagagagactactcaggtgaagaattagaaggaaaataaggacactagtatttttaaagagtaaagatattttcttttaaatatctttggtaattgaaacatagaggttaagatgtttctaggtagaatgttttcatacaatttcacctccatgtctttatgtttttctgaaaagcaaatgagtatccagacatgactcccacagttctctttgagaagcctgagagggaactctgtcttacctagtgagggggatggaaaagaagtgatggctctgtggaccagagaacgggtgctaattatgacttcacactcggcaagttcaggctgatctgttatttctcagttacagttagcaaactttaaaaacttaacactcaagttggctttgattaaaaggtaaagatgtgttttaagtggataaggaaagtctgaggccttatttggaacatcactaagtcttccacaggttttttgtttgtttgtttttttttgttgtttttttttcttaagacggagtcttgctctgttgcccaggctggactgcagtggtgtgatcactgcaacctctgcagctcactgcaacctctgcttcctgggttcaagcaattatctgcctcagcctctcgagtagctgggattacaggcgcccaccaccacgcccggctaattttttgtatttttaatagagatggggtttcaccatcttggccaggctggtcttgaaccctgacctcgtgatccacctgcctcggccttccatagtgctgggtttacaggcgtgagccaccgtgcccagacaccacataggtctgaatcagtgtcatacattcataaaacaaactcggttaattagaacttggttatgttaagacgaatctgggagaacagaaaacagtttttggggtcccttcagttggctattggtccgtatgcatctagcacattgtaggagatttagaaattgtcttcccacccgatagctgccttgtcacctcattatggtgctccatcccctgtgtgcttaggtttttacctttcatctttctctttgccattgatgtttgtattcaagagttatatttttagggttagaaatcaaaatatttggtgtttggcaaacctctgaagtgctagactgatttagtctagttttaaaccaagtgctttaggcaggtgtgaactccagcccaaatgccagtcaaagtcaaggcatgggttttcctagcctatcttataggaaattcctgtaccttcttggcccccataatgtgttttttttttttttttttttttaaactaacttacaattttgtgatccgtgattcattgccctgcgattcttgaaagctctgtctgtttttttgtgagaacctttaaaatctcccttaatttttattttcccagaaataatgtaaaaacacttaaatgaaagtggaaatgtattaattttaaatcctataaaattaatacagaaaatataaatgattgggtcatttaactatatttttttaaataaactgaaagataaagaacacaacacttcacacattttatatttctcttacatactccggaatcatacacagttctttttaaagcacaacattaaaacctttaaaaggtatttaagggtttggtcaagtgaatatgataaaacatacttgtctgtataaagagaaaatgaaattgtagtcactgttatgtactgacattagttacaacctagttttaattcttaaaacaattttgattagcaaagctaaaaaaaaatggatgtttcagttaaatgttttaaagaggtacagatttttacaaggacataatataagttattgttctgtagaaatatcctattaaatattgtatgtccctccctctgtacactttgtaaagaaagtaaaatacataaaaagaaaatcatatagggatgtgtgacattattgtaattgtgtacttgagaataacgtgcaaaaataaaaatcagaatattttcctgttattgaatgtttagtctatttgataccagtactaagttaatgctttttctcaaggaaaaaaaatgtacagtttttgtaaacctaataaacatcaaaagcagtggattattttcatccccccatttcttaatttctttttcacagcagtggaatgcaaagtgcttgattgctttgaattttgtgactcggatgcaaatactggtaatatttcagttctgtgaatttgcaagtaatatttcagagaagttaagaggtgattggtgagtcctttgatgagcatgtccttggaattcattttttcttttatcttcataaaggatttgttttattagcatctccaattcccctgagataaattactcatgcataaagtggtttttgagagcacttaaagttcatttcagtattaatttacagcatatttaatcagtggggactgttaccacctccacaacagaaatcatgccctcgagttaccccactgcgcccagtttagaggactagtagatgctaacatactagggaatggtcattgccacagttaaaaatcggcagttaagtaaatgtcaggagtcaaaagagatagagttgtgccatctttgattttatagacaagattctgcagttcttccaactgtatgaacaaacgtttgcctaatagttgaaacaataaattaaaattttaggtaaatgacgaagggaatgtggtgaatgtcactgtccagagccataaatcagacaaaaccatacatagcatgctgaaaaacttttgtaatggaacacccaacaaatgacacctaacctgtctgtgatccaacaagtccgataacatgctgctgtatttgtattctctgggaatctcagtattaataatttcatttcccacaaattctagcattcatgtaaggaaaaacatggctaatcaatatcttaaaggggcaatctttcagagcagtggttttcaaagtatggccggacagcattggcagcatcttaatctcctgggactttgttaaaaatgcaaattctcagccccaccctagtcctactgaattgggaaactggcgtgggacccagcagtctttgttttaacatgttctccaagtgattctgatgcctgttcaaacttgggaaacacttttagagcacttgaggaacctaaaagatgactggttcagcattttgtgtggtagataagaaagaaattatcacaaaaaatcagaaatgaacagtgagagaaaaataggaccccagacagtttataccttccatttgctgttttaaaagtgtgagcctgccaagtcaacaagtatgcctttagcgcacatgtaaatagcctgcacttcctaaatctcgtgtggcctcccatggttacattcttcaaaggtaaactgagttgagaggaagattcagcatttaaaagagaagggttgaaaaagattgtgtgtgtgtgtgtgtgtgtttaattggcccagggttacttaaataaatcataaccattttgccacattctgtaactgtttagctaaggtcaaattaagtttaccctatggattttgtttcatcttttgtttcgtgtatatactgtttgcctttttcataaaaatcttggatttgttatatattgttcctgttatttttgacatctttgctattgtaaataaattactattttgttttaagttaccctagtggagtgttggctatagacaaggtatatactcgaaacgaggagacttaaatcacacagttaatgaattcccaacttgtttgaagctggaggtgattcgactcccttcagtggttcaacactaataatagcaccaaggaacatgtcactggtgcatatagg

SEQ ID NO: 285294 - protein, 972 aa, Artificial Sequence
  derived and/or modified sequence
MMAQSNMFTVADVLSQDELRKKLYQTFKDRGILDTLKTQLRNQLIHELMHPVLSGELQPRSISVEGSSLLIGASNSLVADHLQRCGYEYSLSVFFPESGLAKEKVFTMQDLLQLIKINPTSSLYKSLVSGSDKENQKGFLMHFLKELAEYHQAKESCNMETQTSSTFNRDSLAEKLQLIDDQFADAYPQRIKFESLEIKLNEYKREIEEQLRAEMCQKLKFFKDTEIAKIKMEAKKKYEKELTMFQNDFEKACQAKSEALVLREKSTLERIHKHQEIETKEIYAQRQLLLKDMDLLRGREAELKQRVEAFELYQLELKDDYIIRTNRLIEDERKNKEKAVHLQEELIAINSKKEELNQSVNRVKELELELESVKAQSLAITKQNHMLNEKVKEMSDYSLLKEEKLELLAQNKLLKQQLEESRNENLRLLNRLAQPAPELAVFQKELRKAEKAIVVEHEEFESCRQALHKQLQDEIEHSAQLKAQILGYKASVKSLTTQVADLKLQLKQTQTALENEVYCNPKQSVIDRSVNGLINGNVVPCNGEISGDFLNNPFKQENVLARMVASRITNYPTAWVEGSSPDSDLEFVANTKARVKELQQEAERLEKAFRSYHRRVIKNSAKSPLAAKSPPSLHLLEAFKNITSSSPERHIFGEDRVVSEQPQVGTLEERNDVVEALTGSAASRLRGGTSSRRLSSTPLPKAKRSLESEMYLEGLGRSHIASPSPCPDRMPLPSPTESRHSLSIPPVSSPPEQKVGLYRRQTELQDKSEFSDVDKLAFKDNEEFESSFESAGNMPRQLEMGGLSPAGDMSHVDAAAAAVPLSYQHPSVDQKQIEEQKEEEKIREQQVKERRQREERRQSNLQEVLERERRELEKLYQERKMIEESLKIKIKKELEMENELEMSNQEIKDKSAHSENPLEKYMKIIQQEQDQESADKSSKKMVQEGSLVDTLQSSDKVESLTGFSHEELDDSW

SEQ ID NO: 285295 - protein, 338 aa, Artificial Sequence [sequence omitted]

SEQ ID NO: 285296 - DNA, 2919 bp, Artificial Sequence
  derived and/or modified sequence
atgatggcccagagcaacatgtttaccgtagcagacgtgcttagccaggacgagttacgaaaaaaattgtatcagacattcaaagatcggggcattctcgacaccctgaagacccagctgcggaatcagcttatacacgagcttatgcaccctgtgttgagtggcgagctgcaacctaggtcaatctctgtcgaaggatccagtctgctgattggcgcctccaatagcctcgtcgcagaccacttgcaacgctgcggatatgaatatagtttgagtgttttttttccggaatcagggctcgcgaaagagaaagtcttcaccatgcaggacctccttcagcttattaaaatcaaccctacgagtagcttgtacaagtctctggtcagtggttcggacaaggagaaccaaaaggggttcctaatgcacttcctgaaggagctggctgaataccatcaggccaaagaaagctgtaacatggaaacgcagacttcctccactttcaaccgtgattcattggctgaaaagctgcaactcatcgacgatcagtttgctgatgcctatccacaaaggattaaatttgagtccctcgagatcaagctgaatgagtacaaaagggagatcgaggaacagctcagggccgagatgtgtcaaaagctgaagtttttcaaggataccgagatcgccaagataaagatggaggccaagaagaagtacgagaaagagctgaccatgtttcaaaatgacttcgagaaggcctgtcaggctaaatctgaagcacttgtactgcgcgagaagagcacccttgagcgaatccataagcaccaggaaatcgaaaccaaagagatctatgcccaaagacagctgttgttaaaggatatggatttgttaagagggcgggaagcagagctgaagcagcgcgtggaggcgtttgagctataccaattggagctaaaggatgactacatcatccgcaccaacaggctaattgaggacgagcgcaagaataaggaaaaggctgtgcacctacaggaagagttgatagcaattaattcaaaaaaggaggagctaaatcaaagtgtaaatcgtgtaaaagaattggagctggagttggaatcagtgaaagcacagtctctcgccataaccaagcagaaccacatgttaaatgagaaagtgaaggagatgtccgactattcccttctgaaggaagagaagctggagctcctggcgcagaacaagctgctgaagcagcagctggaggagagcagaaacgagaacctccgactgttgaataggctcgcccaacctgcccctgaactagcggtgtttcagaaagagctgaggaaggcagagaaggcgatcgtggtcgaacacgaggaatttgagagctgccggcaggccttacacaagcagcttcaagacgaaatcgaacattctgcacagctcaaagctcagatcctgggatacaaagcttcagttaagtccctcacaacccaagtggctgacctcaaactccagctgaaacagacccagaccgcactggagaacgaggtctattgtaatcccaagcagagcgtgatcgatagaagtgtgaatggtttaatcaatggtaatgttgtcccttgcaatggtgagatctcaggagattttcttaataaccccttcaagcaggaaaatgtcttggccaggatggtcgcctctcgaattaccaattaccccactgcctgggtggaggggtcctcacccgactcagacttagaattcgtggcaaatacgaaagctcgcgtcaaagagttgcagcaggaagccgaaaggctggaaaaagccttccggtcataccaccggcgcgttattaaaaattccgccaaatctccactggctgcaaaatctccgccgtcattgcacttattggaggcttttaagaacattacctctagctcccctgaacgtcacatcttcggcgaggaccgtgtcgttagcgagcagccacaagtgggcacgttggaagaacggaatgatgttgtggaagctttgaccgggtctgccgctagtcggctgcgcggcggtaccagtagccgccgcctaagctcgacccctctccccaaggcgaaacgcagtctcgagagcgagatgtatctggagggactgggacgttctcatatcgcttctccatctccgtgccccgataggatgcccctgcccagtccgactgagagccggcacagcctgtctatccctcctgtgtcttccccccccgagcagaaggtcggcctctacaggaggcagacggagcttcaggacaaatccgagttcagcgacgttgataaactcgccttcaaggacaatgaggaattcgagagtagctttgagtctgcggggaacatgccacgccagctagagatgggaggtctgtctcctgctggcgatatgtctcatgtggatgccgcagcggccgctgtgcccctgtcataccagcatcctagcgtcgatcagaaacagattgaggagcaaaaggaggaggagaaaattcgcgagcagcaggtcaaggagcggagacagcgagaggaacggcggcagagcaaccttcaggaagtcttggaaagagagagacgggaactggaaaaactctatcaggaaaggaaaatgatagaagaatctttgaaaatcaagataaagaaggagctggagatggaaaatgagttagagatgtccaatcaggaaattaaggataaatccgcccatagcgaaaatcccctggaaaagtatatgaaaatcatacagcaggagcaggaccaagagagcgccgataagtcttctaagaagatggtgcaggagggatccctggtcgatactctgcagagcagcgataaagtagaatccttgacaggtttctcacacgaagaacttgacgacagttggtag

SEQ ID NO: 285297 - DNA, 1017 bp, Artificial Sequence
  derived and/or modified sequence
atggtctttttgtgtatcttcaaggagctggccgaataccaccaagccaaggaatcgtgtaacatggaaacacagacaagctctaccttcaaccgggacagcctcgccgagaagctccagctcatcgatgaccagttcgctgacgcctaccctcagaggatcaagttcgagtctctggagatcaagttaaacgagtacaagagagaaatcgaggaacaactgcgtgctgaaatgtgccagaagctcaaattcttcaaggacacagaaatcgcaaaaatcaagatggaggctaaaaaaaagtatgagaaagaactgaccatgttccagaatgactttgaaaaagcttgccaggcaaaatccgaggctttggttcttcgcgagaagagcactttagagagaatccataaacatcaggagattgaaactaaagagatctacgcccagcggcaacttctgctcaaggacatggacctcctcagaggtcgcgaggcagaactgaagcaaagggtggaagccttcgagctgtatcagctggaactcaaggacgattacatcatccgcacaaaccgcctcattgaggacgagaggaagaacaaggagaaggcggtccacctgcaggaggagctcattgccattaactcaaagaaggaggaactcaatcagtcagtgaatcgtgttaaggagctggaactagagctcgaatccgtcaaagcccaatctctcgccatcaccaagcagaatcatatgctcaacgagaaggtcaaggagatgagcgactattcattgctgaaagaagaaaagctggagttactggcacagaataaactgctgaagcagcaactggaggaatccaggaacgagaacctgcggctgctaaatcggctggcacagcccgcccccgagcttgccgtttttcagaaagagctgcggaaggcagaaaaggcgattgtggtggagcacgaagaattcgaaagttgccgtcaggcattgcataaacaacttcaagacgagccctag

SEQ ID NO: 285298 - DNA, 2919 bp, Artificial Sequence
  derived and/or modified sequence
atgatggcccagagcaacatgttcaccgtggctgatgtgctgagccaggatgagctgaggaagaagctgtaccagaccttcaaggaccggggcatcctggacaccctgaagacccagctgaggaaccagctgatccacgagctgatgcaccctgtgctgagcggggagctgcagcccaggagcatctctgtggagggcagcagcctgctgattggagccagcaacagcctggtggccgaccacctgcagagatgtggctatgagtacagcctgagcgtcttcttccctgagagcggcctggccaaggagaaggtgttcaccatgcaggacctgctgcagctgatcaagatcaaccccaccagcagcctgtacaagagcctggtgtctggcagtgacaaggagaaccagaagggcttcctgatgcacttcctgaaggagctggccgagtaccaccaggccaaggagagctgcaacatggagacccagaccagcagcaccttcaacagagacagcctggccgagaagctgcagctgattgatgaccagtttgctgatgcctacccccagaggatcaagtttgagagcctggagatcaagctgaatgagtacaagcgggagattgaggagcagctgcgggcagagatgtgccagaagctgaagttcttcaaggacacagaaattgccaagatcaagatggaggccaagaagaagtatgagaaggagctgaccatgttccagaatgactttgagaaggcctgccaggccaagtctgaggccctggtgctgcgggagaagagcaccctggagcgcatccacaagcaccaggagattgagaccaaggagatctatgcccagaggcagctgctgctgaaggacatggacctgctgcggggccgggaggccgagctgaagcagagggtggaggcctttgagctgtaccagctggagctgaaggatgactacatcatccgcaccaaccggctgattgaagatgagaggaagaacaaggagaaggctgtgcacctgcaggaggagctgattgccatcaacagcaagaaggaggagctgaaccagagcgtgaacagagtgaaggagctggagctggagctggagagcgtgaaggcccagagcctggccatcaccaagcagaaccacatgctgaatgagaaggtgaaggagatgtctgactacagcctgctgaaggaggagaagctggagctgctggcccagaacaagctgctgaagcagcagctggaggagagcagaaatgaaaacctgcggctgctgaaccggctggcccagcctgcccctgagctggccgtgttccagaaggagctgaggaaggccgagaaggccatcgtggtggagcacgaggagtttgagagctgccggcaggccctgcacaagcagctgcaggatgaaattgagcacagcgcccagctgaaggcccagatcctgggctacaaggcctctgtgaagagcctgaccacccaggtggccgacctgaagctgcagctgaagcagacccagacagccctggagaatgaggtgtactgcaaccccaagcagagcgtcatcgacagatctgtgaatggcctcatcaatggaaatgtggtgccctgcaatggagagatcagcggggacttcctgaacaaccccttcaagcaggagaatgtgctggccaggatggtggccagccgcatcaccaactaccccacagcctgggtggagggcagcagcccagacagcgacctggagtttgtggccaacaccaaggcccgggtgaaggagctgcagcaggaggccgagcggctggagaaggccttccgcagctaccaccggcgggtcatcaagaacagcgccaagagccccctggccgccaagagcccccccagcctgcacctgctggaggccttcaagaacatcaccagcagcagccctgagcggcacatctttggagaggacagagtggtgtctgagcagccccaggtgggcaccctggaggagagaaatgatgtggtggaggccctgaccggcagcgctgccagccggctgcggggcggcaccagcagccggcggctgagcagcacccccctgcccaaggccaagaggagcctggagagcgagatgtacctggagggcctgggccgcagccacatcgccagccccagcccctgcccagacaggatgcccctgcccagccccacagagagccgccacagcctgagcatcccccctgtgagcagccccccagagcagaaggtgggcctgtaccgccggcagacagagctgcaggacaagtctgagttcagtgatgtggacaagctggccttcaaggacaatgaggagtttgagagcagctttgagagcgctggcaacatgccccggcagctggagatgggcggcctgagccctgctggggacatgagccacgtggatgctgctgctgctgctgtgcccctgagctaccagcaccccagcgtggaccagaagcagatcgaggagcagaaggaggaggagaagatccgggagcagcaggtgaaggagcggcggcagcgggaggagcggcggcagagcaacctgcaggaggtgctggagcgggagcggcgggagctggagaagctgtaccaggagaggaagatgattgaggagagcctgaagatcaagatcaagaaggagctggagatggagaatgagctggagatgagcaaccaggagatcaaggacaagagcgcccacagcgagaaccccctggagaagtacatgaagatcatccagcaggagcaggaccaggagagcgctgacaagagcagcaagaagatggtgcaggagggcagcctggtggacaccctgcagagcagtgacaaggtggagagcctgaccggcttcagccatgaggagctggatgacagctggtag

SEQ ID NO: 285299 - DNA, 1017 bp, Artificial Sequence
  derived and/or modified sequence
atggtgttcctgtgcatcttcaaggagctggccgagtaccaccaggccaaggagagctgcaacatggagacccagaccagcagcaccttcaacagagacagcctggccgagaagctgcagctgattgatgaccagtttgctgatgcctacccccagaggatcaagtttgagagcctggagatcaagctgaatgagtacaagcgggagattgaggagcagctgcgggcagagatgtgccagaagctgaagttcttcaaggacacagagatcgccaagatcaagatggaggccaagaagaagtatgagaaggagctgaccatgttccagaatgactttgagaaggcctgccaggccaagtctgaggccctggtgctgcgggagaagagcaccctggagcgcatccacaagcaccaggagattgagaccaaggagatctatgcccagaggcagctgctgctgaaggacatggacctgctgcggggccgggaggccgagctgaagcagagggtggaggcctttgagctgtaccagctggagctgaaggatgactacatcatccgcaccaaccggctgattgaagatgagaggaagaacaaggagaaggctgtgcacctgcaggaggagctgattgccatcaacagcaagaaggaggagctgaaccagagcgtgaacagagtgaaggagctggagctggagctggagagcgtgaaggcccagagcctggccatcaccaagcagaaccacatgctgaatgagaaggtgaaggagatgtctgactacagcctgctgaaggaggagaagctggagctgctggcccagaacaagctgctgaagcagcagctggaggagagcagaaatgaaaacctgcggctgctgaaccggctggcccagcctgcccctgagctggccgtgttccagaaggagctgaggaaggccgagaaggccatcgtggtggagcacgaggagtttgagagctgccggcaggccctgcacaagcagctgcaggatgagccctag

SEQ ID NO: 285300 - DNA, 2919 bp, Artificial Sequence
  derived and/or modified sequence
atgatggcccagagcaacatgttcaccgtggccgacgtgctgagccaggatgagctgaggaagaaactgtatcagacttttaaagatcggggcatcctggacacattgaaaactcagttgcgcaatcaactgatccatgagctgatgcatcccgtgctgagcggcgaactccaaccccgaagcatcagtgtggaggggtcttccctgttaattggggcctcaaattctctggtggccgaccaccttcagaggtgcggctacgagtacagcctgtcagtcttttttccagagagtggattggccaaggaaaaggtcttcacaatgcaggatctccttcaattgatcaaaatcaatcccacctcctcactttataaaagtctggtcagtgggtctgacaaagagaaccagaagggattcctgatgcatttcctcaaagagttggcagagtatcaccaggccaaggaatcatgtaatatggagacgcagacctcatcaactttcaatcgggattcgctggctgagaagctgcagcttatcgacgatcaattcgccgacgcctaccctcaacgaatcaagtttgagtccttagaaatcaagctcaatgaatataaaagagagatagaagaacagttgcgcgcagaaatgtgtcagaaactgaaatttttcaaggacacagaaatcgccaaaataaaaatggaagcaaaaaaaaaatatgaaaaggagttgacaatgtttcaaaatgacttcgaaaaagcatgccaagcgaagtccgaggccttagtgttgagggagaaatcaacactggaaagaatccacaaacatcaagagattgagaccaaggaaatttatgcccagaggcagctactactgaaggatatggacctgctgcgaggaagagaggccgaactcaagcagcgggtggaggcttttgaactttaccaactcgagcttaaagatgattacattattcggaccaatcgcctgatagaggatgaacgcaagaataaggaaaaagccgtccatctccaggaggagttgatcgcaataaatagcaagaaggaggagctgaaccaatccgtgaatagagtaaaagaactggaactggagctcgaaagtgtgaaggctcagtcgctcgccatcactaagcaaaaccatatgctaaatgagaaggtgaaggaaatgtccgactatagtctgctcaaagaagaaaaacttgaattactggcgcaaaataaactcctaaagcagcaattggaggagagcagaaatgagaatctgaggttgctaaataggctggcccagccggcacccgaacttgccgtcttccagaaggagctaagaaaggcagagaaagccatcgtggtggagcacgaggaattcgaaagttgccggcaggcactgcacaagcagctacaggatgagatcgagcacagcgcccagttaaaagctcaaattcttggatataaagcatccgtcaaaagtctcaccacacaagttgcggacctaaagctacagctgaagcagacacagacagctctggagaatgaggtgtactgcaacccaaagcagagcgtgatcgatcggagtgtgaacggccttattaatggaaacgtagtgccatgtaatggtgagatctccggtgatttcctgaataatccctttaagcaggagaacgtgctggctcgaatggttgcgagcaggattactaattatcctacagcctgggttgagggatcctccccagactcagatctggaatttgttgcaaataccaaagcccgtgtgaaagagctgcagcaggaagcagaaagactcgaaaaagcgtttagatcctaccaccgcagggtgataaaaaattctgccaagtccccccttgctgcgaaatctcctccctccctgcacctcctagaggcatttaaaaacatcactagctcgtcacccgaacgacacattttcggagaggatcgggtggtgtccgagcaaccgcaggtgggcaccctggaggagagaaacgacgtagtcgaggcactgactggctcggctgcctcaaggctcaggggtgggacttcatcaagacggttaagctccacaccgctaccaaaggctaagagatcattagaatccgagatgtatctggaggggctcggacgttcgcatatagctagcccaagcccctgcccagatcgtatgcctctgccatctcccactgagagccgccactcactctcgatcccaccagtcagcagccccccagaacagaaggtcggtctctaccgaaggcagacggaactgcaggataaatcggagttcagtgatgtcgataaattagcttttaaagacaatgaagaatttgaatcctctttcgagtccgccggcaatatgcccagacaacttgagatgggcggtctgtctcctgcaggtgatatgagccacgtcgatgccgccgctgccgctgtgcccctctcttatcagcacccttctgtcgatcaaaagcaaatcgaggagcagaaggaggaagaaaaaatccgagaacagcaggtcaaggagagacgacagcgagaagaacggcgccagagcaatctgcaggaggtgttggagcgggagcgccgagaactcgaaaaactgtaccaggagcgaaagatgatagaagaatcattaaaaattaagattaagaaggagctcgagatggagaacgagctcgagatgtccaaccaggaaataaaagataaaagcgcccacagcgagaatccacttgaaaagtatatgaaaattattcaacaggaacaggatcaggagtctgctgataagagcagcaaaaaaatggtccaagaaggaagcctggtggacacactgcagtctagtgacaaagtggagtcacttactgggttctcacacgaggagctcgatgatagctggtag

SEQ ID NO: 285301 - DNA, 1017 bp, Artificial Sequence
  derived and/or modified sequence
atggtgttcctgtgcatcttcaaggagctggccgagtaccaccaggccaaagaaagttgtaatatggagacgcagacctcttctacatttaaccgggacagcctggctgagaagttgcagctcattgatgaccagttcgcggatgcctatccccagcggattaagttcgagagcttagagatcaaactgaacgagtataagcgcgagatcgaggaacagctgagggcagagatgtgtcagaaactcaaattcttcaaggatacagagatcgctaagattaaaatggaagccaaaaagaagtatgagaaggaactgacaatgttccagaacgacttcgaaaaagcttgccaggctaagtccgaggctctggtgctccgggaaaagtctaccttagagagaattcacaagcaccaagaaatcgaaaccaaagagatctatgcacagaggcagctgctactgaaagatatggatctgttaagagggagggaggccgagctcaagcagcgcgtggaagcgtttgaactctatcaactagaactgaaagacgattacattatcaggactaatagactgattgaagacgagcggaagaataaagagaaagcggtgcacttacaagaagagctcatagccattaattccaagaaagaagaacttaaccaatctgtgaatagagtcaaggagctggagctggagctggagagtgttaaagctcagagtttggccattacgaagcagaatcacatgcttaacgaaaaggtcaaagagatgagtgattattcccttcttaaggaagaaaaactggagctcctggctcagaataagcttcttaaacagcaactggaagaaagccggaacgaaaaccttcgcttgctgaatcgacttgcccaaccagcacctgaattggcagtgtttcaaaaggaactccgaaaagctgagaaagccattgtggtagagcatgaggagttcgaaagctgtagacaggccctgcataaacagttacaagacgagccctag

SEQ ID NO: 285302 - DNA, 3531 bp, Artificial Sequence
  derived and/or modified sequence
aaggctatatttagcaggtttccggaagttgccggactggctgtgaggcggtcctgcctcgctgccttcagtccctagtgtctgggtccccgccctccagccgcctttgagtcgtgcctgggtcctcgcccttgcctcagaaccgcgaagaaaggaagctcgcgtgtttgctagaaaacctagttgggagtgcgaggcagagaacgttcagcacctttgttcctcccgaaccctcgggacagaggcagggttctgagggcagggattccccctcgtcttggccccaccgcccgggctgggcactaaactcgggccgcggcggggcgagcgaggcgggctccggagggagctgacgcctgatgatggcgcagtccaacatgtttaccgtggctgatgtgttgagtcaagatgaactgcgcaaaaagctataccagacgtttaaggatcggggtatactggatacactcaagacacaacttcgaaaccagctaattcatgagttgatgcaccctgtattgagtggagaactgcagcctcggtccatttcagtagaagggagctccctcttaataggcgcctctaactctttagtggcagatcacttacaaagatgtggctatgaatattcactttctgttttctttccagaaagtggtttggcaaaagaaaaggtatttactatgcaggatctattacaactcattaaaatcaaccctacttccagtctctacaaatcactggtttcaggatctgataaagaaaatcaaaaaggttttcttatgcattttttaaaagaattggcagaatatcatcaagctaaagagagttgtaatatggaaactcagacaagttcgacatttaacagagattctctggctgagaagcttcagcttattgatgatcagtttgcagatgcttaccctcagcgtatcaagttcgaatctttagaaataaagctaaatgagtataagagagaaatagaagagcaacttcgggcagaaatgtgtcaaaagttgaagttttttaaagataccgagatagcaaaaattaaaatggaagcaaaaaaaaagtatgaaaaggagttaaccatgttccagaatgattttgaaaaagcttgtcaagcaaaatctgaagctctcgttcttcgggaaaagagtacccttgaaagaattcacaagcaccaagagattgaaacaaaagaaatttatgctcaaaggcaacttttactaaaagatatggatttgctaagaggaagagaagcagagctgaagcaaagagttgaagcttttgaattgtatcaacttgaactgaaggatgactacatcattagaactaatcgactgattgaagatgaaaggaagaataaagaaaaagctgttcatttgcaagaggagctcatagctattaattcaaaaaaggaggaactcaatcaatctgtaaatcgtgtgaaagaacttgagcttgaattagagtctgtcaaagcccagtctttggcaataacaaaacaaaaccatatgctgaatgaaaaggttaaagagatgagtgattattcactactaaaagaagagaaactggagcttctggcacaaaataaattacttaaacaacaactggaagagagtagaaatgaaaacctgcgtctcctaaaccgcctagctcagccggctcctgaacttgcagtctttcagaaagaactacggaaagccgaaaaggctatagtggttgagcatgaggagttcgaaagctgcaggcaagctctgcacaaacaactgcaagacgaaattgagcattctgcacagctgaaggcccagattctaggttacaaagcttctgtaaagagtttaactactcaggttgccgatttaaaattgcaactgaagcaaactcagacagccctagagaatgaagtgtactgcaatccaaagcagtctgtgatcgatcgttctgtcaatggattaataaatggcaatgtggtgccttgcaatggtgagataagtggggatttcttgaacaatccttttaaacaggaaaacgttctagcacgtatggttgcatcaaggatcacaaattatccaactgcatgggtggagggtagttcccctgattctgaccttgagtttgtagccaatactaaggcaagggtcaaagagcttcagcaagaggccgaacgcttggaaaaggctttcagaagttaccatcggagagtcattaaaaactctgccaaaagcccactagcagcaaagagcccaccatctctgcacttgctggaagccttcaaaaacattacttccagttccccggaaagacatatttttggagaggacagagttgtctctgagcagcctcaagtgggcacacttgaagaaaggaatgacgtcgtggaagcactgacaggcagtgcagcctcgaggctccgcgggggcacttcctccagacgcctctcttccacaccccttccaaaagcaaaaagaagcctcgaaagtgaaatgtatctggaaggtctgggcagatcacacattgcttcccccagtccttgtcctgacagaatgcccctaccatcacccactgagtctaggcacagcctctccatccctcctgtctccagccctccggagcagaaagtgggtctttatcgaagacaaactgaacttcaagacaaaagtgaattttcagatgtggacaagctagcttttaaggataatgaggagtttgaatcatcttttgaatctgcagggaacatgccaaggcagttggaaatgggcgggctttctcctgccggggatatgtctcatgtggacgctgctgcagctgctgtgcccctctcatatcagcacccaagtgtagatcagaaacaaattgaagaacaaaaggaagaagaaaaaatacgggaacagcaagtgaaagaacgaaggcagagagaagaaagaaggcagagtaacctacaagaagttttagaaagggaacgaagagaactagaaaaactgtatcaggaaaggaagatgattgaagaatcactgaagattaaaataaaaaaggaattagaaatggaaaatgaattagaaatgagtaatcaagaaataaaagacaaatctgctcacagtgaaaatcctttagagaaatacatgaaaatcatccagcaggagcaagaccaggagtcggcagataagagctcaaaaaagatggtccaagaaggctccctagtggacacgctgcaatctagtgacaaagtcgaaagtttaacaggcttttctcatgaagaactagacgactcttggtaaccatgtttgctgcccagcttctaacttacataccgtgagaagttacgtaacatttactcctttgtaaatgtttccctatcatcagacaaaactcaataaaaatgtgtgtaatccaatgtgggtttttttttccataattaattttgataccatagtgtgtgaaccaagaataatctagtcacgtgaaacctcttctccagtcatagtatttctcattcattataataaaagtaactggcttttaacctcctta

SEQ ID NO: 285303 - DNA, 3307 bp, Artificial Sequence
  derived and/or modified sequence
gggagtgcgaggcagagaacgttcagcacctttgttcctcccgaaccctcgggacagaggcagggttctgagggcagggattccccctcgtcttggccccaccgcccgggctgggcactaaactcgggccgcggcggggcgagcgaggcgggctccggagggagctgacgcctgatgatggcgcagtccaacatgtttaccgtggctgatgtgttgagtcaagatgaactgcgcaaaaagctataccagacgtttaaggatcggggtatactggatacactcaagacacaacttcgaaaccagctaattcatgagttgatgcaccctgtattgagtggagaactgcagcctcggtccatttcagtagaagggagctccctcttaataggcgcctctaactctttagtggcagatcacttacaaagatgtggctatgaatattcactttctgttttctttccagaaagtggtttggcaaaagaaaaggtatttactatgcaggatctattacaactcattaaaatcaaccctacttccagtctctacaaatcactggtttcaggatctgataaagaaaatcaaaaagccattaagtctgtgacttaatcgccaagtctcttggtagtaatgttagcagaatataaataaattggagcacaagatattctggactgcccgcaaactagaccatctctactgaagttcagtatggttttcttatgcatttttaaagaattggcagaatatcatcaagctaaagagagttgtaatatggaaactcagacaagttcgacatttaacagagattctctggctgagaagcttcagcttattgatgatcagtttgcagatgcttaccctcagcgtatcaagttcgaatctttagaaataaagctaaatgagtataagagagaaatagaagagcaacttcgggcagaaatgtgtcaaaagttgaagttttttaaagataccgagatagcaaaaattaaaatggaagcaaaaaaaaagtatgaaaaggagttaaccatgttccagaatgattttgaaaaagcttgtcaagcaaaatctgaagctctcgttcttcgggaaaagagtacccttgaaagaattcacaagcaccaagagattgaaacaaaagaaatttatgctcaaaggcaacttttactaaaagatatggatttgctaagaggaagagaagcagagctgaagcaaagagttgaagcttttgaattgtatcaacttgaactgaaggatgactacatcattagaactaatcgactgattgaagatgaaaggaagaataaagaaaaagctgttcatttgcaagaggagctcatagctattaattcaaaaaaggaggaactcaatcaatctgtaaatcgtgtgaaagaacttgagcttgaattagagtctgtcaaagcccagtctttggcaataacaaaacaaaaccatatgctgaatgaaaaggttaaagagatgagtgattattcactactaaaagaagagaaactggagcttctggcacaaaataaattacttaaacaacaactggaagagagtagaaatgaaaacctgcgtctcctaaaccgcctagctcagccggctcctgaacttgcagtctttcagaaagaactacggaaagccgaaaaggctatagtggttgagcatgaggagttcgaaagctgcaggcaagctctgcacaaacaactgcaagacgaaccctagagaatgaagtgtactgcaatccaaagcagtctgtgatcgatcgttctgtcaatggattaataaatggcaatgtggtgccttgcaatggtgagataagtggggatttcttgaacaatccttttaaacaggaaaacgttctagcacgtatggttgcatcaaggatcacaaattatccaactgcatgggtggagggtagttcccctgattctgaccttgagtttgtagccaatactaaggcaagggtcaaagagcttcagcaagaggccgaacgcttggaaaaggctttcagaagttaccatcggagagtcattaaaaactctgccaaaagcccactagcagcaaagagcccaccatctctgcacttgctggaagccttcaaaaacattacttccagttccccggaaagacatatttttggagaggacagagttgtctctgagcagcctcaagtgggcacacttgaagaaaggaatgacgtcgtggaagcactgacaggcagtgcagcctcgaggctccgcgggggcacttcctccagacgcctctcttccacaccccttccaaaagcaaaaagaagcctcgaaagtgaaatgtatctggaaggtctgggcagatcacacattgcttcccccagtccttgtcctgacagaatgcccctaccatcacccactgagtctaggcacagcctctccatccctcctgtctccagccctccggagcagaaagtgggtctttatcgaagacaaactgaacttcaagacaaaagtgaattttcagatgtggacaagctagcttttaaggataatgaggagtttgaatcatcttttgaatctgcagggaacatgccaaggcagttggaaatgggcgggctttctcctgccggggatatgtctcatgtggacgctgctgcagctgctgtgcccctctcatatcagcacccaagtgtagatcagaaacaaattgaagaacaaaaggaagaagaaaaaatacgggaacagcaagtgaaagaacgaaggcagagagaagaaagaaggcagagtaacctacaagaagttttagaaagggaacgaagagaactagaaaaactgtatcaggaaaggaagatgattgaagaatcactgaagattaaaataaaaaaggaattagaaatggaaaatgaattagaaatgagtaatcaagaaataaaagacaaatctgctcacagtgaaaatcctttagagaaatacatgaaaatcatccagcaggagcaagaccaggagtcggcagataagagctcaaaaaagatggtccaagaaggctccctagtggacacgctgcaatctagtgacaaagtcgaaagtttaacaggcttttctcatgaagaactagacgactcttggtaaccatgtttgctgcccagcttctaacttacataccgtgagaagttacgtaacatttactcctttgtaaatgtttccctatcatcagacaaaactcaataaaaatgtgtgtaatccaatgtgggtttttttttccataattaattttgataccatagtgtgtgaaccaagaataatctagtcacgtgaaacctcttctccagtca

SEQ ID NO: 285304 - DNA, 2919 bp, Artificial Sequence
  derived and/or modified sequence
atgatggcacagtcgaatatgttcacagttgccgatgtcctgtcgcaagatgagctgcggaaaaaactttaccaaacgtttaaggatcgagggattctggatactttaaaaacccaactgcgtaatcagctgattcacgaactcatgcatcctgtgctctccggagagctgcaacctagaagcatttcggtggaaggatcatcgctgctcattggagcttccaatagtcttgttgctgaccatcttcagaggtgcgggtacgaatactccctgagtgtgttttttcccgaatctggattggccaaggaaaaggtgtttacaatgcaggatctcctccagttgattaaaattaaccctacgagttctttgtacaagtctctcgtgagtgggtcagataaggaaaaccagaagggattccttatgcatttcctgaaggagctggctgagtaccaccaggcaaaggaatcatgcaatatggagacccagacatcttctacatttaatagagatagcctcgccgagaagttgcaactgatagatgatcaatttgccgacgcctacccccagcggataaagtttgagagcctcgaaataaaactgaacgagtataagagggagatagaggaacaactgagagctgaaatgtgtcagaagctcaagttcttcaaggatacagaaattgccaagatcaagatggaggcgaagaagaagtacgagaaggaacttaccatgttccaaaacgactttgagaaagcatgtcaggcaaaaagtgaggccctcgtgctgcgggagaagtcgacgttagaaagaattcacaagcaccaggaaattgaaaccaaagaaatctatgcccaacgtcagcttcttttgaaggatatggatctgctaagaggtcgggaagcggagttgaaacagagggttgaagcttttgagctgtaccagctcgaacttaaggacgattacataatccgaacaaatagactgatcgaggatgagcgcaaaaacaaggaaaaagccgtccacctccaggaagagctgatcgccattaacagcaaaaaagaagagctcaaccagagcgtcaatagggtgaaagagctggaactcgaactcgagtccgttaaggctcaatccctggcaatcaccaagcagaaccacatgcttaacgagaaggtcaaagaaatgtcagattactcactgcttaaggaagagaagttggaactgctcgcgcagaataagctgctcaagcagcagctcgaggagtccaggaacgagaatctgcgactactgaatcgccttgctcagccagcccctgagcttgctgtgttccaaaaagaactgaggaaagctgagaaggctatcgtggtggaacatgaggaatttgagagctgccggcaagccctacacaaacagctacaggacgaaattgagcatagcgcccagcttaaggctcagatcttggggtacaaggccagcgtgaaatcactcaccacccaggtggccgatctcaagctgcagttgaaacaaacccaaacggccctcgaaaacgaagtttattgcaacccgaagcagtctgtcattgatcggagtgttaacggactgatcaatggcaatgtcgttccctgcaacggcgaaatctccggcgatttcctaaataatccttttaaacaagaaaacgtcctcgcacggatggtcgcttctcgcattacaaattatcccactgcttgggttgaaggatcctcccctgactccgatctggagtttgtggcaaataccaaggcgagagtgaaggaactacagcaggaagctgagagactggagaaagcctttcgttcataccaccgcagagtcattaagaacagtgccaagagtccccttgcggctaagagtccgccatcactgcacctgctcgaggcctttaaaaacattacatcatcttctccagagcgacatattttcggcgaggaccgggtggtatctgagcaaccacaggtgggcaccctggaggaacggaatgacgttgtggaagcactcaccggctccgcagctagccgcctgcgaggcggtacatcctcaagacggctgtcttccacccctctacccaaagcaaaacggagcctggagtcggagatgtacctcgagggcctgggcagatcccacattgctagcccaagcccctgcccggatcgcatgcccttaccttcacccacagagtctcggcacagcctgtccatccctccggtgagttctcctcccgaacagaaagtcgggctctaccgaaggcagactgagttacaggataaatcagagttttcagacgtcgataaactggcatttaaagataacgaggaatttgagagttcttttgagagcgccggaaatatgccgaggcagcttgagatgggtgggttatcacctgcaggggacatgagccacgttgatgcagcagccgcagccgtcccgctatcatatcagcacccatcagtagatcagaaacaaatagaggagcagaaagaggaggagaaaatcagggagcagcaagttaaggagaggcgtcagcgagaggagagaaggcagtccaaccttcaggaggtcctggaaagagaaagaagagagttggaaaagctctatcaggagagaaaaatgatcgaggagtcgctgaagatcaagattaagaaagagctcgaaatggagaatgaactggagatgagcaaccaggagattaaggataaaagcgctcactctgaaaacccactcgagaaatacatgaagataatacagcaggagcaggaccaggaatccgctgacaaaagtagtaagaagatggtgcaggaaggatctctggttgatactctgcaaagcagcgataaagttgagtcgttgactggcttcagccacgaagaactagatgactcttggtag

SEQ ID NO: 285305 - DNA, 1017 bp, Artificial Sequence
  derived and/or modified sequence
atggtgttcctctgcattttcaaagagctcgctgaataccaccaggccaaggagagctgtaatatggaaacccagacttcatcaacattcaaccgcgattctttggcagagaaactacaactgatcgacgaccaatttgctgacgcatacccacaaagaatcaaatttgagtcactcgagattaagctgaacgagtacaagcgtgagatcgaggagcagctgagagccgagatgtgccagaagctgaaattttttaaggatacagagattgccaaaattaagatggaagccaagaagaagtatgagaaagaactgacgatgtttcagaatgatttcgagaaggcctgccaggccaagagtgaagccctggtgttgcgagagaagtccaccctggagcgcatccataaacatcaggagatcgagacaaaagagatatacgctcagcgccagctgctgttgaaggacatggacctgcttcggggaagggaagccgagctcaagcaacgagtggaagcattcgagctctaccagctcgagttgaaggatgattatatcatcaggaccaatcggctaatcgaagacgagcgcaagaataaggagaaggcagtgcatcttcaagaggagttgatagccattaatagtaagaaggaggagttgaaccagtccgtgaaccgagttaaggagctggaactggaattagaatccgtgaaggcccagtccctggcgattacaaagcagaatcatatgctcaacgagaaagtgaaagaaatgagcgattatagtttactcaaggaggaaaagctggaactattagcacagaacaagctgcttaaacagcaattagaggaatctagaaacgaaaatctgcgactgttgaataggctcgcccagccggcacccgagctggccgtgtttcagaaggagcttcgcaaagctgagaaagccatcgttgtagagcacgaagagtttgaatcatgtcggcaagctctgcataaacagctgcaggatgagccctag

SEQ ID NO: 285306 - DNA, 2919 bp, Artificial Sequence
  derived and/or modified sequence
atgatggcccagagcaacatgttcaccgtggccgacgtgctgagccaggacgagctgagaaagaagctgtaccagaccttcaaggacagaggcatcctggacaccctgaagacccagctgagaaaccagctgatccacgagctgatgcaccccgtgctgagcggcgagctgcagcccagaagcatcagcgtggagggcagcagcctgctgatcggcgccagcaacagcctggtggccgaccacctgcagagatgcggctacgagtacagcctgagcgtgttcttccccgagagcggcctggccaaggagaaggtgttcaccatgcaggacctgctgcagctgatcaagatcaaccccaccagcagcctgtacaagagcctggtgagcggcagcgacaaggagaaccagaagggcttcctgatgcacttcctgaaggagctggccgagtaccaccaggccaaggagagctgcaacatggagacccagaccagcagcaccttcaacagagacagcctggccgagaagctgcagctgatcgacgaccagttcgccgacgcctacccccagagaatcaagttcgagagcctggagatcaagctgaacgagtacaagagagagatcgaggagcagctgagagccgagatgtgccagaagctgaagttcttcaaggacaccgagatcgccaagatcaagatggaggccaagaagaagtacgagaaggagctgaccatgttccagaacgacttcgagaaggcctgccaggccaagagcgaggccctggtgctgagagagaagagcaccctggagagaatccacaagcaccaggagatcgagaccaaggagatctacgcccagagacagctgctgctgaaggacatggacctgctgagaggcagagaggccgagctgaagcagagagtggaggccttcgagctgtaccagctggagctgaaggacgactacatcatcagaaccaacagactgatcgaggacgagagaaagaacaaggagaaggccgtgcacctgcaggaggagctgatcgccatcaacagcaagaaggaggagctgaaccagagcgtgaacagagtgaaggagctggagctggagctggagagcgtgaaggcccagagcctggccatcaccaagcagaaccacatgctgaacgagaaggtgaaggagatgagcgactacagcctgctgaaggaggagaagctggagctgctggcccagaacaagctgctgaagcagcagctggaggagagcagaaacgagaacctgagactgctgaacagactggcccagcccgcccccgagctggccgtgttccagaaggagctgagaaaggccgagaaggccatcgtggtggagcacgaggagttcgagagctgcagacaggccctgcacaagcagctgcaggacgagatcgagcacagcgcccagctgaaggcccagatcctgggctacaaggccagcgtgaagagcctgaccacccaggtggccgacctgaagctgcagctgaagcagacccagaccgccctggagaacgaggtgtactgcaaccccaagcagagcgtgatcgacagaagcgtgaacggcctgatcaacggcaacgtggtgccctgcaacggcgagatcagcggcgacttcctgaacaaccccttcaagcaggagaacgtgctggccagaatggtggccagcagaatcaccaactaccccaccgcctgggtggagggcagcagccccgacagcgacctggagttcgtggccaacaccaaggccagagtgaaggagctgcagcaggaggccgagagactggagaaggccttcagaagctaccacagaagagtgatcaagaacagcgccaagagccccctggccgccaagagcccccccagcctgcacctgctggaggccttcaagaacatcaccagcagcagccccgagagacacatcttcggcgaggacagagtggtgagcgagcagccccaggtgggcaccctggaggagagaaacgacgtggtggaggccctgaccggcagcgccgccagcagactgagaggcggcaccagcagcagaagactgagcagcacccccctgcccaaggccaagagaagcctggagagcgagatgtacctggagggcctgggcagaagccacatcgccagccccagcccctgccccgacagaatgcccctgcccagccccaccgagagcagacacagcctgagcatcccccccgtgagcagcccccccgagcagaaggtgggcctgtacagaagacagaccgagctgcaggacaagagcgagttcagcgacgtggacaagctggccttcaaggacaacgaggagttcgagagcagcttcgagagcgccggcaacatgcccagacagctggagatgggcggcctgagccccgccggcgacatgagccacgtggacgccgccgccgccgccgtgcccctgagctaccagcaccccagcgtggaccagaagcagatcgaggagcagaaggaggaggagaagatcagagagcagcaggtgaaggagagaagacagagagaggagagaagacagagcaacctgcaggaggtgctggagagagagagaagagagctggagaagctgtaccaggagagaaagatgatcgaggagagcctgaagatcaagatcaagaaggagctggagatggagaacgagctggagatgagcaaccaggagatcaaggacaagagcgcccacagcgagaaccccctggagaagtacatgaagatcatccagcaggagcaggaccaggagagcgccgacaagagcagcaagaagatggtgcaggagggcagcctggtggacaccctgcagagcagcgacaaggtggagagcctgaccggcttcagccacgaggagctggacgacagctggtag

SEQ ID NO: 285307 - DNA, 1017 bp, Artificial Sequence
  derived and/or modified sequence
atggtgttcctgtgcatcttcaaggagctggccgagtaccaccaggccaaggagagctgcaacatggagacccagaccagcagcaccttcaacagagacagcctggccgagaagctgcagctgatcgacgaccagttcgccgacgcctacccccagagaatcaagttcgagagcctggagatcaagctgaacgagtacaagagagagatcgaggagcagctgagagccgagatgtgccagaagctgaagttcttcaaggacaccgagatcgccaagatcaagatggaggccaagaagaagtacgagaaggagctgaccatgttccagaacgacttcgagaaggcctgccaggccaagagcgaggccctggtgctgagagagaagagcaccctggagagaatccacaagcaccaggagatcgagaccaaggagatctacgcccagagacagctgctgctgaaggacatggacctgctgagaggcagagaggccgagctgaagcagagagtggaggccttcgagctgtaccagctggagctgaaggacgactacatcatcagaaccaacagactgatcgaggacgagagaaagaacaaggagaaggccgtgcacctgcaggaggagctgatcgccatcaacagcaagaaggaggagctgaaccagagcgtgaacagagtgaaggagctggagctggagctggagagcgtgaaggcccagagcctggccatcaccaagcagaaccacatgctgaacgagaaggtgaaggagatgagcgactacagcctgctgaaggaggagaagctggagctgctggcccagaacaagctgctgaagcagcagctggaggagagcagaaacgagaacctgagactgctgaacagactggcccagcccgcccccgagctggccgtgttccagaaggagctgagaaaggccgagaaggccatcgtggtggagcacgaggagttcgagagctgcagacaggccctgcacaagcagctgcaggacgagccctag

SEQ ID NO: 285308 - protein, 872 aa, Artificial Sequence
  derived and/or modified sequence
MHFLKELAEYHQAKESCNMETQTSSTFNRDSLAEKLQLIDDQFADAYPQRIKFESLEIKLNEYKREIEEQLRAEMCQKLKFFKDTEIAKIKMEAKKKYEKELTMFQNDFEKACQAKSEALVLREKSTLERIHKHQEIETKEIYAQRQLLLKDMDLLRGREAELKQRVEAFELNQKLQEEKHKSITEALRRQEQNIKSFEETYDRKLKNELLKYQLELKDDYIIRTNRLIEDERKNKEKAVHLQEELIAINSKKEELNQSVNRVKELELELESVKAQSLAITKQNHMLNEKVKEMSDYSLLKEEKLELLAQNKLLKQQLEESRNENLRLLNRLAQPAPELAVFQKELRKAEKAIVVEHEEFESCRQALHKQLQDEIEHSAQLKAQILGYKASVKSLTTQVADLKLQLKQTQTALENEVYCNPKQSVIDRSVNGLINGNVVPCNGEISGDFLNNPFKQENVLARMVASRITNYPTAWVEGSSPDSDLEFVANTKARVKELQQEAERLEKAFRSYHRRVIKNSAKSPLAAKSPPSLHLLEAFKNITSSSPERHIFGEDRVVSEQPQVGTLEERNDVVEALTGSAASRLRGGTSSRRLSSTPLPKAKRSLESEMYLEGLGRSHIASPSPCPDRMPLPSPTESRHSLSIPPVSSPPEQKVGLYRRQTELQDKSEFSDVDKLAFKDNEEFESSFESAGNMPRQLEMGGLSPAGDMSHVDAAAAAVPLSYQHPSVDQKQIEEQKEEEKIREQQVKERRQREERRQSNLQEVLERERRELEKLYQERKMIEESLKIKIKKELEMENELEMSNQEIKDKSAHSENPLEKYMKIIQQEQDQESADKSSKKMVQEGSLVDTLQSSDKVESLTGFSHEELDDSW

SEQ ID NO: 285309 - DNA, 2619 bp, Artificial Sequence
  derived and/or modified sequence
atgcacttcctcaaggagctcgctgagtaccatcaggccaaagaatcgtgtaatatggaaacacagacatcttctactttcaacagggattcgctcgcagagaagctgcagttgattgacgaccagtttgccgatgcatacccccaaagaatcaagttcgagagcctggagattaagttaaacgaatacaaaagagagatcgaggagcagcttagagctgaaatgtgtcagaaattaaagttctttaaagatactgaaatcgccaagataaagatggaggccaagaagaagtatgaaaaggagctaacaatgtttcagaacgattttgagaaagcctgccaggctaaatccgaagcgcttgtcctgagagaaaaaagtaccctggaacgaatccataaacatcaagaaatagagaccaaagaaatctatgctcagcgacagctgcttctgaaagatatggatctgttaagggggagagaagccgagttgaagcaacgagtcgaggcattcgagttaaatcaaaaactgcaggaagagaaacataagagcattaccgaggccctgagacggcaagaacagaatattaaatctttcgaggaaacatatgaccgtaagctgaagaacgagttactgaagtatcagctggagttgaaggacgactatatcattagaactaataggcttattgaagatgagagaaagaacaaagagaaggccgtgcaccttcaggaggagctgatcgctataaattccaaaaaggaggaactaaaccagtcagtgaatagggtgaaggagttagagctcgaattagagtctgtcaaggcccaatccctggccatcactaaacagaatcacatgctgaatgaaaaggtgaaagaaatgagcgactattctttgctgaaggaggagaaactggaattgctagcccagaataagctcctaaagcaacagcttgaggagagcaggaacgagaacctaagattgttaaatcgactagctcagcctgcgccggagctggcggtgtttcagaaggagctgaggaaggccgagaaagccatcgttgtggaacacgaggagttcgagagctgtcgccaagccctgcacaagcagttacaagatgagattgagcactctgcccagctgaaagcgcagatcctcgggtacaaagcctcagtcaagtctctgacaactcaagttgctgacctaaagctccaactgaagcagacccagaccgccctggaaaacgaggtgtactgtaatccaaagcagagtgtgatcgacagatctgtaaacggccttatcaatggcaatgtggtgccctgcaacggtgagattagcggtgattttctaaataatccctttaaacaggaaaacgtccttgccaggatggtggccagccggatcacaaattaccctaccgcctgggttgagggatctagcccggacagcgacttggagtttgtggcaaacactaaggcaagggtcaaggaactgcagcaggaggccgagcgccttgagaaggcattccggagttaccaccgtcgcgtgatcaagaactccgcaaagagccccctggcagccaagagccccccttcacttcacctgctggaagcctttaagaacattacctcctcttctcctgaaaggcacatatttggcgaagatcgcgtggtgtcagaacaaccccaggtcggcactctcgaggaaagaaacgatgttgtagaagcactgacgggaagcgctgctagccgactccgcgggggaacgagctcgcgacggctttcctccacacctcttccaaaagcaaagcgaagcctggagtcagagatgtaccttgagggcttgggtaggtcacatattgcttctccatcaccctgtcctgaccgcatgccccttccaagcccaaccgaaagccgccattctctatcaattccgcccgtaagctcaccaccggaacagaaggtcgggctatatagacgacagacggagctacaggataaaagtgagttcagcgatgtggacaagctagcctttaaggacaatgaggagtttgaatcctccttcgagagcgccggaaatatgccccgccagcttgagatgggtgggctatcacccgccggagacatgagccacgtggacgccgccgcagctgcggttccgttgtcctaccaacacccatccgtcgaccagaagcaaatagaagaacagaaagaggaagagaagatcagagagcagcaggtgaaggagcgcagacagagggaggaacgacgtcagagcaacttgcaggaggtgctcgagagggagcggagggaactggagaaactttaccaagagaggaaaatgattgaagaatccctgaagataaagatcaaaaaagagctcgagatggaaaacgagctggagatgtcaaatcaggagattaaagacaagtcagcccacagtgagaaccccctcgaaaaatacatgaagattatccagcaagaacaggatcaggaatctgctgacaaatctagtaagaaaatggtgcaggaaggatctctggtagacactttgcagtcgtctgataaggtcgagagcctcactggattttcacacgaggagttagacgactcttggtag

SEQ ID NO: 285310 - DNA, 2619 bp, Artificial Sequence
  derived and/or modified sequence
atgcacttcctgaaggagctggccgagtaccaccaggccaaggagagctgcaacatggagacccagaccagcagcaccttcaacagagacagcctggccgagaagctgcagctgattgatgaccagtttgctgatgcctacccccagaggatcaagtttgagagcctggagatcaagctgaatgagtacaagcgggagattgaggagcagctgcgggcagagatgtgccagaagctgaagttcttcaaggacacagaaattgccaagatcaagatggaggccaagaagaagtatgagaaggagctgaccatgttccagaatgactttgagaaggcctgccaggccaagtctgaggccctggtgctgcgggagaagagcaccctggagcgcatccacaagcaccaggagattgagaccaaggagatctatgcccagaggcagctgctgctgaaggacatggacctgctgcggggccgggaggccgagctgaagcagagggtggaggcctttgagctgaaccagaagctgcaggaggagaagcacaagagcatcacagaggccctgcggcggcaggagcagaacatcaagagctttgaggagacctatgacaggaagctgaagaatgagctgctgaagtaccagctggagctgaaggatgactacatcatccgcaccaaccggctgattgaagatgagaggaagaacaaggagaaggctgtgcacctgcaggaggagctgattgccatcaacagcaagaaggaggagctgaaccagagcgtgaacagagtgaaggagctggagctggagctggagagcgtgaaggcccagagcctggccatcaccaagcagaaccacatgctgaatgagaaggtgaaggagatgtctgactacagcctgctgaaggaggagaagctggagctgctggcccagaacaagctgctgaagcagcagctggaggagagcagaaatgaaaacctgcggctgctgaaccggctggcccagcctgcccctgagctggccgtgttccagaaggagctgaggaaggccgagaaggccatcgtggtggagcacgaggagtttgagagctgccggcaggccctgcacaagcagctgcaggatgaaattgagcacagcgcccagctgaaggcccagatcctgggctacaaggcctctgtgaagagcctgaccacccaggtggccgacctgaagctgcagctgaagcagacccagacagccctggagaatgaggtgtactgcaaccccaagcagagcgtcatcgacagatctgtgaatggcctcatcaatggaaatgtggtgccctgcaatggagagatcagcggggacttcctgaacaaccccttcaagcaggagaatgtgctggccaggatggtggccagccgcatcaccaactaccccacagcctgggtggagggcagcagcccagacagcgacctggagtttgtggccaacaccaaggcccgggtgaaggagctgcagcaggaggccgagcggctggagaaggccttccgcagctaccaccggcgggtcatcaagaacagcgccaagagccccctggccgccaagagcccccccagcctgcacctgctggaggccttcaagaacatcaccagcagcagccctgagcggcacatctttggagaggacagagtggtgtctgagcagccccaggtgggcaccctggaggagagaaatgatgtggtggaggccctgaccggcagcgctgccagccggctgcggggcggcaccagcagccggcggctgagcagcacccccctgcccaaggccaagaggagcctggagagcgagatgtacctggagggcctgggccgcagccacatcgccagccccagcccctgcccagacaggatgcccctgcccagccccacagagagccgccacagcctgagcatcccccctgtgagcagccccccagagcagaaggtgggcctgtaccgccggcagacagagctgcaggacaagtctgagttcagtgatgtggacaagctggccttcaaggacaatgaggagtttgagagcagctttgagagcgctggcaacatgccccggcagctggagatgggcggcctgagccctgctggggacatgagccacgtggatgctgctgctgctgctgtgcccctgagctaccagcaccccagcgtggaccagaagcagatcgaggagcagaaggaggaggagaagatccgggagcagcaggtgaaggagcggcggcagcgggaggagcggcggcagagcaacctgcaggaggtgctggagcgggagcggcgggagctggagaagctgtaccaggagaggaagatgattgaggagagcctgaagatcaagatcaagaaggagctggagatggagaatgagctggagatgagcaaccaggagatcaaggacaagagcgcccacagcgagaaccccctggagaagtacatgaagatcatccagcaggagcaggaccaggagagcgctgacaagagcagcaagaagatggtgcaggagggcagcctggtggacaccctgcagagcagtgacaaggtggagagcctgaccggcttcagccatgaggagctggatgacagctggtag

SEQ ID NO: 285311 - DNA, 2619 bp, Artificial Sequence
  derived and/or modified sequence
atgcacttcctgaaggagctggccgagtaccaccaggccaaggagagttgtaatatggaaactcagactagcagtactttcaacagggatagcttggcagagaaactacagctaatagacgatcaatttgcagatgcctacccccaacgcattaaattcgagtccctagagattaaattaaatgaatataaacgtgagatcgaggagcaactgcgcgccgagatgtgtcagaaactgaagttctttaaagatacggaaatagcaaagatcaagatggaggctaaaaagaaatatgagaaagaactgaccatgtttcagaatgattttgagaaggcctgccaggctaaatccgaagcccttgtgttgagagagaagtctactttggagcgtatccataagcatcaggagatcgagaccaaagaaatatatgcacaacgtcaattactgcttaaagatatggatttactgagggggagagaagctgagctcaaacaacgggtggaggcattcgagctcaatcagaagttgcaggaagagaagcataagagtattaccgaagctctgcgtcggcaagaacagaatatcaaatcattcgaagagacatacgatcggaagctcaagaatgaactgctgaaataccagttggaactcaaagacgactacatcattcgcactaacagacttatcgaggatgagaggaaaaataaagaaaaggccgtgcatctccaggaagagcttatcgcgattaattccaagaaggaggaactcaatcagtccgtgaaccgcgtcaaagagcttgagcttgagctcgagagcgtgaaggcgcagtcgctggctatcaccaaacagaatcatatgctcaatgagaaagtcaaggagatgtctgattattccctgctcaaggaggaaaaattggagctgctggcccaaaacaagttgctgaagcaacaactggaggaaagcagaaacgaaaacctacgcctgctgaataggctggcacagcctgctcccgaactggcggtgtttcagaaggagctgagaaaggccgagaaagcaatagtagtagagcacgaggagttcgaatcatgtaggcaagcgttgcacaaacaacttcaagacgagattgagcattctgcacaattaaaggcccagatactgggatacaaggcgagtgtgaagtcacttaccacacaagtggccgacctaaagctccagctgaagcaaacccaaaccgccctggaaaatgaggtctactgtaacccaaagcaatcagtgatcgaccggtcagtgaacggcctgatcaacggcaatgtggtcccttgcaatggggaaatctctggcgatttcctcaataacccctttaaacaggagaacgtgctggctaggatggttgccagccggatcaccaattatccaactgcctgggtagaggggagcagccccgactcagacttggaatttgttgcgaatactaaggcccgtgtaaaagagttgcaacaggaggcggaacggctcgagaaggcgttcagaagttaccacaggcgtgtgattaagaattctgcaaagtccccccttgctgcgaagtcacctccgtctctccatctcctggaggcttttaagaacatcacaagttccagcccagaacggcacattttcggtgaggacagagtggtgagcgagcagcctcaggtagggactctggaggaacgaaatgatgtggtggaggccttgaccggctcggccgccagcaggttgcgcggggggacctcttctcgacgcctgagctccactccactgcctaaagccaagcggtctctggagagcgagatgtacttagaagggctcggccgatctcacatcgcctccccttctccatgcccggataggatgccccttccttctccgactgaatcccggcatagtctatctataccccctgtttcttccccgcctgagcaaaaggtcggtctgtatagacgacaaactgagttgcaggacaagtccgaattcagcgacgtcgacaaactggccttcaaagacaacgaggaattcgaaagttccttcgagtccgcaggcaatatgcctcgacagctagagatgggcgggctgagcccggctggtgatatgagtcacgtcgacgctgcggcagctgcagttcccctgagctatcaacatccctctgtcgatcagaagcagattgaggagcagaaggaagaagaaaagattagggaacagcaagtgaaagaacgcaggcagagagaggaacggaggcagtcaaacctccaggaagttctcgagagagaacgccgcgaactcgagaaactctatcaagaaaggaaaatgattgaagagtccttaaaaattaagatcaagaaggagctggaaatggaaaacgagctggagatgagtaaccaagaaatcaaagacaaatcagcacattccgaaaatcctcttgaaaagtatatgaagataatccagcaggagcaagaccaggagagtgccgacaagagtagtaaaaagatggtgcaggaagggtcactcgtggataccctgcaatcttccgataaggtagaatccttaactgggttttcacacgaggagctggacgactcatggtag

SEQ ID NO: 285312 - DNA, 2619 bp, Artificial Sequence
  derived and/or modified sequence
atgcattttctgaaggaactcgcagagtaccaccaggcaaaagagagttgcaacatggagacgcaaacctccagcaccttcaaccgggactcattagcagagaaattgcaactcatagatgaccagtttgcagatgcctaccctcagcgcattaaatttgagtctttggagattaagctgaacgaatataagagagaaatcgaggaacaactgcgtgccgagatgtgccaaaagctgaagttcttcaaggataccgaaatagccaagattaagatggaggctaagaaaaaatatgagaaggaattgaccatgtttcagaacgatttcgaaaaagcttgccaggctaaatcagaagccctcgtgctccgtgagaagtctactctcgagcgcattcataagcaccaagagatcgagactaaagagatctatgctcagagacagctactactaaaagatatggatctcctccggggacgagaagctgaactcaagcagcgcgtcgaggcctttgaacttaaccagaagctgcaggaggaaaagcataagtctattacggaagcactccgcaggcaagagcagaacattaagtcgttcgaggagacatacgatagaaagctgaagaacgagctgctgaaatatcaactggagttgaaagatgattatatcattagaacaaatcgtctcatcgaggatgagcgtaagaataaggaaaaggcagtgcatcttcaggaggagctaatcgcaattaatagtaagaaggaagaactgaaccagtctgtgaacagggtgaaagaattagaactggaactggagtctgtgaaagcccagagcttggctattacaaagcagaatcacatgcttaacgaaaaggtcaaggagatgtctgattattcactccttaaagaggagaaactggagctgctcgcccagaataagttattaaagcagcaacttgaagagagcagaaatgagaatctcaggctgttgaatagactagcccagccggcacctgagctggctgtgttccagaaggagctacgcaaagcggagaaagcgattgtggtcgagcacgaggagtttgagtcatgtagacaggcactccataaacagctccaagacgaaattgaacacagcgcacagttgaaagcgcaaatcctgggatacaaggcaagtgttaaaagcctcaccacacaagtggcagatctcaaactccaacttaaacagacgcagacagccctggaaaatgaggtgtactgtaatcccaagcaaagtgtgattgacaggtcagtgaacggattgatcaacggaaatgtagtgccctgcaacggcgagatctcgggtgatttcctgaataacccttttaaacaagagaacgtcctggcacggatggtggccagcagaatcaccaactaccccaccgcctgggtggagggcagtagtccagattcggatcttgagttcgtcgcgaacactaaggcacgggtgaaggaactgcagcaagaagcagagagactggaaaaggctttcaggagctaccatagaagggtgataaaaaatagcgcaaaaagtcctttggcggcaaagagcccgccttccctgcacctgctggaagcctttaagaatatcacttcatccagccccgaacgccacatttttggtgaagatcgggtggtgtccgaacaaccacaggtgggaactttagaagaacgaaacgatgtcgtggaagccttgacaggctccgccgcttcccggctcaggggtggaaccagttcccgacgattgtctagcaccccccttcctaaggccaaacggtcgttagaatctgaaatgtacctggagggcctcggaaggtctcacatcgcatcaccgtccccttgtccggataggatgccccttccttcccccacagagtcaagacactctttgtcgattccgcctgtctcatccccacctgagcagaaagtggggctgtaccggagacagactgaactgcaagacaagagcgaatttagcgacgtggataagctggccttcaaagataatgaggagtttgagtcgagtttcgaatcagctgggaacatgccgaggcagctggaaatgggaggcctgtcccctgccggtgacatgtctcacgtggacgcagctgccgctgcagtgcctttgtcttaccagcatccctccgtggatcagaaacagatcgaagaacaaaaggaggaggaaaaaatccgggaacagcaagtcaaggagaggcgacagcgggaggaacgtaggcagagcaacctgcaggaggttctggagcgggagagaagggagcttgaaaagttgtatcaggaacgtaagatgattgaagagtccttgaaaataaaaatcaagaaagaacttgagatggagaatgagctggagatgagtaaccaagagataaaggacaaatccgcacactccgagaatccgctggagaaatacatgaagattatccagcaggagcaagaccaggagagcgcagacaaaagtagtaagaaaatggtgcaagaagggtcactggtggacaccttgcagtcttctgataaagtcgaatctttgacagggtttagccatgaggagctggatgactcttggtag

SEQ ID NO: 285313 - DNA, 2619 bp, Artificial Sequence
  derived and/or modified sequence
atgcacttcctgaaggagctggccgagtaccaccaggccaaggagagctgcaacatggagacccagaccagcagcaccttcaacagagacagcctggccgagaagctgcagctgatcgacgaccagttcgccgacgcctacccccagagaatcaagttcgagagcctggagatcaagctgaacgagtacaagagagagatcgaggagcagctgagagccgagatgtgccagaagctgaagttcttcaaggacaccgagatcgccaagatcaagatggaggccaagaagaagtacgagaaggagctgaccatgttccagaacgacttcgagaaggcctgccaggccaagagcgaggccctggtgctgagagagaagagcaccctggagagaatccacaagcaccaggagatcgagaccaaggagatctacgcccagagacagctgctgctgaaggacatggacctgctgagaggcagagaggccgagctgaagcagagagtggaggccttcgagctgaaccagaagctgcaggaggagaagcacaagagcatcaccgaggccctgagaagacaggagcagaacatcaagagcttcgaggagacctacgacagaaagctgaagaacgagctgctgaagtaccagctggagctgaaggacgactacatcatcagaaccaacagactgatcgaggacgagagaaagaacaaggagaaggccgtgcacctgcaggaggagctgatcgccatcaacagcaagaaggaggagctgaaccagagcgtgaacagagtgaaggagctggagctggagctggagagcgtgaaggcccagagcctggccatcaccaagcagaaccacatgctgaacgagaaggtgaaggagatgagcgactacagcctgctgaaggaggagaagctggagctgctggcccagaacaagctgctgaagcagcagctggaggagagcagaaacgagaacctgagactgctgaacagactggcccagcccgcccccgagctggccgtgttccagaaggagctgagaaaggccgagaaggccatcgtggtggagcacgaggagttcgagagctgcagacaggccctgcacaagcagctgcaggacgagatcgagcacagcgcccagctgaaggcccagatcctgggctacaaggccagcgtgaagagcctgaccacccaggtggccgacctgaagctgcagctgaagcagacccagaccgccctggagaacgaggtgtactgcaaccccaagcagagcgtgatcgacagaagcgtgaacggcctgatcaacggcaacgtggtgccctgcaacggcgagatcagcggcgacttcctgaacaaccccttcaagcaggagaacgtgctggccagaatggtggccagcagaatcaccaactaccccaccgcctgggtggagggcagcagccccgacagcgacctggagttcgtggccaacaccaaggccagagtgaaggagctgcagcaggaggccgagagactggagaaggccttcagaagctaccacagaagagtgatcaagaacagcgccaagagccccctggccgccaagagcccccccagcctgcacctgctggaggccttcaagaacatcaccagcagcagccccgagagacacatcttcggcgaggacagagtggtgagcgagcagccccaggtgggcaccctggaggagagaaacgacgtggtggaggccctgaccggcagcgccgccagcagactgagaggcggcaccagcagcagaagactgagcagcacccccctgcccaaggccaagagaagcctggagagcgagatgtacctggagggcctgggcagaagccacatcgccagccccagcccctgccccgacagaatgcccctgcccagccccaccgagagcagacacagcctgagcatcccccccgtgagcagcccccccgagcagaaggtgggcctgtacagaagacagaccgagctgcaggacaagagcgagttcagcgacgtggacaagctggccttcaaggacaacgaggagttcgagagcagcttcgagagcgccggcaacatgcccagacagctggagatgggcggcctgagccccgccggcgacatgagccacgtggacgccgccgccgccgccgtgcccctgagctaccagcaccccagcgtggaccagaagcagatcgaggagcagaaggaggaggagaagatcagagagcagcaggtgaaggagagaagacagagagaggagagaagacagagcaacctgcaggaggtgctggagagagagagaagagagctggagaagctgtaccaggagagaaagatgatcgaggagagcctgaagatcaagatcaagaaggagctggagatggagaacgagctggagatgagcaaccaggagatcaaggacaagagcgcccacagcgagaaccccctggagaagtacatgaagatcatccagcaggagcaggaccaggagagcgccgacaagagcagcaagaagatggtgcaggagggcagcctggtggacaccctgcagagcagcgacaaggtggagagcctgaccggcttcagccacgaggagctggacgacagctggtag

SEQ ID NO: 285314 - protein, 153 aa, Artificial Sequence
  derived and/or modified sequence
MLLFSRQGKLRLQKWYVPLSDKEKKKITRELVQTVLARKPKMCSFLEWRDLKIVYKRYASLYFCCAIEDQDNELITLEIIHRYVELLDKYFGSVCELDIIFNFEKAYFILDEFLLGGEVQETSKKNVLKAIEQADLLQESQNEEWGGLSEDIL

SEQ ID NO: 285315 - protein, 146 aa, Artificial Sequence
  derived and/or modified sequence
  misc_feature (1)..(1): Xaa can be any naturally occurring amino acid
XRQGKLRLQKWYVPLSDKEKKKITRELVQTVLARKPKMCSFLEWRDLKIVYKRYASLYFCCAIEDQDNELITLEIIHRYVELLDKYFGSVCELDIIFNFEKAYFILDEFLLGGEVQETSKKNVLKAIEQADLLQEPRHEYFNVPVY

SEQ ID NO: 285316 - protein, 195 aa, Artificial Sequence
  derived and/or modified sequence
MPAGCPPHSTTASLPQHGDRGFPFAAAAAAGQAPPRPRPAAAMQFMLLFSRQGKLRLQKWYVPLSDKEKKKITRELVQTVLARKPKMCSFLEWRDLKIVYKRYASLYFCCAIEDQDNELITLEIIHRYVELLDKYFGSVCELDIIFNFEKAYFILDEFLLGGEVQETSKKNVLKAIEQADLLQEPRHEYFNVPVY

SEQ ID NO: 285317 - DNA, 600 bp, Artificial Sequence
  derived and/or modified sequence
cctatgccagccgggtgtcctccccacagcaccacggcttctcttcctcagcacggcgacaggggcttccccttcgccgccgccgccgccgccggccaagctccgccgcgcccgcggcccgcggccgccatgcagtttatgttgctttttagtcgtcagggaaagcttcgactgcaaaaatggtatgtcccactatcagacaaagagaagaaaaagatcacaagagaacttgttcagaccgttttagcacggaaacctaaaatgtgcagcttccttgagtggcgagatctgaagattgtttacaaaagatatgctagtctgtatttttgctgtgctattgaggatcaggacaatgaactaattaccctggaaataattcatcgttatgtggaattacttgacaagtatttcggcagtgtctgtgaactagatatcatctttaattttgagaaggcttattttattttggatgagtttcttttgggaggggaagttcaggaaacatccaagaaaaatgtccttaaagcaattgagcaggctgatctactgcaggagagccagaatgaagaatggggaggtttgtctgaggatatcttatga

SEQ ID NO: 285318 - DNA, 530 bp, Artificial Sequence
  derived and/or modified sequence
gtcgtcagggaaagcttcgactgcaaaaatggtatgtcccactatcagacaaagagaagaaaaagatcacaagagaacttgttcagaccgttttagcacggaaacctaaaatgtgcagcttccttgagtggcgagatctgaagattgtttacaaaagatatgctagtctgtatttttgctgtgctattgaggatcaggacaatgaactaattaccctggaaataattcatcgttatgtggaattacttgacaagtatttcggcagtgtctgtgaactagatatcatctttaattttgagaaggcttattttattttggatgagtttcttttgggaggggaagttcaggaaacatccaagaaaaatgtccttaaagcaattgagcaggctgatctactgcaggagccacgtcatgaatattttaatgtccctgtgtactaaatgactactcatcgagtatgcagaatttcacagaggaaatagaatgctgatatacatatgaaagaaaatatcctcagcatggtgatttat

SEQ ID NO: 285319 - DNA, 919 bp, Artificial Sequence
  derived and/or modified sequence
atgccagccgggtgtcctccccacagcaccacggcttctcttcctcagcacggcgacaggggcttccccttcgccgccgccgccgccgccggccaagctccgccgcgcccgcggcccgcggccgccatgcagtttatgttgctttttagtcgtcagggaaagcttcgactgcaaaaatggtatgtcccactatcagacaaagagaagaaaaagatcacaagagaacttgttcagaccgttttagcacggaaacctaaaatgtgcagcttccttgagtggcgagatctgaagattgtttacaaaagatatgctagtctgtatttttgctgtgctattgaggatcaggacaatgaactaattaccctggaaataattcatcgttatgtggaattacttgacaagtatttcggcagtgtctgtgaactagatatcatctttaattttgagaaggcttattttattttggatgagtttcttttgggaggggaagttcaggaaacatccaagaaaaatgtccttaaagcaattgagcaggctgatctactgcaggagccacgtcatgaatattttaatgtccctgtgtactaaatgactactcatcgagtatgcagaatttcacagaggaaatagaatgctgatatacatatgaaagaaaatatcctcagcatggtgatttattgtcttgtataataatagtagaacattttagaactagtacttttatgattgtatttttttcctgttcacattccaaacttttctgttttattttcattctatatgtgatcttgatacagctcattcctttctgcaactgatttaatctcatcttgacaaaatatgacctagaagtgttttgagtaatattaaatcttaaacacatacatattattaatgaaccatctgtgatttatcttat

SEQ ID NO: 285320 - DNA, 441 bp, Artificial Sequence
  derived and/or modified sequence
tgacgacaggggaagcttaggttgcagaaatggtatgtgccactatccgataaggagaagaagaagattactagagagcttgtgcaaacggtgcttgcacgaaagcccaagatgtgctcattcctggagtggcgagatttgaaaatcgtgtataaacgctacgcctctttgtacttctgttgtgcaatcgaggatcaagataacgaactcattacattagaaattattcatcgctatgtcgagctccttgataaatattttggcagcgtctgcgagttggacattatctttaacttcgagaaggcctattttattcttgacgaatttctgctaggaggtgaggtccaagagacaagtaagaagaatgtgttgaaagccattgaacaagctgacctgcttcaggagcctagacacgaatacttcaacgtgcccgtgtactag

SEQ ID NO: 285321 - DNA, 588 bp, Artificial Sequence
  derived and/or modified sequence
atgcctgccggctgcccaccccactctactacagcttcgctcccccagcatggagacaggggctttccgtttgccgctgccgctgcagccggacaggccccaccccgccccagaccagccgccgctatgcaattcatgttgctttttagtcggcagggtaaattgcggcttcagaaatggtatgttcccttgtccgacaaagagaagaaaaagatcactagagaactggtgcagactgtgctggccaggaagccgaaaatgtgtagcttcttggaatggagggacctcaaaatcgtatacaaacggtacgcctcattgtatttctgttgcgcgatcgaagatcaggataacgagctgattactctggagattattcaccgctacgtggagctcctcgacaaatacttcggcagcgtgtgcgagttagacattatatttaatttcgaaaaggcctatttcatcttggatgagtttctgctcggcggcgaagtccaagagacctcaaagaaaaatgtgctgaaggcaattgaacaggctgacctcttacaggagccacgacacgagtattttaacgttcccgtgtattag

SEQ ID NO: 285322 - DNA, 441 bp, Artificial Sequence
  derived and/or modified sequence
tgaagacagggcaagctgcggctgcagaagtggtacgtgcccctgagtgacaaggagaagaagaagatcacccgggagctggtgcagacagtgctggccaggaagcccaagatgtgcagcttcctggagtggagggacctgaagatcgtgtacaagagatatgccagcctgtacttctgctgtgccatcgaggaccaggacaatgagctgatcaccctggagatcatccacagatatgtggagctgctggacaagtactttggatctgtgtgtgagctggacatcatcttcaactttgagaaggcctacttcatcctggatgagttcctgctgggcggggaggtgcaggagaccagcaagaagaatgtgctgaaggccatcgagcaggccgacctgctgcaggagcccaggcatgagtacttcaacgtgcctgtgtactag

SEQ ID NO: 285323 - DNA, 588 bp, Artificial Sequence
  derived and/or modified sequence
atgcctgctggctgccccccccacagcaccacagccagcctgccccagcacggggaccggggcttcccctttgctgctgctgctgctgctggccaggccccaccccggcccaggcctgctgctgccatgcagttcatgctgctcttcagccggcagggcaagctgcggctgcagaagtggtacgtgcccctgagtgacaaggagaagaagaagatcacccgggagctggtgcagacagtgctggccaggaagcccaagatgtgcagcttcctggagtggagggacctgaagatcgtgtacaagagatatgccagcctgtacttctgctgtgccatcgaggaccaggacaatgaactcatcaccctggagatcatccaccgctacgtggagctgctggacaagtacttcggctctgtgtgtgagctggacatcatcttcaactttgagaaggcctacttcatcctggatgagttcctgctgggcggggaggtgcaggagaccagcaagaagaatgtgctgaaggccatcgagcaggccgacctgctgcaggagcccaggcatgagtacttcaacgtgcctgtgtactag

SEQ ID NO: 285324 - DNA, 441 bp, Artificial Sequence
  derived and/or modified sequence
tgacggcagggcaagctgcggctgcagaagtggtacgtgcccctgtccgataaagaaaaaaaaaagatcacaagggagctcgtgcaaaccgttttggcccgcaaaccgaagatgtgcagtttcctggaatggcgggatcttaagattgtgtacaagcgctacgcatccctctacttttgttgtgctattgaggaccaggataacgagctgatcacgctggagattatccacaggtacgtagagctgctagacaagtatttcgggtcagtgtgcgagctcgatattatcttcaacttcgagaaggcatactttatccttgatgaattcctgcttggaggtgaagttcaggagaccagtaaaaagaacgtcctaaaagcaatagaacaggcagacctactccaggagccccgacacgagtatttcaatgtccccgtctactag

SEQ ID NO: 285325 - DNA, 588 bp, Artificial Sequence
  derived and/or modified sequence
atgcccgccggctgccccccccacagcaccaccgccagcctgccccagcacggggatcgggggttcccctttgccgctgcagcggccgccgggcaggctcccccgcgcccccgtcctgccgccgccatgcagttcatgcttctgttctctaggcagggaaagcttcgcttgcagaaatggtatgtgcccctgtccgataaagagaagaaaaagatcacgagagaactagtgcagacagttttggcccgaaaacctaagatgtgctctttcttagaatggcgggatctcaaaatcgtttacaagcgatacgcctcactctacttttgttgcgcaattgaagaccaggacaatgagctaatcactttggagatcatccaccgctacgtggaattgctggacaaatattttggcagcgtttgtgaattggacataatcttcaacttcgaaaaggcttacttcatactagatgagttcctcttggggggtgaagtgcaggagacctccaagaagaacgtgttaaaggccattgaacaggcagatctcctgcaggagcctcgacacgagtatttcaacgtaccggtatattag

SEQ ID NO: 285326 - DNA, 441 bp, Artificial Sequence
  derived and/or modified sequence
tgaaggcaggggaaactaagactacaaaaatggtatgtgcccctctcggacaaagagaagaaaaaaattactagagagctggtacagactgtcctcgctcggaaacccaagatgtgctcattcctggaatggcgcgaccttaagatcgtttacaagcgttatgcctctttatatttctgctgcgctatcgaagaccaggataatgagttgattaccctcgagatcattcaccgttatgtcgaacttttggataagtacttcggtagtgtatgtgaactggacatcatctttaactttgagaaggcatacttcatcttagatgagttcctcctgggcggagaggtgcaggagacatccaaaaagaatgtgttgaaggctattgagcaggccgacctcctgcaagagcctcgacatgagtacttcaacgtgccagtgtactag

SEQ ID NO: 285327 - DNA, 588 bp, Artificial Sequence
  derived and/or modified sequence
atgccagccggatgtccaccccatagcaccactgcaagtctgcctcagcatggggaccgcggtttcccatttgctgctgccgcagctgccggacaggccccacctcgcccacgcccagccgctgccatgcaattcatgctgctcttctctcgccagggaaagctccgcctacagaaatggtatgtccccctctctgataaggaaaagaaaaagatcacccgcgaactggtgcagactgtgctggcaagaaaacccaagatgtgctcctttttagagtggcgggatcttaaaatagtctacaagcgatatgccagtttgtatttttgctgcgccatagaggatcaagacaacgaattaatcacacttgaaatcatccatcggtacgtcgagctgttggacaagtatttcgggagcgtttgtgagctggacatcatttttaacttcgagaaagcctattttatcctcgatgaattcctactcggtggcgaggtgcaggaaacctctaagaaaaacgtgcttaaagcgatcgagcaggcagatcttctgcaagagcctagacatgagtatttcaatgtgccagtgtattag

SEQ ID NO: 285328 - DNA, 441 bp, Artificial Sequence
  derived and/or modified sequence
tgaagacagggcaagctgagactgcagaagtggtacgtgcccctgagcgacaaggagaagaagaagatcaccagagagctggtgcagaccgtgctggccagaaagcccaagatgtgcagcttcctggagtggagagacctgaagatcgtgtacaagagatacgccagcctgtacttctgctgcgccatcgaggaccaggacaacgagctgatcaccctggagatcatccacagatacgtggagctgctggacaagtacttcggcagcgtgtgcgagctggacatcatcttcaacttcgagaaggcctacttcatcctggacgagttcctgctgggcggcgaggtgcaggagaccagcaagaagaacgtgctgaaggccatcgagcaggccgacctgctgcaggagcccagacacgagtacttcaacgtgcccgtgtactag

SEQ ID NO: 285329 - DNA, 588 bp, Artificial Sequence
  derived and/or modified sequence
atgcccgccggctgccccccccacagcaccaccgccagcctgccccagcacggcgacagaggcttccccttcgccgccgccgccgccgccggccaggccccccccagacccagacccgccgccgccatgcagttcatgctgctgttcagcagacagggcaagctgagactgcagaagtggtacgtgcccctgagcgacaaggagaagaagaagatcaccagagagctggtgcagaccgtgctggccagaaagcccaagatgtgcagcttcctggagtggagagacctgaagatcgtgtacaagagatacgccagcctgtacttctgctgcgccatcgaggaccaggacaacgagctgatcaccctggagatcatccacagatacgtggagctgctggacaagtacttcggcagcgtgtgcgagctggacatcatcttcaacttcgagaaggcctacttcatcctggacgagttcctgctgggcggcgaggtgcaggagaccagcaagaagaacgtgctgaaggccatcgagcaggccgacctgctgcaggagcccagacacgagtacttcaacgtgcccgtgtactag

SEQ ID NO: 285330 - protein, 459 aa, Artificial Sequence
  derived and/or modified sequence
MMSKNDGEIRFGNPAELHGTKVQIPYLTTEKNSFKRMDDEDKQETQSPTMSPLASPPSSPPHYQRVPLSHGYSKLRSSAEQMHPAPYEARQPLVQPEGSSSGGPGTKPLRHQASLIRSFSVERELQDNSSYPDEPWRITEEQREYYVNQFRSLQPDPSSFISGSVAKNFFTKSKLSIPELSYIWELSDADCDGALTLPEFCAAFHLIVARKNGYPLPEGLPPTLQPEYLQAAFPKPKWDCQLFDSYSESLPANQQPRDLNRMEKTSVKDMADLPVPNQDVTSDDKQALKSTINEALPKDVSEDPATKSGLLPPPPALPPRPCPSQSEQVSEAELLPQLSRAPSQAAESSPAKKDVLYSQPPSKPIRRKFRPENQATENQEPSTAASGPASAATMKPHPTVQKQSSKQKKAIQTAIRKNKEANAVLARLNSELQQQLKEVHQERIALENQLEQLRPVTVL

SEQ ID NO: 285331 - DNA, 1380 bp, Artificial Sequence
  derived and/or modified sequence
atgatgagcaagaatgatggcgagatccgtttcgggaacccggctgagctccatggcacgaaggtacagatcccatacctcaccactgagaaaaactcttttaagagaatggatgatgaagataaacaggagacccagagcccaactatgagccccctggcctcaccacctagctcgcctcctcactaccagagggttcccctgtcacacggctactccaagttgagaagcagcgcggagcagatgcaccccgccccatatgaggcacgccagccactagtgcagcctgagggaagtagctcaggtgggccagggaccaagccgcttagacatcaggcctctctgatccgcagtttttctgtagaacgtgagctgcaggacaacagctcctaccccgatgaaccatggcggataaccgaggagcagcgcgaatattacgtgaaccagttcaggtcgctccaaccagacccctcatccttcatctctggctctgtggccaagaacttcttcacgaagagtaagttaagcatcccggagctgagctacatttgggagttgtcggatgccgactgtgatggggccctgacacttccagagttttgtgccgcattccacctgatcgtagccagaaagaatggctacccattgccagaagggctgcccccaacccttcagccggaatatctccaggccgctttcccaaagcctaagtgggattgccagctgttcgactcttacagcgagagcctgccggcaaaccaacagccccgtgatctgaatcggatggagaagacatccgttaaggatatggccgacctacccgtgcctaaccaggatgtgacttctgatgacaaacaggcactgaagagtactatcaacgaggctctcccaaaagacgttagcgaggacccagctacgaaatccggactgctccccccccctcctgctctacctcccagaccatgcccttctcagagtgagcaggtgagcgaggcagagctgctaccccaattgtctcgggcaccatcccaggccgctgaatcctcacccgccaagaaggacgtgttatactcacaacctcccagcaagccaattcgacggaaatttaggccagagaaccaggctacagagaatcaagaaccatccacagcagcaagcggtccagcttcagccgctacaatgaagccacacccaaccgtgcagaagcagtcgtcaaagcagaaaaaggcaatccagaccgccatcagaaagaacaaggaggcaaatgcggtcctggcaaggctgaattcagaactgcagcaacagctgaaagaagttcaccaagaacgcatcgcgctagaaaaccagctggaacagctccgtcctgtaaccgttctgtag

SEQ ID NO: 285332 - DNA, 1380 bp, Artificial Sequence
  derived and/or modified sequence
atgatgagcaagaatgatggagagatccgctttggaaatcctgctgagctgcacggcaccaaggtgcagatcccctacctgaccacagagaagaacagcttcaagaggatggatgatgaggacaagcaggagacccagagccccaccatgagccccctggccagcccccccagcagccccccccactaccagagggtgcccctgagccacggctacagcaagctgcggagcagcgctgagcagatgcacccagccccctatgaggcccggcagcccctggtgcagcctgagggcagcagcagcggcggccctggcaccaagcccctgcggcaccaggccagcctcatccgctccttctctgtggagcgggagctgcaggacaacagcagctacccagatgagccctggaggatcacagaggagcagcgggagtactacgtgaaccagttccgcagcctgcagcctgaccccagcagcttcatcagcggctctgtggccaagaacttcttcaccaagagcaagctgagcatccctgagctgagctacatctgggagctgagtgatgctgactgtgatggagccctgaccctgcctgagttctgtgccgccttccacctgattgtggccaggaagaatggctaccccctgcctgagggcctgccccccaccctgcagcctgagtacctgcaggccgccttccccaagcccaagtgggactgccagctgtttgacagctacagcgagagcctgcctgccaaccagcagccccgggacctgaacaggatggagaagacctctgtgaaggacatggctgacctgcctgtgcccaaccaggatgtgaccagtgatgacaagcaggccctgaagagcaccatcaatgaggccctgcccaaggatgtgtctgaggaccctgccaccaagagcggcctgctgcccccacctccagccctgcccccccggccctgccccagccagagcgagcaggtgtctgaggccgagctgctgccccagctgagccgggcccccagccaggccgctgagagcagccctgccaagaaggatgtgctgtacagccagccccccagcaagcccatccggaggaagttccggcctgagaaccaggccacagagaaccaggagcccagcacagctgccagcggccctgccagcgctgccaccatgaagccccaccccaccgtgcagaagcagagcagcaagcagaagaaggccatccagacagccatcaggaagaacaaggaggccaatgctgtgctggcccggctgaacagcgagctgcagcagcagctgaaggaggtgcaccaggagcgcatcgccctggagaaccagctggagcagctgcggcctgtgacagtgctgtag

SEQ ID NO: 285333 - DNA, 1380 bp, Artificial Sequence
  derived and/or modified sequence
atgatgagcaagaacgacggcgagatccggttcggcaaccccgccgagctccacggcacaaaggtccagatcccttaccttaccacagaaaagaatagtttcaagcgcatggatgacgaggacaagcaggagacccagagtcccaccatgagcccactcgcctcgcccccttctagccccccacattatcagcgtgtccctctgagtcacggttactctaaactcagatccagcgctgagcagatgcacccggccccatatgaggcccgtcaacccctggtgcagcccgagggaagctcctcgggcggacccggtactaagcctctgaggcaccaagcttctcttatacggtcctttagcgtcgagcgtgaactgcaggataactcctcctaccctgacgaaccctggagaataaccgaggaacaacgggagtattacgttaatcagtttagatccctgcagcccgaccccagcagtttcatctccgggtccgtggcaaagaacttttttacgaaaagtaagctgtctatacctgagttatcgtatatctgggaattatctgacgctgattgtgatggagctttgaccctgcccgaattttgcgctgcattccacttgattgtcgcccggaagaatggataccccttaccggagggcttgccccccacattgcagcccgaatatctgcaggcagcctttccaaaacccaaatgggactgccagttattcgacagttattctgaaagcctacctgccaaccaacagccacgcgatctgaacagaatggaaaagaccagtgtaaaagatatggccgacttacccgtgcccaatcaagacgtgaccagcgacgataaacaagcactaaagtcaaccatcaacgaagccttgcccaaagacgtgtcagaagatcctgccaccaagagcggcttgcttccaccgccaccagcccttcctccgcgaccttgtccaagccagtcagaacaagtgagtgaggctgagctgctgccacagctgtcccgcgctccctcacaggccgccgagtcctcacctgctaaaaaagacgtactatacagccagcctccaagtaagccgatacggcgaaagttccggccagaaaaccaggctaccgaaaatcaggaacccagtactgccgcatcaggtcctgcaagcgccgccactatgaaacctcatcccaccgtgcagaagcagtcttcaaagcagaagaaagccattcaaaccgccattagaaaaaataaggaagccaacgctgtcctggccaggttaaattcggagcttcaacagcagctgaaagaggtgcaccaagagcgaatagcactcgaaaatcagttggagcagctgcgacctgtgaccgtcctttag

SEQ ID NO: 285334 - DNA, 1380 bp, Artificial Sequence
  derived and/or modified sequence
atgatgagcaagaatgatggtgagatccgcttcgggaaccctgctgagctgcacggaacaaaagtgcagataccatatttgaccaccgaaaaaaattcttttaaaaggatggacgatgaagacaagcaggagactcagagccctactatgtctccattggcttccccaccttcgtccccaccacactatcaaagagtgcctctgtcccacggctacagtaagcttagatccagcgccgaacagatgcacccagccccatacgaggcacgccagcccctagttcagccagaaggaagctcctcaggaggacctggcacgaagccactgcggcaccaagcctccctcatacgctctttttccgtcgagcgcgaactgcaagacaattcctcctatcctgacgaaccctggcgcattacagaggagcaacgagaatactatgtgaatcaattcaggagtcttcaaccagacccatcttccttcatttcagggtccgtcgccaagaacttttttaccaagagtaaattgtctatccctgagttgtcttacatttgggaattgagtgacgccgattgcgatggggctttgaccctccccgaattctgtgccgcatttcatttaatcgtggctcgaaaaaatgggtatcccctcccagaaggcttgccgcctaccctgcaacccgaatatctgcaggccgcatttccaaagccaaagtgggactgtcagcttttcgattcatacagcgaatctcttcccgcaaatcagcagcccagagatcttaacagaatggagaaaactagcgtgaaggacatggctgatctgccggtgcccaaccaagacgttacttcagacgacaaacaggcactgaagtcaacaattaacgaggctctgccaaaggacgtgtcagaggacccagctacaaaatccggacttttgcctccccctcccgctttgcctccaaggccatgtcccagtcagtcggaacaggtatctgaggctgaactccttccccagctttctcgggcaccatcacaggctgccgagtccagcccagccaagaaggatgttctgtattctcagccgcctagcaagcccataaggagaaagtttaggcccgaaaaccaggctacggagaatcaggagccatccacagccgcttccggccctgcatcagccgcaactatgaaacctcacccaactgtccagaaacaatcatcgaaacagaagaaagcgatccaaacagccataaggaaaaacaaagaagccaatgccgtcctcgcgagattaaattctgagttgcagcaacagctcaaagaggttcatcaagaaaggatcgcattggagaatcagctggagcaactacggcctgttaccgtgctgtag

SEQ ID NO: 285335 - DNA, 1723 bp, Artificial Sequence
  derived and/or modified sequence
aggatgctctgagctctaaaaggaggagcagttttgctggcatgcagaagtggtgaagatcacagaactgtgtggtgcaaagcgggttggttattttggtccaacacagttttacattgccctgaaattaattgctgcagcacaatctggcctcccggtacggatagagagtattaaatgtgaattgcctctgcctcgctttatgatgtcaaagaatgatggtgagatacgatttgggaacccagctgagctgcatggaactaaggttcagattccatatttaactacagaaaaaaattccttcaaaagaatggacgatgaggataaacaggaaacacagtctcccacgatgtcacccctcgcctcccctccttcttccccgcctcattaccagagggtgcccttgagccatggctacagcaaactgcggagcagcgcagaacagatgcatccagcaccttatgaagctaggcagccccttgtccagcccgagggatcctcatcagggggcccaggaaccaagccccttcggcatcaggcttcccttatccggtccttttcagtggagagggaactacaggataacagcagttaccccgacgaaccctggaggataacagaagaacagcgcgagtactatgtcaatcagttccgatcccttcagccagacccaagctctttcatttcaggttctgtggccaagaacttcttcaccaaatcaaagctttccattccagaactctcctatatatgggagcttagtgatgctgactgtgatggagccctgaccctgcctgagttctgtgctgcgtttcatctcattgtggctcggaagaacggctacccattgcctgagggcctccctccaactctgcagccagaatacctgcaggcagcttttcctaagcccaaatgggactgtcaattatttgattcttattctgagtcactgccggcaaatcaacaacctcgtgacttgaatcggatggagaagacatctgttaaagacatggctgaccttcctgtccctaaccaggatgtaactagtgatgacaaacaagctttgaaaagtactatcaatgaagccttaccaaaggacgtgtctgaggatccagctaccaagtcaggattgttacccccaccacctgcgctccctccaagaccttgtccatcacagtctgaacaagtgtcggaggccgagttactcccacagctgagcagagccccatcccaggctgcagaaagtagtccagcaaagaaggatgtactgtattctcagccaccatcaaagcccattcgtaggaaattcagaccagaaaaccaagctacagaaaaccaagagccttccactgctgcaagtgggccagcttctgcggcaaccatgaaaccgcatccaacagtccaaaagcagtcttccaaacagaagaaggccattcaaactgctatccgcaaaaataaagaggcaaacgcagtgctggctcggctgaacagtgagctccagcagcagctcaaggaggttcatcaagaacgaattgcattggaaaaccaattggaacaacttcgtccggtcactgtgttgtgacccccccatggttcaagtgacagtgggtgaccttgtctgccaagatctttcttttgaatgttttgaacccaactacttgtcatagatgtttgactgtgtcaaaagctgtgagcagcaaaatataatccatatgaccttttc

SEQ ID NO: 285336 - DNA, 1380 bp, Artificial Sequence
  derived and/or modified sequence
atgatgagcaagaacgacggcgagatcagattcggcaaccccgccgagctgcacggcaccaaggtgcagatcccctacctgaccaccgagaagaacagcttcaagagaatggacgacgaggacaagcaggagacccagagccccaccatgagccccctggccagcccccccagcagccccccccactaccagagagtgcccctgagccacggctacagcaagctgagaagcagcgccgagcagatgcaccccgccccctacgaggccagacagcccctggtgcagcccgagggcagcagcagcggcggccccggcaccaagcccctgagacaccaggccagcctgatcagaagcttcagcgtggagagagagctgcaggacaacagcagctaccccgacgagccctggagaatcaccgaggagcagagagagtactacgtgaaccagttcagaagcctgcagcccgaccccagcagcttcatcagcggcagcgtggccaagaacttcttcaccaagagcaagctgagcatccccgagctgagctacatctgggagctgagcgacgccgactgcgacggcgccctgaccctgcccgagttctgcgccgccttccacctgatcgtggccagaaagaacggctaccccctgcccgagggcctgccccccaccctgcagcccgagtacctgcaggccgccttccccaagcccaagtgggactgccagctgttcgacagctacagcgagagcctgcccgccaaccagcagcccagagacctgaacagaatggagaagaccagcgtgaaggacatggccgacctgcccgtgcccaaccaggacgtgaccagcgacgacaagcaggccctgaagagcaccatcaacgaggccctgcccaaggacgtgagcgaggaccccgccaccaagagcggcctgctgccccccccccccgccctgccccccagaccctgccccagccagagcgagcaggtgagcgaggccgagctgctgccccagctgagcagagcccccagccaggccgccgagagcagccccgccaagaaggacgtgctgtacagccagccccccagcaagcccatcagaagaaagttcagacccgagaaccaggccaccgagaaccaggagcccagcaccgccgccagcggccccgccagcgccgccaccatgaagccccaccccaccgtgcagaagcagagcagcaagcagaagaaggccatccagaccgccatcagaaagaacaaggaggccaacgccgtgctggccagactgaacagcgagctgcagcagcagctgaaggaggtgcaccaggagagaatcgccctggagaaccagctggagcagctgagacccgtgaccgtgctgtag

SEQ ID NO: 285337 - protein, 112 aa, Artificial Sequence
  derived and/or modified sequence
EYTIDVFFRQTWHDERLKFDGPMKILPLNNLLASKIWTPDTFFHNGKKSVAHNMTTPNKLLRLVDNGTLLYTMRIEEVQKHRSMMKPSVSYTVAPWIQEGGPGGRHRLKMEK

SEQ ID NO: 285338 - protein, 693 aa, Artificial Sequence
  derived and/or modified sequence
MAGGPGPGEPAAPGAQHFLYEVPPWVMCRFYKVMDALEPADWCQFGGWRRAAGGREARGLLAPTPDAPRPAAALIVRDQTELRLCERSGQRTASVLWPWINRNARVADLVHILTHLQLLRARDIITAWHPPAPLPSPGTTAPRPSSIPAPAEAEAWSPRKLPSSASTFLSPAFPGSQTHSGPELGLVPSPASLWPPPPSPAPSSTKPGPESSVSLLQGARPFPFCWPLCEISRGTHNFSEELKIGEGGFGCVYRAVMRNTVYAVKRLKENADLEWTAVKQSFLTEVEQLSRFRHPNIVDFAGYCAQNGFYCLVYGFLPNGSLEDRLHCQTQACPPLSWPQRLDILLGTARAIQFLHQDSPSLIHGDIKSSNVLLDERLTPKLGDFGLARFSRFAGSSPSQSSMVARTQTVRGTLAYLPEEYIKTGRLAVDTDTFSFGVVVLETLAGQRAVKTHGARTKYLKDLVEEEAEEAGVALRSTQSTLQAGLAADAWAAPIAMQIYKKHLGQLACCCLHRRAKRRPPMTQENSYVSSTGRAHSGAAPWQPLAAPSGASAQAAEQLQRGPNQPVESDESLGGLSAALRSWHLTPSCPLDPAPLREAGCPQGDTAGESSWGSGPGSRPTAVEGLALGSSASSSSEPPQIIINPARQKMVQKLALYEDGALDSLQLLSSSSLPGLGLEQDRQGPEESDEFQS

SEQ ID NO: 285339 - protein, 708 aa, Artificial Sequence
  derived and/or modified sequence
MAGGPGPGEPAAPGAQHFLYEVPPWVMCRFYKVMDALEPADWCQFGGWRRAAGGREARGLLAPTPDAPRPAAALIVRDQTELRLCERSGQRTASVLWPWINRNARVADLVHILTHLQLLRARDIITAWHPPAPLPSPGTTAPRPSSIPAPAEAEAWSPRKLPSSASTFLSPAFPGSQTHSGPELGLVPSPASLWPPPPSPAPSSTKPGPESSVSLLQGARPFPFCWPLCEISRGTHNFSEELKIGEGGFGCVYRAVMRNTVYAVKRLKENADLEWTAVKQSFLTEVEQLSRFRHPNIVDFAGYCAQNGFYCLVYGFLPNGSLEDRLHCQTQACPPLSWPQRLDILLGTARAIQFLHQDSPSLIHGDIKSSNVLLDERLTPKLGDFGLARFSRFAGSSPSQSSMVARTQTVRGTLAYLPEEYIKTGRLAVDTDTFSFGVVVLETLAGQRAVKTHGARTKYLKDLVEEEAEEAGVALRSTQSTLQAGLAADAWAAPIAMQIYKKHLDPRPGPCPPELGLGLGQLACCCLHRRAKRRPPMTQENSYVSSTGRAHSGAAPWQPLAAPSGASAQAAEQLQRGPNQPVESDESLGGLSAALRSWHLTPSCPLDPAPLREAGCPQGDTAGESSWGSGPGSRPTAVEGLALGSSASSSSEPPQIIINPARQKMVQKLALYEDGALDSLQLLSSSSLPGLGLEQDRQGPEESDEFQS

SEQ ID NO: 285340 - DNA, 2082 bp, Artificial Sequence
  derived and/or modified sequence
atggccggcggccccggccccggcgagcccgccgcccccggcgcccagcacttcctgtacgaggtgcccccctgggtgatgtgcagattctacaaggtgatggacgccctggagcccgccgactggtgccagttcggcggctggagaagagccgccggcggcagagaggccagaggcctgctggcccccacccccgacgcccccagacccgccgccgccctgatcgtgagagaccagaccgagctgagactgtgcgagagaagcggccagagaaccgccagcgtgctgtggccctggatcaacagaaacgccagagtggccgacctggtgcacatcctgacccacctgcagctgctgagagccagagacatcatcaccgcctggcacccccccgcccccctgcccagccccggcaccaccgcccccagacccagcagcatccccgcccccgccgaggccgaggcctggagccccagaaagctgcccagcagcgccagcaccttcctgagccccgccttccccggcagccagacccacagcggccccgagctgggcctggtgcccagccccgccagcctgtggccccccccccccagccccgcccccagcagcaccaagcccggccccgagagcagcgtgagcctgctgcagggcgccagacccttccccttctgctggcccctgtgcgagatcagcagaggcacccacaacttcagcgaggagctgaagatcggcgagggcggcttcggctgcgtgtacagagccgtgatgagaaacaccgtgtacgccgtgaagagactgaaggagaacgccgacctggagtggaccgccgtgaagcagagcttcctgaccgaggtggagcagctgagcagattcagacaccccaacatcgtggacttcgccggctactgcgcccagaacggcttctactgcctggtgtacggcttcctgcccaacggcagcctggaggacagactgcactgccagacccaggcctgcccccccctgagctggccccagagactggacatcctgctgggcaccgccagagccatccagttcctgcaccaggacagccccagcctgatccacggcgacatcaagagcagcaacgtgctgctggacgagagactgacccccaagctgggcgacttcggcctggccagattcagcagattcgccggcagcagccccagccagagcagcatggtggccagaacccagaccgtgagaggcaccctggcctacctgcccgaggagtacatcaagaccggcagactggccgtggacaccgacaccttcagcttcggcgtggtggtgctggagaccctggccggccagagagccgtgaagacccacggcgccagaaccaagtacctgaaggacctggtggaggaggaggccgaggaggccggcgtggccctgagaagcacccagagcaccctgcaggccggcctggccgccgacgcctgggccgcccccatcgccatgcagatctacaagaagcacctgggccagctggcctgctgctgcctgcacagaagagccaagagaagaccccccatgacccaggagaacagctacgtgagcagcaccggcagagcccacagcggcgccgccccctggcagcccctggccgcccccagcggcgccagcgcccaggccgccgagcagctgcagagaggccccaaccagcccgtggagagcgacgagagcctgggcggcctgagcgccgccctgagaagctggcacctgacccccagctgccccctggaccccgcccccctgagagaggccggctgcccccagggcgacaccgccggcgagagcagctggggcagcggccccggcagcagacccaccgccgtggagggcctggccctgggcagcagcgccagcagcagcagcgagcccccccagatcatcatcaaccccgccagacagaagatggtgcagaagctggccctgtacgaggacggcgccctggacagcctgcagctgctgagcagcagcagcctgcccggcctgggcctggagcaggacagacagggccccgaggagagcgacgagttccagagctag

SEQ ID NO: 285341 - DNA, 2127 bp, Artificial Sequence
  derived and/or modified sequence
atggccggcggccccggccccggcgagcccgccgcccccggcgcccagcacttcctgtacgaggtgcccccctgggtgatgtgcagattctacaaggtgatggacgccctggagcccgccgactggtgccagttcggcggctggagaagagccgccggcggcagagaggccagaggcctgctggcccccacccccgacgcccccagacccgccgccgccctgatcgtgagagaccagaccgagctgagactgtgcgagagaagcggccagagaaccgccagcgtgctgtggccctggatcaacagaaacgccagagtggccgacctggtgcacatcctgacccacctgcagctgctgagagccagagacatcatcaccgcctggcacccccccgcccccctgcccagccccggcaccaccgcccccagacccagcagcatccccgcccccgccgaggccgaggcctggagccccagaaagctgcccagcagcgccagcaccttcctgagccccgccttccccggcagccagacccacagcggccccgagctgggcctggtgcccagccccgccagcctgtggccccccccccccagccccgcccccagcagcaccaagcccggccccgagagcagcgtgagcctgctgcagggcgccagacccttccccttctgctggcccctgtgcgagatcagcagaggcacccacaacttcagcgaggagctgaagatcggcgagggcggcttcggctgcgtgtacagagccgtgatgagaaacaccgtgtacgccgtgaagagactgaaggagaacgccgacctggagtggaccgccgtgaagcagagcttcctgaccgaggtggagcagctgagcagattcagacaccccaacatcgtggacttcgccggctactgcgcccagaacggcttctactgcctggtgtacggcttcctgcccaacggcagcctggaggacagactgcactgccagacccaggcctgcccccccctgagctggccccagagactggacatcctgctgggcaccgccagagccatccagttcctgcaccaggacagccccagcctgatccacggcgacatcaagagcagcaacgtgctgctggacgagagactgacccccaagctgggcgacttcggcctggccagattcagcagattcgccggcagcagccccagccagagcagcatggtggccagaacccagaccgtgagaggcaccctggcctacctgcccgaggagtacatcaagaccggcagactggccgtggacaccgacaccttcagcttcggcgtggtggtgctggagaccctggccggccagagagccgtgaagacccacggcgccagaaccaagtacctgaaggacctggtggaggaggaggccgaggaggccggcgtggccctgagaagcacccagagcaccctgcaggccggcctggccgccgacgcctgggccgcccccatcgccatgcagatctacaagaagcacctggaccccagacccggcccctgcccccccgagctgggcctgggcctgggccagctggcctgctgctgcctgcacagaagagccaagagaagaccccccatgacccaggagaacagctacgtgagcagcaccggcagagcccacagcggcgccgccccctggcagcccctggccgcccccagcggcgccagcgcccaggccgccgagcagctgcagagaggccccaaccagcccgtggagagcgacgagagcctgggcggcctgagcgccgccctgagaagctggcacctgacccccagctgccccctggaccccgcccccctgagagaggccggctgcccccagggcgacaccgccggcgagagcagctggggcagcggccccggcagcagacccaccgccgtggagggcctggccctgggcagcagcgccagcagcagcagcgagcccccccagatcatcatcaaccccgccagacagaagatggtgcagaagctggccctgtacgaggacggcgccctggacagcctgcagctgctgagcagcagcagcctgcccggcctgggcctggagcaggacagacagggccccgaggagagcgacgagttccagagctag

SEQ ID NO: 285342 - DNA, 2082 bp, Artificial Sequence
  derived and/or modified sequence
atggcgggcggaccagggccgggtgaacctgctgcgcccggggcacagcactttctttacgaggtcccaccatgggttatgtgccgtttttataaggtaatggatgcgctagagccagccgactggtgtcaattcggcggttggaggcgggccgcagggggtcgcgaggctcggggcttactggccccaactccggatgccccaagacccgcagctgccttaatcgtgagagaccagaccgaacttcgtctgtgcgaacgaagcggtcagagaaccgctagtgtcctctggccgtggatcaaccgcaatgcccgcgtggccgacctggttcatattctgactcatcttcagcttcttagggcccgcgacattatcactgcctggcatccgcccgcccccttgccttcacccggcacaacggctcctcggccatccagcatccccgcgccggccgaggccgaggcttggagtccacgcaagctgccctcgagtgctagtaccttcctgtctcctgcctttcccggatcacaaactcatagtggtcctgaacttgggctggtgccttcacccgcctccttatggcctccgcctcctagccccgcgcccagctctacaaagcctggacctgaaagtagcgtgtctctcctgcagggggcgagaccttttccattctgctggccactgtgcgaaatttcacgcggaacacacaacttctccgaggaactaaagatcggcgagggcggcttcggctgtgtatatcgcgcagtgatgcgaaataccgtctacgccgtgaagcgcctcaaggagaacgcggaccttgagtggaccgccgtgaaacaatcattcctcacggaggtcgaacagctgtcaagattccggcatccaaatatagttgacttcgccggatactgtgcacagaatggcttctactgcctcgtttacggatttctcccgaacggcagcctggaagaccgccttcactgccagacacaggcctgcccccctctgtcatggcctcagaggctggacattctgttaggtactgcaagagctattcagtttcttcatcaggatagtccctctttgatccatggtgacataaaaagcagcaacgtgctgctggatgagcgcctgactcctaaactcggagattttggcttggccagatttagccggttcgctgggagctcaccgtctcaatcctctatggtggcgcggacacagaccgtaagaggtaccctggcctacctgcccgaagaatatattaaaaccgggcgtctggccgtagatacagatacattctcgttcggcgtagtggtcttggagaccttggccggccaacgcgccgtgaagactcatggagctcgaactaagtatctcaaagatctggtcgaggaagaagcagaagaggccggcgtcgcattaagatccacccagagcaccctgcaggccggtttggctgctgacgcttgggccgcccccattgccatgcaaatttataagaagcacctaggacaactggcttgttgctgcctccacagacgagctaagcgacgacccccgatgacccaggagaattcctatgtatcgtcaacaggacgggcacactccggcgccgcgccttggcaacctctagcagcccccagtggagcatctgcgcaagcggctgagcagctgcagaggggaccgaaccagccggtggaatccgacgagtctctaggtggactgtcagctgctctgagaagttggcatctgaccccttcttgcccattggaccccgctcctctgagagaggccggctgcccccagggggacactgccggggaatcctcctggggttcagggccaggctcccggccaactgctgtggaaggactggctctaggatcgtccgcctcctcctcgtcagaaccacctcagattataataaatccagcaagacaaaagatggtccaaaaactggccctgtacgaggatggagcactggattctcttcaactgttgtcaagttcaagcctgccaggccttgggctggagcaggatagacagggtccagaagagagtgatgaattccagtcctag

SEQ ID NO: 285343 - DNA, 2127 bp, Artificial Sequence
  derived and/or modified sequence
atggccggaggaccagggccaggcgagccagctgcccctggcgcccagcatttcttgtatgaggtgcccccatgggttatgtgtcggttctacaaggtgatggacgcgctcgagcccgccgactggtgccagttcggcggctggcgtcgcgctgctggagggagagaggccagggggctgttggccccgacgccggacgcgcccagaccagcggctgcattgattgtgagggaccagactgaactcaggctctgcgagagaagtggtcaacggaccgcatcagtgctgtggccatggattaacagaaatgctcgcgtggctgatctggtgcatattttaacccacctccagctccttcgggcccgggacattattactgcttggcatcctcctgctcccttgccttcacccggtactacagcgcccaggccaagctccatcccagcaccagcagaggcagaggcctggtcccccagaaaacttcctagttcggcaagtacgtttctgtctcctgcctttcccggctcccagactcactccggacccgagttagggttagtccccagccctgcgagtttgtggcctcctccaccttcaccagctcctagcagcaccaagcctggtcctgagagctcagtttccctcttgcaaggggcccgaccatttccgttttgctggccactgtgcgaaatttctagaggcactcataacttcagtgaagaacttaagattggcgaaggtgggttcggctgtgtctaccgcgctgttatgaggaataccgtgtatgcggttaagagacttaaagaaaacgcggaccttgaatggaccgcagtcaagcaaagctttttgaccgaggtggaacagctatcaaggttccgccacccgaatattgtcgacttcgccggatactgtgcacagaatggcttttactgtctcgtatacggatttcttccaaatgggtcactcgaggatcggttacattgccaaacgcaggcgtgtccacccctgagctggccacagagactggacattctgctggggactgcaagagctatccaatttctacaccaggatagtccttcattgatccacggtgacatcaaatccagcaacgtcttgctcgacgagcgactaacaccaaagcttggcgactttggactggcaagattttcccggtttgcagggtcatctccaagtcagagctccatggttgctcgcacccaaacggttcgtggaacactggcttacctccctgaggagtacataaaaaccggcaggctggccgtggatacagataccttcagctttggcgtagttgtgctggagactctcgccgggcagagggcggtgaaaacccatggcgctagaacaaagtacctgaaggatctggtcgaggaagaggccgaagaagcaggtgtggcccttaggtccactcagagcacccttcaggccggcctcgctgccgatgcttgggcggccccaatcgcgatgcagatttataagaagcacctagaccccaggcctggcccatgccccccagaactcggtttgggtctcggccaacttgcctgttgttgccttcacaggagagcaaaaagacgacctccaatgacccaggagaacagctatgtatcctctacaggcagagcccatagcggggccgccccctggcagccactggccgcaccgtcaggagcctccgcccaggcggccgagcaattgcaacgcgggcccaatcaacctgtggagtcagacgagagtttgggaggcctgtcagccgccttacggagctggcacctgacccccagctgtcctctggatcccgcaccacttcgggaagcaggttgcccacaaggcgacaccgccggcgaaagcagttggggaagcgggcctggttcaagaccaaccgccgtagaaggtctggccctaggatcctcggcatcttctagttccgagcctcctcagatcattattaaccctgccaggcaaaaaatggtgcagaagctcgccctttatgaggacggggccctcgactccctccagttactctctagctcaagcctgcccggcctggggttggaacaggaccggcaaggcccggaggaaagtgatgaattccaaagctag

SEQ ID NO: 285344 - DNA, 2082 bp, Artificial Sequence
  derived and/or modified sequence
atggccggcggccctggccctggagagcctgctgcccctggggcccagcacttcctgtatgaggtgcccccctgggtgatgtgccgcttctacaaggtgatggatgccctggagcctgctgactggtgccagtttggaggctggaggagagctgctgggggccgggaggcccggggcctgctggcccccaccccagatgcccccaggcctgctgctgccctgattgtgcgggaccagacagagctgcggctgtgtgagaggagcggccagaggacagcctctgtgctgtggccctggatcaacagaaatgcccgggtggccgacctggtgcacatcctgacccacctgcagctgctgcgggcccgggacatcatcacagcctggcaccccccagcccccctgcccagccctggcaccacagccccccggcccagcagcatcccagccccagctgaggccgaggcctggagccccaggaagctgcccagcagcgccagcaccttcctgagccctgccttccctggcagccagacccacagcggccctgagctgggcctggtgcccagccctgccagcctgtggcccccaccacccagccctgcccccagcagcaccaagccaggccctgagagctctgtgtccctgctgcagggcgcccggcccttccccttctgctggcccctgtgtgagatcagccggggcacccacaacttcagcgaggagctgaagatcggggagggcggcttcggctgtgtgtacagagctgtgatgaggaacacagtgtatgctgtgaagaggctgaaggaaaatgctgacctggagtggacagctgtgaagcagagcttcctgacagaggtggagcagctgagccgcttccgccaccccaacatcgtggactttgctggctactgtgcccagaatggcttctactgcctggtgtatggcttcctgcccaacggcagcctggaggaccggctgcactgccagacccaggcctgcccccccctgtcctggccccagaggctggacatcctgctgggcacagcccgggccatccagttcctgcaccaggacagccccagcctcatccacggggacatcaagagcagcaatgtgctgctggatgagcggctgacccccaagctgggggactttggcctggcccgcttcagcagatttgctggcagcagccccagccagagctccatggtggcccggacccagacagtgcggggcaccctggcctacctgcctgaggagtacatcaagacaggccgcctggccgtggacacagacaccttctcctttggagtggtggtgctggagaccctggccggccagagagctgtgaagacccatggagcccggaccaagtacctgaaggacctggtggaggaggaggccgaggaggccggcgtggccctgcggagcacccagagcaccctgcaggccggcctggccgcagatgcctgggccgcccccatcgccatgcagatctacaagaagcacctgggccagctggcctgctgctgcctgcaccggcgggccaagaggcggccccccatgacccaggagaacagctatgtgagcagcacaggccgggcccacagcggggccgccccctggcagcccctggccgcccccagcggggccagcgcccaggccgctgagcagctgcagaggggccccaaccagcctgtggagagtgatgagagcctgggcggcctgtctgctgccctgcgctcctggcacctgacccccagctgccccctggaccctgcccccctgcgggaggccggctgcccccagggcgacacagctggggagagctcctggggcagcggccctggcagccggcccacagctgtggagggcctggccctgggcagcagcgccagcagcagcagcgagcccccccagatcatcatcaacccagcccggcagaagatggtgcagaagctggccctgtatgaagatggagccctggacagcctgcagctgctgagcagcagcagcctgcccggcctgggcctggagcaggaccggcagggccctgaggagagtgatgagttccagagctag

SEQ ID NO: 285345 - DNA, 2127 bp, Artificial Sequence
  derived and/or modified sequence
atggccggcggccctggccctggagagcctgctgcccctggggcccagcacttcctgtatgaggtgcccccctgggtgatgtgccgcttctacaaggtgatggatgccctggagcctgctgactggtgccagtttggaggctggaggagagctgctgggggccgggaggcccggggcctgctggcccccaccccagatgcccccaggcctgctgctgccctgattgtgcgggaccagacagagctgcggctgtgtgagaggagcggccagaggacagcctctgtgctgtggccctggatcaacagaaatgcccgggtggccgacctggtgcacatcctgacccacctgcagctgctgcgggcccgggacatcatcacagcctggcaccccccagcccccctgcccagccctggcaccacagccccccggcccagcagcatcccagccccagctgaggccgaggcctggagccccaggaagctgcccagcagcgccagcaccttcctgagccctgccttccctggcagccagacccacagcggccctgagctgggcctggtgcccagccctgccagcctgtggcccccaccacccagccctgcccccagcagcaccaagccaggccctgagagctctgtgtccctgctgcagggcgcccggcccttccccttctgctggcccctgtgtgagatcagccggggcacccacaacttcagcgaggagctgaagatcggggagggcggcttcggctgtgtgtacagagctgtgatgaggaacacagtgtatgctgtgaagaggctgaaggaaaatgctgacctggagtggacagctgtgaagcagagcttcctgacagaggtggagcagctgagccgcttccgccaccccaacatcgtggactttgctggctactgtgcccagaatggcttctactgcctggtgtatggcttcctgcccaacggcagcctggaggaccggctgcactgccagacccaggcctgcccccccctgtcctggccccagaggctggacatcctgctgggcacagcccgggccatccagttcctgcaccaggacagccccagcctcatccacggggacatcaagagcagcaatgtgctgctggatgagcggctgacccccaagctgggggactttggcctggcccgcttcagcagatttgctggcagcagccccagccagagctccatggtggcccggacccagacagtgcggggcaccctggcctacctgcctgaggagtacatcaagacaggccgcctggccgtggacacagacaccttctcctttggagtggtggtgctggagaccctggccggccagagagctgtgaagacccatggagcccggaccaagtacctgaaggacctggtggaggaggaggccgaggaggccggcgtggccctgcggagcacccagagcaccctgcaggccggcctggccgcagatgcctgggccgcccccatcgccatgcagatctacaagaagcacctggacccccggcccggcccctgccccccagagctgggcctgggcctgggccagctggcctgctgctgcctgcacagaagagccaagagaagaccacccatgacccaggagaacagctatgtgagcagcacaggccgggcccacagcggggccgccccctggcagcccctggccgcccccagcggggccagcgcccaggccgctgagcagctgcagaggggccccaaccagcctgtggagagtgatgagagcctgggcggcctgtctgctgccctgcgctcctggcacctgacccccagctgccccctggaccctgcccccctgcgggaggccggctgcccccagggcgacacagctggggagagctcctggggcagcggccctggcagccggcccacagctgtggagggcctggccctgggcagcagcgccagcagcagcagcgagcccccccagatcatcatcaacccagcccggcagaagatggtgcagaagctggccctgtatgaagatggagccctggacagcctgcagctgctgagcagcagcagcctgcccggcctgggcctggagcaggaccggcagggccctgaggagagtgatgagttccagagctag

SEQ ID NO: 285346 - DNA, 3432 bp, Artificial Sequence
  derived and/or modified sequence
atggccggggggccgggcccgggggagcccgcagcccccggcgcccagcacttcttgtacgaggtgccgccctgggtcatgtgccgcttctacaaagtgatggacgccctggagcccgccgactggtgccagttcggtgggtggcggcgggctgccggggggcgggaggcgcgcgggctcctggcgccgacgcctgacgccccccgccccgcagccgccctgatcgtgcgcgaccagaccgagctgcggctgtgcgagcgctccgggcagcgcacggccagcgtcctgtggccctggatcaaccgcaacgcccgtgtggccgacctcgtgcacatcctcacgcacctgcagctgctccgtgcgcgggacatcatcacagcctggcaccctcccgccccgcttccgtccccaggcaccactgccccgaggcccagcagcatccctgcacccgccgaggccgaggcctggagcccccggaagttgccatcctcagcctccaccttcctctccccagcttttccaggctcccagacccattcagggcctgagctcggcctggtcccaagccctgcttccctgtggcctccaccgccatctccagccccttcttctaccaagccaggcccagagagctcagtgtccctcctgcagggagcccgcccctttccgttttgctggcccctctgtgagatttcccggggcacccacaacttctcggaggagctcaagatcggggagggtggctttgggtgcgtgtaccgggcggtgatgaggaacacggtgtatgctgtgaagaggctgaaggagaacgctgacctggagtggactgcagtgaagcagagcttcctgaccgaggtggagcagctgtccaggtttcgtcacccaaacattgtggactttgctggctactgtgctcagaacggcttctactgcctggtgtacggcttcctgcccaacggctccctggaggaccgtctccactgccagacccaggcctgcccacctctctcctggcctcagcgactggacatccttctgggtacagcccgggcaattcagtttctacatcaggacagccccagcctcatccatggagacatcaagagttccaacgtccttctggatgagaggctgacacccaagctgggagactttggcctggcccggttcagccgctttgccgggtccagccccagccagagcagcatggtggcccggacacagacagtgcggggcaccctggcctacctgcccgaggagtacatcaagacgggaaggctggctgtggacacggacaccttcagctttggggtggtagtgctagagaccttggctggtcagagggctgtgaagacgcacggtgccaggaccaagtatctgaaagacctggtggaagaggaggctgaggaggctggagtggctttgagaagcacccagagcacactgcaagcaggtctggctgcagatgcctgggctgctcccatcgccatgcagatctacaagaagcacctgggccagctggcctgctgctgcctgcaccgccgggccaaaaggaggcctcctatgacccaggagaactcctacgtgtccagcactggcagagcccacagtggggctgctccatggcagcccctggcagcgccatcaggagccagtgcccaggcagcagagcagctgcagagaggccccaaccagcccgtggagagtgacgagagcctaggcggcctctctgctgccctgcgctcctggcacttgactccaagctgccctctggacccagcacccctcagggaggccggctgtcctcagggggacacggcaggagaatcgagctgggggagtggcccaggatcccggcccacagccgtggaaggactggcccttggcagctctgcatcatcgtcgtcagagccaccgcagattatcatcaaccctgcccgacagaagatggtccagaagctggccctgtacgaggatggggccctggacagcctgcagctgctgtcgtccagctccctcccaggcttgggcctggaacaggacaggcaggggcccgaagaaagtgatgaatttcagagctgatgtgttcacctgggcagatcccccaaatccggaagtcaaagttctcatggtcagaagttctcatggtgcacgagtcctcagcactctgccggcagtgggggtgggggcccatgcccgcgggggagagaaggaggtggccctgctgttctaggctctgtgggcataggcaggcagagtggaaccctgcctccatgccagcatctgggggcaaggaaggctggcatcatccagtgaggaggctggcgcatgttgggaggctgctggctgcacagacccgtgaggggaggagaggggctgctgtgcaggggtgtggagtagggagctggctcccctgagagccatgcagggcgtctgcagcccaggcctctggcagcagctctttgcccatctctttggacagtggccaccctgcacaatggggccgacgaggcctagggccctcctacctgcttacaatttggaaaagtgtggccgggtgcggtggctcacgcctgtaatcccagcactttgggaggccaaggcaggaggatcgctggagcccagtaggtcaagaccagccagggcaacatgatgagaccctgtctctgccaaaaaattttttaaactattagcctggcgtggtagcgcacgcctgtggtcccagctgctggggaggctgaagtaggaggatcatttatgcttgggaggtcgaggctgcagtgagtcatgattgtatgactgcactccagcctgggtgacagagcaagaccctgtttcaaaaagaaaaaccctgggaaaagtgaagtatggctgtaagtctcatggttcagtcctagcaagaagcgagaattctgagatcctccagaaagtcgagcagcacccacctccaacctcgggccagtgtcttcaggctttactggggacctgcgagctggcctaatgtggtggcctgcaagccaggccatccctgggcgccacagacgagctccgagccaggtcaggcttcggaggccacaagctcagcctcaggcccaggcactgattgtggcagaggggccactacccaaggtctagctaggcccaagacctagttacccagacagtgagaagcccctggaaggcagaaaagttgggagcatggcagacagggaagggaaacattttcagggaaaagacatgtatcacatgtcttcagaagcaagtcaggtttcatgtaaccgagtgtcctcttgcgtgtccaaaagtagcccagggctgtagcacaggcttcacagtgattttgtgttcagccgtgagtcacactacatgcccccgtgaagctgggcattggtgacgtccaggttgtccttgagtaataaaaacgtatgttgc

SEQ ID NO: 285347 - DNA, 2127 bp, Artificial Sequence
  derived and/or modified sequence
atggccggggggccgggcccgggggagcccgcagcccccggcgcccagcacttcttgtacgaggtgccgccctgggtcatgtgccgcttctacaaagtgatggacgccctggagcccgccgactggtgccagttcggtgggtggcggcgggctgccggggggcgggaggcgcgcgggctcctggcgccgacgcctgacgccccccgccccgcagccgccctgatcgtgcgcgaccagaccgagctgcggctgtgcgagcgctccgggcagcgcacggccagcgtcctgtggccctggatcaaccgcaacgcccgtgtggccgacctcgtgcacatcctcacgcacctgcagctgctccgtgcgcgggacatcatcacagcctggcaccctcccgccccgcttccgtccccaggcaccactgccccgaggcccagcagcatccctgcacccgccgaggccgaggcctggagcccccggaagttgccatcctcagcctccaccttcctctccccagcttttccaggctcccagacccattcagggcctgagctcggcctggtcccaagccctgcttccctgtggcctccaccgccatctccagccccttcttctaccaagccaggcccagagagctcagtgtccctcctgcagggagcccgcccctttccgttttgctggcccctctgtgagatttcccggggcacccacaacttctcggaggagctcaagatcggggagggtggctttgggtgcgtgtaccgggcggtgatgaggaacacggtgtatgctgtgaagaggctgaaggagaacgctgacctggagtggactgcagtgaagcagagcttcctgaccgaggtggagcagctgtccaggtttcgtcacccaaacattgtggactttgctggctactgtgctcagaacggcttctactgcctggtgtacggcttcctgcccaacggctccctggaggaccgtctccactgccagacccaggcctgcccacctctctcctggcctcagcgactggacatccttctgggtacagcccgggcaattcagtttctacatcaggacagccccagcctcatccatggagacatcaagagttccaacgtccttctggatgagaggctgacacccaagctgggagactttggcctggcccggttcagccgctttgccgggtccagccccagccagagcagcatggtggcccggacacagacagtgcggggcaccctggcctacctgcccgaggagtacatcaagacgggaaggctggctgtggacacggacaccttcagctttggggtggtagtgctagagaccttggctggtcagagggctgtgaagacgcacggtgccaggaccaagtatctgaaagacctggtggaagaggaggctgaggaggctggagtggctttgagaagcacccagagcacactgcaagcaggtctggctgcagatgcctgggctgctcccatcgccatgcagatctacaagaagcacctggaccccaggcccgggccctgcccacctgagctgggcctgggcctgggccagctggcctgctgctgcctgcaccgccgggccaaaaggaggcctcctatgacccaggagaactcctacgtgtccagcactggcagagcccacagtggggctgctccatggcagcccctggcagcgccatcaggagccagtgcccaggcagcagagcagctgcagagaggccccaaccagcccgtggagagtgacgagagcctaggcggcctctctgctgccctgcgctcctggcacttgactccaagctgccctctggacccagcacccctcagggaggccggctgtcctcagggggacacggcaggagaatcgagctgggggagtggcccaggatcccggcccacagccgtggaaggactggcccttggcagctctgcatcatcgtcgtcagagccaccgcagattatcatcaaccctgcccgacagaagatggtccagaagctggccctgtacgaggatggggccctggacagcctgcagctgctgtcgtccagctccctcccaggcttgggcctggaacaggacaggcaggggcccgaagaaagtgatgaatttcagagctga

SEQ ID NO: 285348 - DNA, 2082 bp, Artificial Sequence
  derived and/or modified sequence
atggccggcggccccggccccggcgagcccgccgcccccggcgcccaacacttcctctatgaagtgcccccttgggtcatgtgtcgcttctacaaagtcatggacgccttagagcccgccgactggtgccagtttggcggctggcggagagctgccggcgggcgagaagccaggggcctgctcgcacctacccccgacgccccacgacccgcagctgctcttatcgtgagagaccaaactgagctgagattatgcgaacggtccggccagaggactgccagtgttctctggccctggataaacaggaacgcaagggtggctgatctggtgcacatcctcacacacctccagctgctgcgggctcgggatatcataacggcctggcatccacctgccccactgcccagcccgggtacaactgcccctaggccatccagtatacctgcgccagcggaggccgaagcgtggtccccccgtaagctgcctagtagtgccagcacttttctgtccccagccttccctggaagccagacccatagtggacctgaactgggcttggtaccttctccagccagcctgtggccacccccaccatctcccgccccgtcaagcaccaagcctggtcccgagagctccgtgtctctccttcaaggggctagaccattccccttctgttggccgctctgtgagatctccaggggaacacataatttttccgaagaactgaaaatcggcgaaggcgggttcggctgcgtttaccgcgcagttatgcggaacacagtctacgcagtaaagaggctgaaagaaaatgctgacctagagtggaccgctgtgaaacagtcgttccttacagaggttgagcagctctccagatttcggcatccaaacatcgtagacttcgcagggtactgcgcccagaatgggttttattgtctggtgtacgggttcctgcctaatggctctttagaggaccggcttcactgtcagactcaagcttgccccccgctctcttggccgcagcgcctggacatcctactcgggactgcccgggcaatacagtttctgcaccaggactcgccatccctgatccacggtgacattaagtcctccaacgtccttctggacgaacgactgaccccaaaactcggcgatttcggtctagcacgtttcagccgatttgctgggagctcaccgtcccagtccagtatggtggccaggactcaaacggttcggggcacactggcctacctcccagaggagtacatcaagaccggaagactggccgtggataccgatacattctcatttggggtggtcgtgctagaaacccttgccgggcagagggctgttaagacacatggggctaggaccaagtatctgaaggatctagtagaagaggaggcagaggaagctggcgtggctcttagatccacccagtccacactccaggcgggtctggccgccgacgcctgggccgcacctatcgcaatgcagatctacaaaaaacatctaggacagctggcctgctgttgtcttcacagaagagccaagaggcgacctcccatgacccaggagaactcgtacgtgtcctccactggacgggcccattctggcgccgccccctggcaaccccttgccgccccctcaggtgcatccgcgcaagctgcggagcagctccaaagaggccccaaccaaccggtcgaaagcgatgaatccttgggagggctgtccgcagctttgcgcagttggcacttgacgcctagttgccccctcgaccctgccccgctccgcgaagccggctgcccccagggggacacagccggagagtccagttggggatccggcccaggcagcagacccaccgctgtggagggtctcgcgctcggatcttccgctagcagctcttctgaacccccccagattattatcaatccagcacggcaaaaaatggtacagaagctggcgttatacgaagatggtgccctggattctttacaactcctgtcgtcaagtagcctgcctgggctgggtttggagcaagatagacagggacccgaagagtcggacgagttccagtcctag

SEQ ID NO: 285349 - DNA, 2127 bp, Artificial Sequence
  derived and/or modified sequence
atggccggcggccccggccccggcgagcccgccgcccccggcgcccaacatttcctttatgaggtaccaccttgggtgatgtgccgcttctacaaggtcatggacgccctggaaccagctgattggtgccaattcggcgggtggcggagagcggccggaggaagagaggctcggggtttactagcacctaccccggatgctcctaggcccgcagccgccttgatcgtgagggatcaaacagaactccgattgtgcgaaagatcaggacagcggaccgccagcgtgttgtggccctggatcaaccgaaatgccagagtcgctgatcttgtccacattctcacccatctccagctactgagggcgcgcgacattattacggcatggcacccaccagcacccctgccctcccccgggacgaccgctcctagaccatcttctatcccagcccccgccgaggccgaagcttggtctccccggaagctgccaagtagcgcgagcacctttctctcaccggccttccccggatctcagacacattctggccctgagcttgggcttgtgccctcaccagcctccctgtggcctcctccccctagcccagcaccttcctccactaagcccggacctgagtctagcgtgagcctgctccagggggccaggccctttcccttttgctggccactatgtgagatatcgcggggaacacataacttcagtgaggagctaaagattggcgaaggagggttcgggtgcgtgtatcgagctgttatgagaaacactgtgtacgccgtcaagaggctgaaggagaatgccgacctggaatggaccgccgtcaagcagtctttcctgacggaggtggaacagctgagcagatttcggcacccaaacattgttgattttgcgggttactgcgcacagaacgggttttactgcttggtgtacggatttctgcccaacggttcacttgaagacaggttgcattgtcagactcaggcttgtccccccctatcatggccccaacggctggacatattactgggcaccgcaagggccatacagtttctacaccaggactccccaagcctgatccatggtgatattaagtcctccaatgtgctgctggacgaaaggctgacacccaaacttggcgattttgggctggcacgattctcaaggttcgctggctcttctccctcgcaaagctccatggtcgcccgtacccagacagtgaggggcacccttgcttaccttcctgaagagtacattaagaccggaagactcgctgtcgatacagatacattttcgtttggcgttgttgtcctggaaacactagcaggacaaagggctgtgaagacgcacggagcgcggaccaaatatttaaaagacctggtggaggaagaggccgaagaagctggcgtcgccctgaggtctactcaatctacactccaggccggcttagcggccgacgcttgggccgctcctattgctatgcagatctataaaaagcatctagatcccagacctggaccctgcccccccgagctgggtttgggcttggggcaactggcctgttgctgcctgcatcggagggccaagcggagacctcctatgacccaggaaaacagttacgtctcatcaaccgggcgggctcactccggtgccgctccttggcagcctctcgccgccccatccggcgcctcggcccaggctgcagaacagttgcagaggggccccaaccagcctgtggaaagtgacgagtccctggggggcctgtctgccgcccttcgatcttggcaccttacgccttcctgccccctggatccagcgcctctgagggaggctggatgcccgcaaggggatactgctggcgaatcttcttggggcagcggcccaggatccaggcctaccgccgtagaagggctcgctttgggcagcagcgcctcaagctcatccgaaccgccccagattatcatcaacccagcaaggcagaagatggtccaaaagctggctctatatgaggacggggccttggattctttgcagttactaagctcctctagcctcccgggcttgggcctcgaacaggacagacagggccccgaagaaagtgacgagtttcagtcctag

SEQ ID NO: 285350 - DNA, 2082 bp, Artificial Sequence
  derived and/or modified sequence
atggcaggagggccaggcccaggcgaacccgctgcccctggggcacagcacttcctctatgaggtccccccatgggtgatgtgcagattctacaaagttatggatgccctggagccagccgattggtgccagtttgggggatggcgcagggcagcaggcggaagggaggctcgtggtctgcttgccccaactccagacgccccacgtcctgcagcagcactcatcgtccgagaccagacggaacttaggctgtgcgagcggtccggacagcgcacagctagcgtactgtggccttggatcaaccgtaatgcccgagtcgccgacttggtccatatactgacccacctgcagcttctgcgcgctagggacatcattactgcgtggcatccccctgctccactgccctcgcccggtaccacagcacctaggccatcatcgatccctgcccctgccgaggcagaggcatggtcaccacgtaaactgccttcctccgcaagtactttcctcagcccagcctttcccggatcgcaaacccactcaggacctgagttagggctggttccatccccagcctctctgtggcctcctccccctagccctgcaccctcttctactaagccaggccctgaatcatctgttagccttctgcagggtgctaggccttttccattctgttggcccctgtgcgagatcagccggggaacacataacttcagcgaagagctcaagatcggcgaaggagggttcggctgcgtgtaccgagccgttatgcgcaatacagtgtatgccgtaaaaaggctgaaggaaaatgccgatttagaatggaccgccgttaagcaaagtttcctgactgaggtggaacaattgagtcggttccgccatcctaacattgtggactttgccggttattgcgcccagaatggcttttactgtctcgtgtacgggtttcttccaaatggtagcctcgaggacagactgcactgccagacccaagcgtgccctccgctgtcctggcctcagaggttagatattctgttaggaacagcccgagcaattcagttcctgcatcaggattcacctagcttaattcacggagacatcaagtctagcaacgtactgttggatgagaggttgacacctaaactgggggatttcggacttgcgagattttcccggtttgccggtagtagcccgagtcaatcttcaatggttgcgagaactcagactgtgcggggaaccctggcctacctgccagaggagtacatcaagactggacggctcgctgtggacaccgatacgttcagctttggagtggtcgttctggagactctggccggtcagcgcgcagtgaaaacccacggagcacgtacaaaatatctgaaggacctcgttgaggaggaggcggaggaagccggtgtggcactcagaagtacccagagtacactccaggccggtctggctgcggatgcttgggcagctcctatcgcgatgcagatctataaaaagcatctaggacaactggcctgttgctgcctgcacagacgtgctaagcggaggcctcccatgacccaggagaatagctatgttagttcgacggggcgtgcacactccggcgcagctccttggcagcccctcgcagcaccctcaggggcatctgcacaagcagccgagcagcttcaacgcggtccgaaccagcctgtcgagtctgacgagtcactcggcggactgtctgccgcactgaggtcctggcacctgacccctagttgccctttggaccccgctcctttgagagaggccggttgcccgcagggagatactgctggtgagagttcatgggggagtggaccagggagccgtcccaccgctgtcgaggggttggctctcggcagttcggcctcctccagttctgaaccaccacagatcatcatcaacccagccaggcagaagatggtgcagaagctagcactttatgaggacggcgctcttgactcactacagctgctgagttccagcagcttgccagggcttggactggagcaggaccgtcagggaccggaagagagcgacgagttccaatcctag

SEQ ID NO: 285351 - DNA, 2127 bp, Artificial Sequence
  derived and/or modified sequence
atggctggtggccctggacccggagaaccggcagcccctggcgctcagcactttttgtacgaagtgcccccttgggtcatgtgccgcttctataaagtaatggacgctttggaacctgccgactggtgccaattcggcggttggaggagagctgccggaggccgagaggccagaggactcctggcgcctacccccgatgctcctcggccagctgctgccctcattgttcgagatcaaacggaacttagactgtgcgagcgctcaggacagcgcaccgcttcagtgttgtggccctggattaaccgaaatgctcgggtggcagacctggtccacatcctcacacatctgcagcttctgcgggcacgagacataataacagcatggcaccctccagcccctttgccttcaccaggtaccacggcccctagaccaagttccatccctgctccagcggaagcagaagcttggtccccacggaagttgccaagttcagcttcaaccttcctcagccctgcctttccaggcagtcagacccactccggtccagaactgggcctcgtgcccagcccggctagcctgtggcccccacctccttcccctgcaccgtctagcaccaagccgggacccgagtcttcggtgagtctgttgcagggtgccagaccatttcctttttgctggcctctgtgtgaaattagccggggaacacacaattttagcgaggaactgaagattggtgaggggggattcggatgcgtgtacagagccgttatgagaaacacagtgtacgcggtgaagaggctcaaagaaaacgcagaccttgaatggacagcggtaaagcaaagttttctgaccgaagttgaacagctgtctcgtttcagacatcctaacatagtggacttcgccggttattgtgcccagaacgggttttactgtctcgtctatggcttcctccctaatggatcactggaggaccgcttacactgccagactcaagcttgtcccccactgtcctggccgcagagactagacattctgctcgggacagctcgtgctatccagttccttcaccaggattccccatccctcatccacggcgacattaagagtagtaacgtgctgctagatgaaagactgactccgaaactgggtgattttggtcttgctagattttcaaggtttgcgggatccagtccctcccagtccagtatggtcgctcgcacccagaccgtgcggggaaccctggcctacctgccggaggagtacattaagacgggcagactagctgtggataccgacaccttcagctttggcgtggtcgtgctggaaacactggccggtcagcgagccgtgaagacccatggggctcgcactaagtatttaaaagacttggttgaagaggaagctgaggaggccggagtcgccctcaggagcacccagtccacattgcaagcgggacttgcagccgacgcatgggcggctcccatcgccatgcagatctataaaaagcatttggaccctagacctggaccctgcccgcctgagctcgggctggggctgggacagttagcttgttgttgccttcatcgaagggcaaagagacggcctcccatgacacaggagaactcatacgtcagctcaaccggcagggcccactcaggcgctgctccatggcaaccgctagctgcccctagcggcgcaagcgcgcaagcagctgaacaacttcagcgcggtcccaatcagcccgtggaatctgacgagtctttaggtggactaagcgcggctctcaggtcatggcacttgaccccgtcctgcccgctggatcccgcacctctccgggaagccggatgccctcaaggggacacagccggagagtcctcatggggatctgggccaggttcacgacctaccgcagtggagggtctggcactaggctcttctgcatctagcagctccgagccccctcagattattattaatcctgccagacagaaaatggtgcaaaagctggcgctgtacgaagatggagctctggactccctgcagctgctgagtagtagctctctcccaggactgggattggagcaggaccgacaggggcctgaagagagcgacgaattccaatcttag

SEQ ID NO: 285352 - DNA, 576 bp, Artificial Sequence
  derived and/or modified sequence
aacggcctgacgtcggcggagggaagcaggcgcaggctccgtgaggaggcaagggaactctggcgtaagagctttgtgtgaccagggcagggctggttagaagtgctcagggcccagactcagccaggaatcaagaatccgggctttgcccctgcaatcaacccacggaagctccgggaatggcggccaagcacgcggatcctgacgttcacatatctcagggagttgatgaccttgttttcagaaggtgactcaggtcaacacaggggcccccatctggtcgacagatgcagtggttctaggatctgccaagcatccaggtggagagcctgaggttctgagggggacaggctgacaagtaggacccgaggcactggaggagcattgaaggagaagatctgcctgtgggtcttcattgcccagctcctgcccgcactcctgcctgctgccctgaccagagtcatcatgcctcttgagcagaggagtcagcactgcaagcctgaagaaggccttgaggcccgaggagaggccctgggcctggtgggtgcgcaggctcctgctactgaggagcagcag

SEQ ID NO: 285353 - DNA, 1724 bp, Artificial Sequence
  derived and/or modified sequence
agagacaagcgagcttctgcgtctgactcgcagcttgagactggcggagggaagcccgcccaggctctataaggagacaaggttctgagcagacaggccaaccggaggacaggattccctggaggccacagaggagcaccaaggagaagatctgcctgtgggtccccattgcccagcttttgcctgcactcttgcctgctgccctgaccagagtcatcatgtcttctgagcagaagagtcagcactgcaagcctgaggaaggcgttgaggcccaagaagaggccctgggcctggtgggtgcacaggctcctactactgaggagcaggaggctgctgtctcctcctcctctcctctggtccctggcaccctggaggaagtgcctgctgctgagtcagcaggtcctccccagagtcctcagggagcctctgccttacccactaccatcagcttcacttgctggaggcaacccaatgagggttccagcagccaagaagaggaggggccaagcacctcgcctgacgcagagtccttgttccgagaagcactcagtaacaaggtggatgagttggctcattttctgctccgcaagtatcgagccaaggagctggtcacaaaggcagaaatgctggagagagtcatcaaaaattacaagcgctgctttcctgtgatcttcggcaaagcctccgagtccctgaagatgatctttggcattgacgtgaaggaagtggaccccgccagcaacacctacacccttgtcacctgcctgggcctttcctatgatggcctgctgggtaataatcagatctttcccaagacaggccttctgataatcgtcctgggcacaattgcaatggagggcgacagcgcctctgaggaggaaatctgggaggagctgggtgtgatgggggtgtatgatgggagggagcacactgtctatggggagcccaggaaactgctcacccaagattgggtgcaggaaaactacctggagtaccggcaggtacccggcagtaatcctgcgcgctatgagttcctgtggggtccaagggctctggctgaaaccagctatgtgaaagtcctggagcatgtggtcagggtcaatgcaagagttcgcattgcctacccatccctgcgtgaagcagctttgttagaggaggaagagggagtctgagcatgagttgcagccagggctgtggggaaggggcagggctgggccagtgcatctaacagccctgtgcagcagcttcccttgcctcgtgtaacatgaggcccattcttcactctgtttgaagaaaatagtcagtgttcttagtagtgggtttctattttgttggatgacttggagatttatctctgtttccttttacaattgttgaaatgttccttttaatggatggttgaattaacttcagcatccaagtttatgaatcgtagttaacgtatattgctgttaatatagtttaggagtaagagtcttgttttttattcagattgggaaatccgttctattttgtgaatttgggacataataacagcagtggagtaagtatttagaagtgtgaattcaccgtgaaataggtgagataaattaaaagatacttaattcccgccttatgcctcagtctattctgtaaaatttaaaaaatatatatgcatacctggatttccttggcttcgtgaatgtaagagaaattaaatctgaataaataattctttctgttaa

SEQ ID NO: 285354 - DNA, 1773 bp, Artificial Sequence
  derived and/or modified sequence
agaaagcctcaggggcccggatgtgatgccactgacttgcgcattgggggttagagagaagcgagctgctgtctgaccagcagcttgggattggtggaaggaagcaggccaggccctgtgaggagtcaaggttctgagcagacaggccaaccggaggacaggattccctggaggccacagaggagcaccaaggagaagatctgcctgtgggtccccattgcccagcttttgcctgcactcttgcctgctgccctgaccagagtcatcatgtcttctgagcagaagagtcagcactgcaagcctgaggaaggcgttgaggcccaagaagaggccctgggcctggtgggtgcacaggctcctactactgaggagcaggaggctgctgtctcctcctcctctcctctggtccctggcaccctggaggaagtgcctgctgctgagtcagcaggtcctccccagagtcctcagggagcctctgccttacccactaccatcagcttcacttgctggaggcaacccaatgagggttccagcagccaagaagaggaggggccaagcacctcgcctgacgcagagtccttgttccgagaagcactcagtaacaaggtggatgagttggctcattttctgctccgcaagtatcgagccaaggagctggtcacaaaggcagaaatgctggagagagtcatcaaaaattacaagcgctgctttcctgtgatcttcggcaaagcctccgagtccctgaagatgatctttggcattgacgtgaaggaagtggaccccgccagcaacacctacacccttgtcacctgcctgggcctttcctatgatggcctgctgggtaataatcagatctttcccaagacaggccttctgataatcgtcctgggcacaattgcaatggagggcgacagcgcctctgaggaggaaatctgggaggagctgggtgtgatgggggtgtatgatgggagggagcacactgtctatggggagcccaggaaactgctcacccaagattgggtgcaggaaaactacctggagtaccggcaggtacccggcagtaatcctgcgcgctatgagttcctgtggggtccaagggctctggctgaaaccagctatgtgaaagtcctggagcatgtggtcagggtcaatgcaagagttcgcattgcctacccatccctgcgtgaagcagctttgttagaggaggaagagggagtctgagcatgagttgcagccagggctgtggggaaggggcagggctgggccagtgcatctaacagccctgtgcagcagcttcccttgcctcgtgtaacatgaggcccattcttcactctgtttgaagaaaatagtcagtgttcttagtagtgggtttctattttgttggatgacttggagatttatctctgtttccttttacaattgttgaaatgttccttttaatggatggttgaattaacttcagcatccaagtttatgaatcgtagttaacgtatattgctgttaatatagtttaggagtaagagtcttgttttttattcagattgggaaatccgttctattttgtgaatttgggacataataacagcagtggagtaagtatttagaagtgtgaattcaccgtgaaataggtgagataaattaaaagatacttaattcccgccttatgcctcagtctattctgtaaaatttaaaaaatatatatgcatacctggatttccttggcttcgtgaatgtaagagaaattaaatctgaataaataattctttctgttaa

SEQ ID NO: 285355 - DNA, 1727 bp, Artificial Sequence
  derived and/or modified sequence
ggttagagagaagcgagctgctctgtctgaccagcagcttgggattggcggagggaagcgggccaggccctgtgaggagtcaaggttctgagcagacaggccaaccggaggacaggattccctggaggccacagaggagcaccaaggagaagatctgcctgtgggtccccattgcccagcttttgcctgcactcttgcctgctgccctgaccagagtcatcatgtcttctgagcagaagagtcagcactgcaagcctgaggaaggcgttgaggcccaagaagaggccctgggcctggtgggtgcacaggctcctactactgaggagcaggaggctgctgtctcctcctcctctcctctggtccctggcaccctggaggaagtgcctgctgctgagtcagcaggtcctccccagagtcctcagggagcctctgccttacccactaccatcagcttcacttgctggaggcaacccaatgagggttccagcagccaagaagaggaggggccaagcacctcgcctgacgcagagtccttgttccgagaagcactcagtaacaaggtggatgagttggctcattttctgctccgcaagtatcgagccaaggagctggtcacaaaggcagaaatgctggagagagtcatcaaaaattacaagcgctgctttcctgtgatcttcggcaaagcctccgagtccctgaagatgatctttggcattgacgtgaaggaagtggaccccgccagcaacacctacacccttgtcacctgcctgggcctttcctatgatggcctgctgggtaataatcagatctttcccaagacaggccttctgataatcgtcctgggcacaattgcaatggagggcgacagcgcctctgaggaggaaatctgggaggagctgggtgtgatgggggtgtatgatgggagggagcacactgtctatggggagcccaggaaactgctcacccaagattgggtgcaggaaaactacctggagtaccggcaggtacccggcagtaatcctgcgcgctatgagttcctgtggggtccaagggctctggctgaaaccagctatgtgaaagtcctggagcatgtggtcagggtcaatgcaagagttcgcattgcctacccatccctgcgtgaagcagctttgttagaggaggaagagggagtctgagcatgagttgcagccagggctgtggggaaggggcagggctgggccagtgcatctaacagccctgtgcagcagcttcccttgcctcgtgtaacatgaggcccattcttcactctgtttgaagaaaatagtcagtgttcttagtagtgggtttctattttgttggatgacttggagatttatctctgtttccttttacaattgttgaaatgttccttttaatggatggttgaattaacttcagcatccaagtttatgaatcgtagttaacgtatattgctgttaatatagtttaggagtaagagtcttgttttttattcagattgggaaatccgttctattttgtgaatttgggacataataacagcagtggagtaagtatttagaagtgtgaattcaccgtgaaataggtgagataaattaaaagatacttaattcccgccttatgcctcagtctattctgtaaaatttaaaaaatatatatgcatacctggatttccttggcttcgtgaatgtaagagaaattaaatctgaataaataattctttctgttaa

SEQ ID NO: 285356 - DNA, 1721 bp, Artificial Sequence
  derived and/or modified sequence
ttagagagaagcgagctgctctgaccagccgcttgggattggcggagggaagcgggccaggccctgtgaggagtcaaggttctgagcagacaggccaaccggaggacaggattccctggaggccacagaggagcaccaaggagaagatctgcctgtgggtccccattgcccagcttttgcctgcactcttgcctgctgccctgaccagagtcatcatgtcttctgagcagaagagtcagcactgcaagcctgaggaaggcgttgaggcccaagaagaggccctgggcctggtgggtgcacaggctcctactactgaggagcaggaggctgctgtctcctcctcctctcctctggtccctggcaccctggaggaagtgcctgctgctgagtcagcaggtcctccccagagtcctcagggagcctctgccttacccactaccatcagcttcacttgctggaggcaacccaatgagggttccagcagccaagaagaggaggggccaagcacctcgcctgacgcagagtccttgttccgagaagcactcagtaacaaggtggatgagttggctcattttctgctccgcaagtatcgagccaaggagctggtcacaaaggcagaaatgctggagagagtcatcaaaaattacaagcgctgctttcctgtgatcttcggcaaagcctccgagtccctgaagatgatctttggcattgacgtgaaggaagtggaccccgccagcaacacctacacccttgtcacctgcctgggcctttcctatgatggcctgctgggtaataatcagatctttcccaagacaggccttctgataatcgtcctgggcacaattgcaatggagggcgacagcgcctctgaggaggaaatctgggaggagctgggtgtgatgggggtgtatgatgggagggagcacactgtctatggggagcccaggaaactgctcacccaagattgggtgcaggaaaactacctggagtaccggcaggtacccggcagtaatcctgcgcgctatgagttcctgtggggtccaagggctctggctgaaaccagctatgtgaaagtcctggagcatgtggtcagggtcaatgcaagagttcgcattgcctacccatccctgcgtgaagcagctttgttagaggaggaagagggagtctgagcatgagttgcagccagggctgtggggaaggggcagggctgggccagtgcatctaacagccctgtgcagcagcttcccttgcctcgtgtaacatgaggcccattcttcactctgtttgaagaaaatagtcagtgttcttagtagtgggtttctattttgttggatgacttggagatttatctctgtttccttttacaattgttgaaatgttccttttaatggatggttgaattaacttcagcatccaagtttatgaatcgtagttaacgtatattgctgttaatatagtttaggagtaagagtcttgttttttattcagattgggaaatccgttctattttgtgaatttgggacataataacagcagtggagtaagtatttagaagtgtgaattcaccgtgaaataggtgagataaattaaaagatacttaattcccgccttatgcctcagtctattctgtaaaatttaaaaaatatatatgcatacctggatttccttggcttcgtgaatgtaagagaaattaaatctgaataaataattctttctgttaa

SEQ ID NO: 285357 - DNA, 1029 bp, Artificial Sequence
  derived and/or modified sequence
ccccaggggcccggatgtgatgccactgacttgcgcattgggggttagagagaagcgagctgctctgtctgaccagcagcttgggattggcggagggaagcgggccaggccctgtgaggagtcaaggttctgagcagacaggccaaccggaggacaggattccctggaggccacagaggagcaccaaggagaagatctgtaagtaagcctttgttagagcctctaagatttggttctcagctgaggtctctcacatgctccctctctccgtaggcctgtgggtccccattgcccagcttttgcctgcactcttgcctgctgccctgaccagagtcatcatgtcttctgagcagaagagtcagcactgcaagcctgaggaaggcgttgaggcccaagaagaggccctgggcctggtgggtgcacaggctcctactactgaggagcaggaggctgctgtctcctcctcctctcctctggtccctggcaccctggaggaagtgcctgctgctgagtcagcaggtcctccccagagtcctcagggagcctctgccttacccactaccatcagcttcacttgctggaggcaacccaatgagggttccagcagccaagaagaggaggggccaagcacctcgcctgacgcagagtccttgttccgagaagcactcagtaacaaggtggatgagttggctcattttctgctccgcaagtatcgagccaaggagctggtcacaaaggcagaaatgctggagagagtcatcaaaaattacaagcgctgctttcctgtgatcttcggcaaagcctccgagtccctgaagatgatctttggcattgacgtgaaggaagtggaccccgccagcaacacctacacccttgtcacctgcctgggcctttcctatgatggcctgctgggtaataatcagatctttcccaagacaggccttctgataatcgtcctgggcacaattgcaatggagggcgacagcgcctctgaggaggaaatctgggaggagctgggtgtgatggggg

SEQ ID NO: 285358 - DNA, 914 bp, Artificial Sequence
  derived and/or modified sequence
ccccaggggcccggatgtgatgccactgacttgcgcattgggggttagagagaagcgagctgctctgtctgaccagcagcttgggattggcggagggaagcgggccaggccctgtgaggagtcaaggttctgagcagacaggccaaccggaggacaggattccctggaggccacagaggagcaccaaggagaagatctgcctgtgggtccccattgcccagcttttgcctgcactcttgcctgctgccctgaccagagtcatcatgtcttctgagcagaagagtcagcactgcaagcctgaggaaggcgttgaggcccaagaagaggccctgggcctggtgggtgcacaggctcctactactgaggagcaggaggctgctgtctcctcctcctctcctctggtccctggcaccctggaggaagtgcctgctgctgagtcagcaggtcctccccagagtcctcagggagcctctgccttacccactaccatcagcttcacttgctggaggcaacccaatgagggttccagcagccaagaagaggaggggccaagcacctcgcctgacgcagagtccttgttccgagaagcactcagtaacaaggtggatgagttggctcattttctgctccgcaagtatcgagccaaggagctggtcacaaaggcagaaatgctggagagagtcatcaaaaattacaagcgctgctttcctgtgatcttcggcaaagcctccgagtccctgaagatgatctttggcattgacgtgaaggaagtggaccccgccagcaacacctacacccttgtcacctgcctgggcctttcctatgatggcctgctgggtaataatcagatctttcccaagacaggccttctgataatcgtcctgggcacaattgcaatggagggcgacagcgcc

SEQ ID NO: 285359 - DNA, 986 bp, Artificial Sequence
  derived and/or modified sequence
cccaggggcccggatgtgatgccactgacttgcgcattgggggttagagagaagcgagctgctctgtctgaccagcagcttgggattggcggagggaagcgggccaggccctgtgaggagtcaaggttctgagcagacaggccaaccggaggacaggattccctggaggccacagaggagcaccaaggagaagatctgcctgtgggtccccattgcccagcttttgcctgcactcttgcctgctgccctgaccagagtcatcatgtcttctgagcagaagagtcagcactgcaagcctgaggaaggcgttgaggcccaagaagaggccctgggcctggtgggtgcacaggctcctactactgaggagcaggaggctgctgtctcctcctcctctcctctggtccctggcaccctggaggaagtgcctgctgctgagtcagcaggtcctccccagagtcctcagggagcctctgccttacccactaccatcagcttcacttgctggaggcaacccaatgagggttccagcagccaagaagaggaggggccaagcacctcgcctgacgcagagtccttgttccgagaagcactcagtaacaaggtggatgagttggctcattttctgctccgcaagtatcgagccaaggagctggtcacaaaggcagaaatgctggagagagtcatcaaaaattacaagcgctgctttcctgtgatcttcggcaaagcctccgagtccctgaagatgatctttggcattgacgtgaaggaagtggaccccgccagcaacacctacacccttgtcacctgcctgggcctttcctatgatggcctgctgggtaataatcagatctttcccaagacaggccttctgataatcgtcctgggcacaattgcaatggagggcgacagcgcctctgaggaggaaatctgggaggagctgggtgtgatgggggtgtatgatgggagggagcacactgtctatgggg

SEQ ID NO: 285360 - DNA, 854 bp, Artificial Sequence
  derived and/or modified sequence
agggaagcaggcgcaggctctgtgaggaggcaaggcaggatccccggttccgcccccgctttcaaccaaggaaagccccagctgcccggatgtgatgccactgacttgcgcactgggggttagagacaagcgagcttctgcgtctgactcgcagcttgagactggcggagggaagcccgcccaggctctataaggagacaaggttctgagcagacaggccaaccggaggacaggattccctggaggccacagaggagcaccaaggagaagatctgcctgtgggtccccattgcccagcttttgcctgcactcttgcctgctgccctgaccagagtcatcatgtcttctgagcagaagagtcagcactgcaagcctgaggaaggcgttgaggcccaagaagaggccctgggcctggtgggtgcacaggctcctactactgaggagcaggaggctgctgtctcctcctcctctcctctggtccctggcaccctggaggaagtgcctgctgctgagtcagcaggtcctccccagagtcctcagggagcctctgccttacccactaccatcagcttcacttgctggaggcaacccaatgagggttccagcagccaagaagaggaggggccaagcacctcgcctgacgcagagtccttgttccgagaagcactcagtaacaaggtggatgagttggctcattttctgctccgcaagtatcgagccaaggagctggtcacaaaggcagaaatgctggagagagtcatcaaaaattacaagcgctgctttcctgtgatcttcggcaaagcctccgagtccctgaagatgatctttggcattgacgtgaaggaagtggaccc

SEQ ID NO: 285361 - DNA, 997 bp, Artificial Sequence
  derived and/or modified sequence
aacccaagaaagccccaggggcccggatgtgatgccactgacttgcgcattcggggttagagagaagcgagctgctctgtgaccagccgcttgggattggtggagggaagcgggccaggccctgtgaggagtcaaggttctgagcagacaggccaaccggaggacaggattccctggaggccacagaggagcaccaaggagaagatctgcctgtgggtccccattgcccagcttttgcctgcactcttgcctgctgccctgaccagagtcatcatgtcttctgagcagaagagtcagcactgcaagcctgaggaaggcgttgaggcccaagaagaggccctgggcctggtgggtgcacaggctcctactactgaggagcaggaggctgctgtctcctcctcctctcctctggtccctggcaccctggaggaagtgcctgctgctgagtcagcaggtcctccccagagtcctcagggagcctctgccttacccactaccatcagcttcacttgctggaggcaacccaatgagggttccagcagccaagaagaggaggggccaagcacctcgcctgacgcagagtccttgttccgagaagcactcagtaacaaggtggatgagttggctcattttctgctccgcaagtatcgagccaaggagctggtcacaaaggcagaaatgctggagagagtcatcaaaaattacaagcgctgctttcctgtgatcttcggcaaagcctccgagtccctgaagatgatctttggcattgacgtgaaggaagtggaccccgccagcaacacctacacccttgtcacctgcctgggcctttcctatgatggcctgctgggtaataatcagatctttcccaagacaggccttctgataatcgtcctgggcacaattgcaatggagggcgacagcgcctctgaggaggaaatctgggaggagctgggtgtgatgggggtgtatgatgggagggagcacactgtctatgggg

SEQ ID NO: 285362 - DNA, 990 bp, Artificial Sequence
  derived and/or modified sequence
aagaaagtcccaggtgcccggatgtgatgccactgacttgcgcattgggggttagagagaagcgagctgctctgaccagccgcttgggattggcggagggaagcgggccaggccctgtgaggagtcaaggttctgagcagacaggccaaccggaggacaggattccctggaggccacagaggagcaccaaggagaagatctgcctgtgggtccccattgcccagcttttgcctgcactcttgcctgctgccctgaccagagtcatcatgtcttctgagcagaagagtcagcactgcaagcctgaggaaggcgttgaggcccaagaagaggccctgggcctggtgggtgcacaggctcctactactgaggagcaggaggctgctgtctcctcctcctctcctctggtccctggcaccctggaggaagtgcctgctgctgagtcagcaggtcctccccagagtcctcagggagcctctgccttacccactaccatcagcttcacttgctggaggcaacccaatgagggttccagcagccaagaagaggaggggccaagcacctcgcctgacgcagagtccttgttccgagaagcactcagtaacaaggtggatgagttggctcattttctgctccgcaagtatcgagccaaggagctggtcacaaaggcagaaatgctggagagagtcatcaaaaattacaagcgctgctttcctgtgatcttcggcaaagcctccgagtccctgaagatgatctttggcattgacgtgaaggaagtggaccccgccagcaacacctacacccttgtcacctgcctgggcctttcctatgatggcctgctgggtaataatcagatctttcccaagacaggccttctgataatcgtcctgggcacaattgcaatggagggcgacagcgcctctgaggaggaaatctgggaggagctgggtgtgatgggggtgtatgatgggagggagcacactgtctatgggg

SEQ ID NO: 285363 - protein, 1220 aa, Artificial Sequence
  derived and/or modified sequence
MGDMANSSIEFHPKPQQQRDVPQAGGFGCTLAELRTLMELRGAEALQKIEEAYGDVSGLCRRLKTSPTEGLADNTNDLEKRRQIYGQNFIPPKQPKTFLQLVWEALQDVTLIILEVAAIVSLGLSFYAPPGEESEACGNVSGGAEDEGEAEAGWIEGAAILLSVICVVLVTAFNDWSKEKQFRGLQSRIEQEQKFTVIRNGQLLQVPVAALVVGDIAQVKYGDLLPADGVLIQANDLKIDESSLTGESDHVRKSADKDPMLLSGTHVMEGSGRMVVTAVGVNSQTGIIFTLLGAGGEEEEKKDKKGKQQDGAMESSQTKAKKQDGAVAMEMQPLKSAEGGEMEEREKKKANAPKKEKSVLQGKLTKLAVQIGKAGLVMSAITVIILVLYFVIETFVVEGRTWLAECTPVYVQYFVKFFIIGVTVLVVAVPEGLPLAVTISLAYSVKKMMKDNNLVRHLDACETMGNATAICSDKTGTLTTNRMTVVQSYLGDTHYKEIPAPSALTPKILDLLVHAISINSAYTTKILPPEKEGALPRQVGNKTECALLGFVLDLKRDFQPVREQIPEDKLYKVYTFNSVRKSMSTVIRMPDGGFRLFSKGASEILLKKCTNILNSNGELRGFRPRDRDDMVRKIIEPMACDGLRTICIAYRDFSAGQEPDWDNENEVVGDLTCIAVVGIEDPVRPEVPEAIRKCQRAGITVRMVTGDNINTARAIAAKCGIIQPGEDFLCLEGKEFNRRIRNEKGEIEQERLDKVWPKLRVLARSSPTDKHTLVKGIIDSTTGEQRQVVAVTGDGTNDGPALKKADVGFAMGIAGTDVAKEASDIILTDDNFTSIVKAVMWGRNVYDSISKFLQFQLTVNVVAVIVAFTGACITQDSPLKAVQMLWVNLIMDTFASLALATEPPTESLLLRKPYGRDKPLISRTMMKNILGHAVYQLAIIFTLLFVGELFFDIDSGRNAPLHSPPSEHYTIIFNTFVMMQLFNEINARKIHGERNVFDGIFSNPIFCTIVLGTFGIQIVIVQFGGKPFSCSPLSTEQWLWCLFVGVGELVWGQVIATIPTSQLKCLKEAGHGPGKDEMTDEELAEGEEEIDHAERELRRGQILWFRGLNRIQTQIRVVKAFRSSLYEGLEKPESKTSIHNFMATPEFLINDYTHNIPLIDDTDVDENEERLRAPPPPSPNQNNNAIDSGIYLTTHVTKSATSSVFSSSPGSPLHSVETSL

SEQ ID NO: 285364 - DNA, 3663 bp, Artificial Sequence
  derived and/or modified sequence
atgggcgacatggccaacagcagcatcgagttccaccccaagccccagcagcagagagacgtgccccaggccggcggcttcggctgcaccctggccgagctgagaaccctgatggagctgagaggcgccgaggccctgcagaagatcgaggaggcctacggcgacgtgagcggcctgtgcagaagactgaagaccagccccaccgagggcctggccgacaacaccaacgacctggagaagagaagacagatctacggccagaacttcatcccccccaagcagcccaagaccttcctgcagctggtgtgggaggccctgcaggacgtgaccctgatcatcctggaggtggccgccatcgtgagcctgggcctgagcttctacgccccccccggcgaggagagcgaggcctgcggcaacgtgagcggcggcgccgaggacgagggcgaggccgaggccggctggatcgagggcgccgccatcctgctgagcgtgatctgcgtggtgctggtgaccgccttcaacgactggagcaaggagaagcagttcagaggcctgcagagcagaatcgagcaggagcagaagttcaccgtgatcagaaacggccagctgctgcaggtgcccgtggccgccctggtggtgggcgacatcgcccaggtgaagtacggcgacctgctgcccgccgacggcgtgctgatccaggccaacgacctgaagatcgacgagagcagcctgaccggcgagagcgaccacgtgagaaagagcgccgacaaggaccccatgctgctgagcggcacccacgtgatggagggcagcggcagaatggtggtgaccgccgtgggcgtgaacagccagaccggcatcatcttcaccctgctgggcgccggcggcgaggaggaggagaagaaggacaagaagggcaagcagcaggacggcgccatggagagcagccagaccaaggccaagaagcaggacggcgccgtggccatggagatgcagcccctgaagagcgccgagggcggcgagatggaggagagagagaagaagaaggccaacgcccccaagaaggagaagagcgtgctgcagggcaagctgaccaagctggccgtgcagatcggcaaggccggcctggtgatgagcgccatcaccgtgatcatcctggtgctgtacttcgtgatcgagaccttcgtggtggagggcagaacctggctggccgagtgcacccccgtgtacgtgcagtacttcgtgaagttcttcatcatcggcgtgaccgtgctggtggtggccgtgcccgagggcctgcccctggccgtgaccatcagcctggcctacagcgtgaagaagatgatgaaggacaacaacctggtgagacacctggacgcctgcgagaccatgggcaacgccaccgccatctgcagcgacaagaccggcaccctgaccaccaacagaatgaccgtggtgcagagctacctgggcgacacccactacaaggagatccccgcccccagcgccctgacccccaagatcctggacctgctggtgcacgccatcagcatcaacagcgcctacaccaccaagatcctgccccccgagaaggagggcgccctgcccagacaggtgggcaacaagaccgagtgcgccctgctgggcttcgtgctggacctgaagagagacttccagcccgtgagagagcagatccccgaggacaagctgtacaaggtgtacaccttcaacagcgtgagaaagagcatgagcaccgtgatcagaatgcccgacggcggcttcagactgttcagcaagggcgccagcgagatcctgctgaagaagtgcaccaacatcctgaacagcaacggcgagctgagaggcttcagacccagagacagagacgacatggtgagaaagatcatcgagcccatggcctgcgacggcctgagaaccatctgcatcgcctacagagacttcagcgccggccaggagcccgactgggacaacgagaacgaggtggtgggcgacctgacctgcatcgccgtggtgggcatcgaggaccccgtgagacccgaggtgcccgaggccatcagaaagtgccagagagccggcatcaccgtgagaatggtgaccggcgacaacatcaacaccgccagagccatcgccgccaagtgcggcatcatccagcccggcgaggacttcctgtgcctggagggcaaggagttcaacagaagaatcagaaacgagaagggcgagatcgagcaggagagactggacaaggtgtggcccaagctgagagtgctggccagaagcagccccaccgacaagcacaccctggtgaagggcatcatcgacagcaccaccggcgagcagagacaggtggtggccgtgaccggcgacggcaccaacgacggccccgccctgaagaaggccgacgtgggcttcgccatgggcatcgccggcaccgacgtggccaaggaggccagcgacatcatcctgaccgacgacaacttcaccagcatcgtgaaggccgtgatgtggggcagaaacgtgtacgacagcatcagcaagttcctgcagttccagctgaccgtgaacgtggtggccgtgatcgtggccttcaccggcgcctgcatcacccaggacagccccctgaaggccgtgcagatgctgtgggtgaacctgatcatggacaccttcgccagcctggccctggccaccgagccccccaccgagagcctgctgctgagaaagccctacggcagagacaagcccctgatcagcagaaccatgatgaagaacatcctgggccacgccgtgtaccagctggccatcatcttcaccctgctgttcgtgggcgagctgttcttcgacatcgacagcggcagaaacgcccccctgcacagcccccccagcgagcactacaccatcatcttcaacaccttcgtgatgatgcagctgttcaacgagatcaacgccagaaagatccacggcgagagaaacgtgttcgacggcatcttcagcaaccccatcttctgcaccatcgtgctgggcaccttcggcatccagatcgtgatcgtgcagttcggcggcaagcccttcagctgcagccccctgagcaccgagcagtggctgtggtgcctgttcgtgggcgtgggcgagctggtgtggggccaggtgatcgccaccatccccaccagccagctgaagtgcctgaaggaggccggccacggccccggcaaggacgagatgaccgacgaggagctggccgagggcgaggaggagatcgaccacgccgagagagagctgagaagaggccagatcctgtggttcagaggcctgaacagaatccagacccagatcagagtggtgaaggccttcagaagcagcctgtacgagggcctggagaagcccgagagcaagaccagcatccacaacttcatggccacccccgagttcctgatcaacgactacacccacaacatccccctgatcgacgacaccgacgtggacgagaacgaggagagactgagagccccccccccccccagccccaaccagaacaacaacgccatcgacagcggcatctacctgaccacccacgtgaccaagagcgccaccagcagcgtgttcagcagcagccccggcagccccctgcacagcgtggagaccagcctgtag

SEQ ID NO: 285365 - DNA, 3663 bp, Artificial Sequence
  derived and/or modified sequence
atgggagacatggccaattccagcatcgaatttcaccccaaaccccagcagcagagagatgtgccccaggctggagggttcggatgcacactcgctgaattgcgcacgttaatggaacttcgcggagcggaagcactgcagaagattgaggaggcatatggtgacgtgagcggcctgtgcagacgactgaaaacaagtcccaccgagggcctcgcggacaacacaaatgatctcgagaagcgcaggcagatctacggccagaacttcattcctccaaagcaaccaaagactttcctgcagcttgtgtgggaagcactgcaggacgtgaccctgatcattttggaggtagcggcaatcgtgtcattgggtctttccttctacgctccgcccggagaagagagcgaggcctgcggcaacgtatccggcggagcagaagacgagggggaggccgaggccggttggatcgagggcgctgcgatcctgctgtcagtgatctgtgtcgtgctcgtcacggcctttaacgattggagcaaggagaagcagtttcgcggtctccaaagtcggattgagcaggagcagaagtttacggtaattagaaatggtcagctcctgcaggtgcctgtggcagctttggttgtgggagacatcgcccaggtgaagtatggtgatctcttacccgctgatggtgtcctgatccaggctaacgacctcaagatcgatgagtcttccctgaccggcgaatctgaccacgtcaggaagtccgcggacaaggatcctatgcttctttctgggactcacgtcatggagggttcgggaagaatggtggtgactgctgtcggagtgaacagtcagacgggcatcatattcacccttctaggagctggcggggaggaggaggaaaaaaaggataagaagggaaagcaacaggacggagcaatggagagcagtcagaccaaagctaaaaaacaggatggggctgtggctatggagatgcagccactgaagtccgcggagggtggggaaatggaggaaagggagaagaagaaggccaatgcacccaagaaggaaaagagtgttctccagggcaaactgacgaagctggctgtgcagattgggaaagctggactggttatgtcagctattactgttatcatcctggtgctctactttgtgatagagacctttgtggtggaaggtcgtacatggctggcggagtgtacaccagtgtacgttcagtactttgtgaagttcttcatcatcggggtgactgtcttggtagttgcagtgcctgaaggcctgccattggccgttacaatttcactggcttactctgtgaaaaaaatgatgaaagacaataacctggtccgacaccttgacgcatgcgaaacaatgggaaacgctaccgctatctgcagcgacaagacggggaccctaacaaccaaccgtatgacagtggtccaatcttacctaggcgatacgcactacaaagaaatccctgccccctcagccttgacacccaaaatccttgatttgttggttcacgctatcagtattaattcagcctacacaacaaagatactgcccccggagaaggagggcgcactccccaggcaggtgggtaacaagaccgagtgcgcactcctggggttcgtgctggacttaaaacgcgactttcagccagtccgagagcagatccctgaagataaactctataaggtctacacatttaattccgtgcggaagtccatgtccactgtgatacgaatgcctgatggcggcttccggttattctccaagggagcctcagaaatccttttgaaaaagtgcactaacatcttgaatagcaacggcgagctgaggggctttaggcccagggaccgggacgatatggtgcggaagattattgagccgatggcttgcgacgggctccgcaccatatgtatagcctatagggacttcagcgccggacaggaaccggactgggacaacgagaacgaagtcgtcggggatctgacatgtatcgcagtcgtggggatcgaggaccctgtgcgtcccgaagttcccgaagcaattcggaaatgtcagagagccggaatcactgtccgtatggtgaccggagacaacattaacactgcacgtgctatcgctgccaagtgtggtatcatccagcctggtgaggatttcctgtgcctcgaggggaaggagttcaacaggcgcatccgcaatgagaagggtgagattgagcaggagaggctggataaggtctggcccaagcttcgagtcctggctcgcagttcccctacagacaaacatacccttgtgaaagggattatcgattccacaacaggcgagcagcgtcaggtagttgccgtgacaggtgatggcaccaatgatggacctgcgctgaaaaaggccgatgtgggattcgcgatgggcattgcaggcaccgacgtggctaaagaagcttccgacatcattctgacagacgacaattttacatcgatcgtcaaggctgtaatgtggggccggaatgtgtacgattctattagtaaatttttgcagttccagctaactgtaaacgtcgtggccgtcattgttgcatttaccggggcatgtattacccaggactccccactcaaagccgtccagatgctgtgggtgaatctgattatggatactttcgccagcctggcactcgctacggaacccccaaccgagtccttgctgcttaggaagccatatggtcgggacaaacctctgattagtcggacgatgatgaagaacattttagggcatgccgtgtatcagctggcaatcatattcacgcttctgtttgtgggggaactattcttcgatattgatagtggccgaaatgccccgctccatagtcctccatctgagcattacactatcatctttaatacatttgtaatgatgcagcttttcaatgagatcaatgcaagaaaaatccatggcgaacgcaatgtctttgacggcattttttctaatccgatcttttgtactatcgtactcggtaccttcggaattcagattgtcatcgtgcaattcggcggaaaacccttttcctgctccccgctgagtacagaacaatggctgtggtgtcttttcgtcggtgtaggcgagctggtttggggccaggtgattgccactattcccacgtctcagctcaagtgcctgaaggaggcggggcacggccctggcaaggacgaaatgacagacgaggaactggcagagggagaagaagaaatcgatcatgccgagcgggaactgcgccgcggccaaattctgtggtttcgcggtttgaacaggatccaaacccagatcagggtggtcaaggccttccggagtagcctttacgaaggcttagaaaagcccgagagcaagacctccatccacaatttcatggcaacacccgagttcctgattaacgactacacccataacattccgctgatcgacgacacagacgtggacgagaatgaggaacgcctgagggccccaccacccccctccccaaaccagaataacaacgccattgactctggtatatatctgacgactcacgtaactaaaagcgccacctcctccgtgttctcctcctcaccaggatcaccactgcatagcgttgaaacatcactctag

SEQ ID NO: 285366 - DNA, 3663 bp, Artificial Sequence
  derived and/or modified sequence
atgggagacatggccaacagcagcattgagttccaccccaagccccagcagcagagagatgtgccccaggccggcggcttcggctgcaccctggccgagctgcggaccctgatggagctgcggggagctgaggccctgcagaagattgaggaggcctatggagatgtgtctggcctgtgccggcggctgaagaccagccccacagagggcctggccgacaacaccaatgacctggagaagaggcggcagatctacggccagaacttcatcccccccaagcagcccaagaccttcctgcagctggtgtgggaggccctgcaggatgtgaccctcatcatcctggaggtggccgccatcgtgtccctgggcctgtccttctacgcccctcctggagaggagagcgaggcctgtggaaatgtgtctggaggagcagaagatgaaggagaggccgaggccggctggattgaaggagctgccatcctgctgagcgtcatctgtgtggtgctggtgacagccttcaatgactggagcaaggagaagcagttccggggcctgcagagcagaattgagcaggagcagaagttcaccgtcatcagaaatggccagctgctgcaggtgcctgtggccgccctggtggtgggggacatcgcccaggtgaagtatggagacctgctgcctgcagatggagtgctgatccaggccaatgacctgaagattgatgagagcagcctgactggagagagtgaccacgtgaggaagtctgctgacaaggaccccatgctgctgagcggcacccacgtgatggagggcagcggccgcatggtggtgacagctgtgggcgtgaacagccagacaggcatcatcttcaccctgctgggcgctggaggagaggaggaggagaagaaggacaagaagggcaagcagcaggatggagccatggagagcagccagaccaaggccaagaagcaggatggagctgtggccatggagatgcagcccctgaagtctgctgagggcggggagatggaggagcgggagaagaagaaggccaatgcccccaagaaggagaagtctgtgctgcagggcaagctgaccaagctggccgtgcagatcggcaaggccggcctggtgatgtctgccatcaccgtcatcatcctggtgctgtacttcgtcatcgagacctttgtggtggagggccgcacctggctggctgaatgtacccctgtgtatgtgcagtactttgtgaagttcttcatcatcggcgtgacagtgctggtggtggccgtgcctgagggcctgcccctggccgtgaccatcagcctggcctacagcgtgaagaagatgatgaaggacaacaacctggtgcgccacctggatgcctgtgagaccatgggaaatgccacagccatctgcagcgacaagacaggcaccctgaccaccaacaggatgacagtggtgcagagctacctgggggacacccactacaaggagatcccagcccccagcgccctgacccccaagatcctggacctgctggtgcacgccatcagcatcaacagcgcctacaccaccaagatcctgcccccagagaaggagggcgccctgccccggcaggtgggcaacaagacagaatgtgccctgctgggctttgtgctggacctgaagagggacttccagcctgtgcgggagcagatccctgaggacaagctgtacaaggtgtacaccttcaacagcgtgaggaagtccatgagcaccgtcatccgcatgccagatggcggcttccgcctcttcagcaaaggagccagcgagatcctgctgaagaagtgcaccaacatcctgaacagcaatggagagctgcggggcttccggccccgggacagagatgacatggtgaggaagatcatcgagcccatggcctgtgatggcctgcggaccatctgcatcgcctacagagacttctctgctggccaggagccagactgggacaatgaaaatgaggtggtgggggacctgacctgcatcgctgtggtgggcatcgaggaccctgtgcggcctgaggtgcctgaggccatcaggaagtgccagagagctggcatcaccgtgaggatggtgactggagacaacatcaacacagcccgggccatcgccgccaagtgtggcatcatccagcccggggaggacttcctgtgcctggagggcaaggagttcaacagacgcatcagaaatgagaagggggagattgagcaggagcggctggacaaggtgtggcccaagctgcgggtgctggcccggagcagccccacagacaagcacaccctggtgaagggcatcatcgacagcaccaccggggagcagaggcaggtggtggccgtgactggagatggcaccaatgatggccctgccctgaagaaggcagatgtgggctttgccatgggcattgctggaacagatgtggccaaggaggccagtgacatcatcctgacagatgacaacttcaccagcatcgtgaaggctgtgatgtggggcagaaatgtgtatgacagcatcagcaagttcctgcagttccagctgactgtgaatgtggtggccgtgattgtggccttcaccggggcctgcatcacccaggacagccccctgaaggctgtgcagatgctgtgggtgaacctgatcatggacacctttgccagcctggccctggccacagagcccccaacagagagcctgctgctgaggaagccctacggccgggacaagcccctcatcagcaggaccatgatgaagaacatcctgggccatgctgtgtaccagctggccatcatcttcaccctgctgtttgtgggggagctgttctttgatattgattctggaagaaatgcccccctgcacagcccccccagcgagcactacaccatcatcttcaacacctttgtgatgatgcagctgttcaatgagatcaatgccaggaagatccatggagagagaaatgtgtttgatggcatcttcagcaaccccatcttctgcaccatcgtgctgggcaccttcggcatccagatcgtcatcgtgcagtttggaggcaagcccttcagctgcagccccctgagcacagagcagtggctgtggtgcctgtttgtgggcgtgggggagctggtgtggggccaggtgattgccaccatccccaccagccagctgaagtgcctgaaggaggccggccacggccctgggaaggatgagatgacagatgaggagctggccgagggggaggaggagattgaccatgctgagcgggagctgcggcggggccagatcctgtggttccggggcctgaaccgcatccagacccagatccgggtggtgaaggccttccgcagcagcctgtatgagggcctggagaagccagagagcaagaccagcatccacaacttcatggccaccccagagttcctgatcaatgactacacccacaacatccccctgattgatgacacagatgtggatgaaaatgaggagcggctgcgggcccctcctccacccagccccaaccagaacaacaatgccatcgacagcggcatctacctgaccacccacgtgaccaagagcgccaccagctctgtgttcagcagcagccctggcagccccctgcacagcgtggagaccagcctgtag

SEQ ID NO: 285367 - DNA, 3663 bp, Artificial Sequence
  derived and/or modified sequence
atgggcgacatggccaacagcagcatcgagttccaccccaagccccagcagcagcgagacgtgccgcaagccggtggcttcggatgcaccctagccgaattgcgcactttgatggagctgagaggagcagaagccctccagaagattgaggaagcctatggagacgtgagcggcctgtgcaggaggctcaagacgagccctacagagggccttgccgacaacactaatgacttggaaaaacgaaggcagatctatggacagaattttattccacccaagcaacccaagacgtttttgcagctcgtgtgggaagcccttcaggacgtgactcttataattcttgaggtggcagctatcgtatccctgggcctgtcattttatgcccctccaggcgaggaatcggaagcttgtggaaatgtatcaggcggcgcagaggatgagggcgaggccgaggccgggtggatcgaaggcgctgccatactgctgtcagttatttgtgttgtactcgtgaccgccttcaacgactggagcaaagaaaaacagtttaggggcctgcagtcaagaatcgagcaggaacaaaaattcaccgttatcaggaacggccagctgctgcaggtccccgtagcagctctggtggtgggggacatcgcgcaagtgaagtacggcgatctgctcccagccgatggggtactaattcaagcgaacgatttgaaaattgacgagtccagtctcacaggagaatccgaccacgttcgcaagtccgctgacaaagatcccatgctactctcagggacacatgtgatggaggggagcggccgaatggtggtcacagctgtcggagttaattctcagaccgggattatctttaccctgctgggcgctggaggcgaagaggaagagaagaaagacaaaaaaggcaagcagcaagacggcgccatggaatcatcccagactaaagcgaaaaaacaggacggtgccgtggcaatggagatgcaacctctgaagtctgctgagggaggcgaaatggaagaacgcgaaaaaaagaaagcgaacgctcctaaaaaagaaaagagcgtactgcagggcaaacttactaagctcgccgtacagatcggaaaagcgggcctggtgatgtcggccatcaccgtgattattctcgtgttgtacttcgttatagaaaccttcgtcgtcgaagggcgaacctggcttgctgaatgcacgcctgtgtatgtgcagtatttcgtgaaattcttcatcatcggcgtgacagtgcttgtcgttgcggtgccggaagggctgccactggccgtgacaatatctttagcgtattcagttaaaaaaatgatgaaggataacaacttggtgcgccacttagacgcatgcgaaaccatggggaatgcaacggccatttgttctgataaaaccggcacgctgaccaccaatcggatgactgttgtgcagagctaccttggcgacacacactataaagagatacccgcccccagcgccttaactcccaagatcttggacctgctggttcacgcaatttctatcaattctgcatatactacaaagattctgcccccagagaaggagggggccctgccgcggcaagtcggaaataaaactgaatgcgcattgctgggattcgtgttggatttgaaacgagattttcagcccgtacgcgagcagatccccgaggataagctgtataaagtgtacacattcaatagcgtccgcaagagcatgtcaaccgtgatccgtatgccagacggagggttcaggctcttttccaaaggagcctccgagatcctgctgaagaagtgcactaatatactcaacagtaacggagagttgcgggggttccggcctcgcgacagagatgatatggtccgcaagatcattgagcctatggcctgcgatggcttgcgcaccatctgcatcgcttatagagactttagtgcggggcaggaacccgactgggacaacgaaaatgaggtagtgggagacctcacttgtattgccgtggtcgggattgaagatcctgtgcgtccagaggttcctgaggccattaggaagtgtcaaagagctggcatcaccgtgcgcatggtgactggtgacaacatcaatacggcaagggccattgctgccaaatgtggtataatccaacctggggaggattttctgtgtctcgaagggaaggagttcaataggagaatacgcaatgagaagggagagatcgagcaagaaaggctggataaggtctggcccaaactcagggtacttgccaggtcttctcctaccgataaacacacattggtaaaaggaattatcgactctacaaccggcgaacaacggcaagtggtcgcagtgacaggagatggaacaaacgacgggcccgccctgaaaaaagctgatgtgggatttgctatggggattgccggtactgacgtagccaaagaggcttcggacataattctcacagacgataattttacgagtattgtgaaggcagttatgtggggcaggaacgtctatgatagtatcagtaaatttctgcagtttcagcttaccgtaaatgtggtggcagttatagtggccttcacaggggcctgtatcacccaggatagcccccttaaagccgtgcagatgctctgggtgaacctgattatggacacattcgcctcactggcactcgctacagaacctccgaccgaaagcctcctgttgcgaaaaccgtatggacgagataaacctcttatcagccgcaccatgatgaaaaacattctgggccatgccgtgtaccagctggctatcatcttcacgttgttatttgtgggagagctgttctttgacattgacagtggacgaaacgcgcctctccacagccccccatctgagcactacacgatcatcttcaatacttttgttatgatgcagctcttcaacgagatcaatgctcgtaagatccatggagagaggaatgtgttcgacggcattttctccaatccgatattctgtacaatcgtacttggtacctttggaattcagattgttattgtgcagttcggtggtaagcccttcagttgttcaccactttctaccgaacaatggctctggtgcttgttcgtgggtgtgggcgagctggtgtggggacaagtgattgctactatccctaccagccagctaaagtgcctgaaggaagccggtcacgggcccggcaaggacgagatgacagatgaagagcttgccgaaggcgaagaggaaatcgatcacgctgagcgggaacttagacgtggccagattctgtggttccggggtctaaacaggatccaaactcaaattcgtgttgtaaaggcattccggtctagcctctacgaggggctggaaaagcctgaatcaaaaacatccatccataactttatggccaccccagagttcttaattaatgattatacccacaatatccccctgattgacgacaccgacgtcgacgagaacgaggagcggctgagggctccacccccacccagtcccaaccaaaataacaatgcaatagattcggggatctatttgactactcacgttactaagagcgctacatcctccgtgttttcatcttcaccaggatcgcctctccattccgtcgagactagtttgtag

SEQ ID NO: 285368 - DNA, 3663 bp, Artificial Sequence
  derived and/or modified sequence
atgggcgacatggcaaactcgtctattgagttccatcccaaacctcagcaacagcgggatgtgccccaggccggtggtttcggttgcactttagccgagctccgcacactgatggaactgcgaggcgctgaagctctgcagaagatagaggaggcatacggagatgtgtccggattgtgccggaggttaaaaacctccccgaccgagggtctcgctgataataccaacgacctggagaaaaggagacagatctacggccaaaacttcataccgccaaagcagcctaaaacattcctgcagctggtttgggaggcactgcaggatgtgaccctcattatcctggaagttgcagcgatcgtctctctgggcctgagcttctacgcaccgcctggagaagagagtgaagcatgtggtaatgtgtcaggcggtgccgaggacgagggtgaagccgaggcaggctggattgaaggcgctgctattctcctgagcgtgatatgtgtggttctagtcacagccttcaatgattggagtaaggagaaacagtttcgcggtttgcagtcccggatcgagcaggaacaaaagttcacagttatcagaaatggccagctgcttcaggttccagtggccgctctcgtcgtcggggacatcgcgcaggtgaagtacggagatctcctccccgctgacggcgttctcattcaagccaacgatcttaagatcgacgaaagctctttgacaggcgaatcagaccatgtcaggaagtctgccgataaagacccgatgctgctgtctgggactcatgttatggaagggtcgggaagaatggttgtgaccgccgtcggagtgaattctcaaactggcattatttttaccctcctgggggctggaggcgaggaagaagagaaaaaggacaaaaaaggcaaacagcaggatggcgcaatggaatcttcgcagaccaaggcaaagaaacaagacggtgctgtggccatggagatgcagcccttgaagtcagcagaagggggtgaaatggaggagagggagaagaaaaaagcaaacgcccctaaaaaggagaagtctgttctgcagggcaagctgacgaaattggcagtgcagatcggcaaagctgggctggtaatgtctgcaatcaccgttattattttggtgctgtactttgtcatcgaaaccttcgtggtggaggggagaacttggttggccgagtgcactcctgtttatgttcagtactttgtcaaattcttcataatcggggtgaccgttttggtggtggcggtgccagaggggcttccactggccgtgacaataagcctcgcgtacagcgtgaagaagatgatgaaggacaataatttagttcgccacctcgatgcttgtgagactatgggtaatgctacagccatttgcagcgacaaaactgggactctgactaccaaccgaatgacggtagtccagagttatctcggggatacccattataaggagatccctgcccctagcgccttaactcctaagatacttgatctcctggttcatgctatcagcataaattcagcatacacgactaagatcctgccacccgagaaagaaggcgcactaccacggcaggtcggaaataagacggagtgcgcgctactcggcttcgtgttggacttaaaacgggattttcagcccgtgcgggagcagatcccggaagataaactgtacaaagtgtacactttcaactccgtgcggaagtctatgtctactgtgatcagaatgcccgatggcggatttagactgttcagtaaaggagcgagcgaaattttgctcaagaaatgcacgaatatcctcaactcgaacggagaactgagagggtttcggccacgggatcgcgacgacatggtgagaaaaattatcgagccaatggcatgcgacggtctccgtaccatctgcattgcctacagagacttttccgcaggtcaggaaccggactgggataacgagaatgaggttgtgggagatctgacatgtatcgctgtcgttggaatagaagacccggttaggcccgaagttccagaggctatccggaaatgccagagggcaggcattacagttaggatggtcactggggacaacattaacacagcacgagctatagccgctaaatgtggtattattcagcctggcgaggacttcctctgtctggagggtaaagagtttaatagacggatccgtaatgagaaaggggagatcgaacaagagcggctcgataaggtctggccgaagctgcgtgtgcttgcacgatcgagtccaaccgataagcatactctggttaagggaatcatcgactcaacaactggggagcagagacaggttgtggctgtgactggcgatggtactaacgatgggccagccttaaaaaaggccgatgtgggatttgcaatgggcatcgctggcacagatgttgccaaagaggcttctgatatcattcttacggacgacaatttcacctccattgtgaaagctgtgatgtggggcagaaacgtctacgattccatttccaagttcctgcagttccagttgacagtgaatgtggtggctgtgatcgtcgcctttactggtgcctgcattacccaggattcccctctgaaagctgttcaaatgctttgggtgaatctgattatggatacattcgcatcactggccttggcgacggagcctcctacagaatccctactgctcagaaaaccttatgggcgtgacaagccgttgatcagcagaaccatgatgaagaacattctgggccacgcggtgtatcagctagccatcatcttcacgctactgtttgtcggtgaattgttctttgacatcgacagcggtcgcaacgctccactacattcgcccccttcagagcactacactataatcttcaacacctttgtcatgatgcaattgtttaacgaaatcaatgcccgaaaaatccacggcgagcgaaatgttttcgacggcatctttagcaatcccattttttgcactattgtgctcggtacgtttggaatccaaatagtcattgtgcaatttggtgggaaacctttttcttgttcaccgctgagcaccgaacagtggctctggtgcctctttgtgggggtcggagagctggtttgggggcaggtcattgctactattccgacatctcaactcaaatgcctgaaagaagccggtcacggccctggcaaagatgaaatgaccgacgaagaactagccgaaggggaggaggagatcgatcacgctgagagagaactgcgcaggggacagatactctggtttagaggtcttaaccgcatccaaacccagattcgagtcgtcaaagccttcagatcatccctgtatgaaggacttgaaaaacctgagtcaaagacctcaatacacaacttcatggctacgcctgaattcttaattaacgactacactcacaatatcccactgattgatgacactgacgttgacgaaaacgaagaaaggctgagggcaccccctcccccttctcccaaccagaacaacaacgcgattgactcaggcatttatctcactacccatgtcacgaaaagcgccacttcatccgtgttcagcagcagtcctgggagtcccttgcacagtgttgaaaccagcctctag

SEQ ID NO: 285369 - DNA, 6420 bp, Artificial Sequence
  derived and/or modified sequence
gtgtccacgcttagcagctttctcaccgccgccaaaccttgcctgggcactgggaccgtgggtggccgcctgtccctagctgtggctgagccaagattgcacttgtgagaaggcctgacaggcagcatgggcgacatggccaatagttccatcgagttccaccccaagccccagcagcagcgggatgtcccccaggctggaggctttgggtgcacgctggcggagctgcgcaccctcatggagctgcgaggggccgaggcgctgcagaagatcgaggaggcctacggggatgtcagcgggctctgccggaggctgaagacctcacccacagagggcctggcggacaacaccaatgacctggagaagcgcaggcagatctacgggcagaacttcatccccccaaagcaacccaagaccttcctgcagctggtgtgggaggccctgcaggacgtgaccctcatcatcctggaggtggctgccatcgtctctctgggcctctcgttctatgcgccgccaggagaggagagtgaagcctgtgggaatgtgtcgggaggcgcagaagatgagggcgaggccgaagctggctggatcgagggggctgccatcctgctgtccgtcatctgtgtggtgctggtcacggccttcaatgactggagcaaggagaagcagttccgaggcctgcagagccgaattgagcaggagcagaagttcacggtcatccggaacgggcagctcctccaggtccccgtggctgcgctggtggtgggggacattgcccaggtcaagtacggcgacctgctgccagccgacggcgtgctcatccaggccaatgacctcaagatcgacgagagctccctgacgggcgagtctgaccacgtgcgcaagtcagctgacaaagatcccatgctgctctcaggcactcatgtcatggaaggttctggaagaatggtggtgaccgccgttggcgtgaattcccagacaggcatcatcttcacgctgcttggagctggcggagaggaggaagagaagaaagataagaaaggcaagcagcaggatggggccatggagagtagccagaccaaagctaagaagcaggatggtgcagtggccatggagatgcagcccctgaagagcgcggagggtggggagatggaggagcgggagaagaagaaagccaacgcacccaaaaaggagaagtctgtccttcaggggaagctcacaaagctagccgtgcagatcgggaaagcagggctggtgatgtctgccatcaccgtcatcatcctggtcctctactttgtgattgagacgtttgtcgtggaaggccggacatggctggcagagtgcacgccggtctatgtacaatacttcgtgaagttcttcatcattggtgtcactgtgctggtcgtggctgtcccagagggcctgcctcttgctgtcaccatctccttagcttactctgtcaagaaaatgatgaaagacaacaacctggtgcgccacctggatgcctgcgagaccatgggcaacgccacagccatctgctccgacaagacgggcacgctcaccaccaaccgtatgaccgtggtccagtcctacctaggagacacccactacaaagagattccggcccccagcgccctgacccctaagatcctcgacctcctggtccatgccatctccatcaacagtgcctataccaccaaaatactacctcctgagaaggaaggcgccctcccacgccaggtgggcaataagacggagtgcgccctgctgggcttcgtcttggacctgaagcgggacttccagcccgtgcgcgagcagatcccggaagacaagctttacaaagtgtacaccttcaactcggtccgcaagtccatgagcacagtcatccgcatgcccgacggtggcttccgcctcttcagcaagggggcctcagagatcctcttgaaaaagtgcaccaacatcttgaacagcaatggcgaactccggggctttcggcctcgggaccgggacgacatggtgaggaagatcatcgagccgatggcttgcgatggcctccgcaccatctgcatcgcctaccgggacttctctgcaggccaggagcccgactgggacaacgagaatgaggtcgtgggtgacctcacctgcatagctgtcgtgggcattgaggaccctgtgcggcccgaggtccctgaagctatccgaaaatgccagcgtgctggcatcacagtccgcatggtgactggggacaacatcaacacggcccgggccatcgcagccaaatgcggcatcatccagcccggggaggacttcctgtgcctagaagggaaggagttcaaccggcggatccgcaatgagaaaggcgagatagaacaggagcggctggacaaggtgtggcccaagctgagggtgctggcccggtcgtctcccaccgacaagcacacactggtcaaagggattatcgacagcaccactggtgagcagcggcaggtggtggctgtgacaggggatggcaccaacgatgggccggccctcaagaaggcggacgtgggcttcgccatgggcatcgcagggaccgacgtggccaaggaggcctccgacatcatcctgaccgatgacaacttcaccagcatcgtcaaggcagtcatgtggggccgtaacgtctatgacagcatctccaagttcctgcagtttcaactgacggtcaatgtggtggctgtgatcgtggccttcacaggtgcctgcattactcaggactctcctctcaaagccgtgcagatgttgtgggtgaacttgatcatggacacatttgcctctctggccctggcgacggagccacccacagagtcgctgctgctgcggaagccgtacggccgcgacaagcccctcatctcccgcaccatgatgaagaacattctgggccacgccgtgtaccagctcgccatcatcttcaccctgctgtttgtcggggagctcttcttcgacatcgacagcgggaggaatgcgcccctgcactcgccaccctcagagcactacaccatcatcttcaacacgttcgtcatgatgcagctctttaacgagatcaacgcccgcaagatccacggcgagaggaacgtgttcgacggcatcttcagcaaccccatcttctgcaccatcgttttgggcactttcgggattcagattgtcatcgtccagtttggcgggaagcccttcagctgctccccactatccacagaacagtggctctggtgcctgtttgttggtgttggggagctggtctggggacaggtcattgccaccatccccaccagccagctcaagtgcctgaaggaagccgggcacgggcccgggaaggacgagatgaccgacgaggagctggccgaaggcgaggaagagatcgaccatgccgagcgggagctccgcaggggccagatcctctggttccggggcctgaaccggattcagacgcagatccgggtggtgaaagcgttccgtagctcgctctatgaaggcctggagaaaccagaatccaagacctccattcacaacttcatggccacgcccgagtttctgatcaatgactacacccacaacatcccgctcattgacgacacggacgtggacgagaacgaggagcgcctccgggcccccccgcccccgtcccccaaccagaacaacaacgccatagacagcggcatctacctgaccacgcatgtcaccaagtcagctacctcttcagtgttttcctccagtcccgggagcccgctccacagcgtggagacgtccctctaacaagaacttgtctcagcacatgcgcacacgcacactcggactcacacgaagtcacacgcacacatgcacgcacacacacatatggggacctgcacacctgcaaaacgagggaacaactaaggtggctgaagacctttctggcagggcatttgcaaggacccaaatccattcaacaagggtgcagcctgccacaggctcctcatccggactgaggaagacgaggacagggaggaggaaaaggaggaagaggaggacaaaaagggggaggagaaggttcttcgtccaaaggaggaaggagaagaagtagaaagtgcgaagagctgagttccccacctttttttctattgatgcttcttttttaacaaactacagttttaccgtgtgtttgccatttgagctgtgtggtgggcagggggctggtttgggtttatggggagcttttgttgcacccatgcaggggcaatcagatcagcatcttcatgcaaaaaaaaaaaaaaagttgagtgctctgcaggcctgtgaagggtgccacctgagggagccgcctgcaagcggccctgcagccacaaagcaacccgccctctgcaaaaactaggcacatccgcagtgcgcatgtgtgtgcgtgcatgcacatatgtgtatgtgtgtggatctgtacacacacacgtatatatggccagatgcgtatttcaataaggaactatttactggcatgatatttgcattcctcttatcaggcattttcatttggaaatttcattattgaatgtagcaaggttgtagttgtttttttttttttttcagggaactagactgcaagaatatctttctggtcaacccatttttgtccctcatcaccccgcccccacctttcgctcctgccctctgcccggccctactgagattcccaaggagaaggccgagagggggcgctccaggtctggagcaggtataattggagcatttgcactgagacccctgccagagaggagaaaaccctttcaagggaaattttaatctaaaaggaaaaaaccaaaatattgatgagaaggagtcctccagttagtgaaaggggagtttcgttttcagctttctttggttcctactccaattccacatccttcatcctggccatgcccccaccttcaagagcatgaagcactcttggagttgtgggtcctgcccagagtccagagagcagcctcagctgagcacaggtccgagggggcgggggcagggccaagagttcaaaagaagccaatggagggagagggagcgtcagaagcccggaggagctggtggtgggagaatgacggcagggacgcagccacagttcagaccctgtcccctcagcacctggatggactcccactgtttgctttggcaaatgccgaggagtcctcggtagaccaccttgatgtctgctgtgacatcagaggtgccaccaccaaagcactcttcccaccctagtctttgtgtccagcggccaagcttaagccatgaagtcatggatttgtggctcagcaccaggtcctgaggggagcgtatcctggcagtgtgggcacctggtggccaagcctcagtttcccccaaatgagcaaaggggataaagaggggcccgacttttgccaccctcctgaggaagcccctaggtccacacagtgatgccatgggggacccttgccttccacacttgcaggtgtcacgttttgcagggaggtgtttgggccttgggctcagccactgggagacagttgggacctgagggacagaggatcggaatggaaaccaccaacgtgcactggcaccctcagaaggcttgtctcacctccaccggcatccacacaaaaccaaacaggagcaggcgtcatccccactattcccatgaatgccatgtcacccctgagcagaagcagtcaaatcttgggcaaaagaatttcggttagaaaagaaaatcccactttaaaatgccagctgcagataactcaaagccatcccttttttctaaagggcacattgagaatgtcacccatttgtaaactgttccctgatgtccttgtttaaacgataataagaaaaagggcaactccatttgttgagggtctttgtgttcttcaatgagaaatcaaatttgagacgttgaaattggagctgcgtgctgctgcactcaccggcttcttctcactctctgtcgtagacacaccgataggaccaatggccaatagatattaaaagcaaaccctcactgctgctgtataaagttgcctaatgtaaatgtctattgtttagtccctaggtcacctttgtgctgtgctgtggagttcagaaacggggtaccatgacctggaatcttttgctcttgtttttgcagtcttcaaggctgggggccctgtctcattgggaagcccctctttataaagcattatattacttggaatggcttggtcaactgtgttcagttcataaatatgttttacatttttatctgcctgttataaagatgaacaaaaaaacttaatgagaaagatcacagatacgtaataatttaaagtctgtagttgaatttcctaacttaaagaatagaccaaaatttctgtgtataaaaaaaaatgaaaggctccttacatcctg

SEQ ID NO: 285370 - DNA, 3663 bp, Artificial Sequence
  derived and/or modified sequence
atgggtgacatggctaattcgtcaatcgagttccacccaaaaccacaacagcagagagatgtaccccaagcaggggggtttggctgcacactggccgaactacggacactaatggaactccgcggagccgaagctctgcaaaagatagaggaggcatatggtgacgttagcggcctctgtcgtcggctgaagacatcccctacggaggggctggcagataataccaacgacttagaaaagcggcgccagatttacgggcagaacttcatcccgccaaaacagccgaaaacattcctgcaattggtgtgggaagctttgcaagacgtgaccctgattattcttgaggtggccgctatagtctcattaggcctcagtttttacgctcctccaggagaggaatcagaggcctgcgggaacgtgtcaggaggagccgaagatgagggggaagctgaggccggttggattgagggagcagctatactgttgtctgttatctgcgtggtactcgtcacagctttcaacgattggagcaaggaaaaacagttcagaggattacagagcaggatcgagcaggagcagaagtttacggttatccgcaacgggcagctactgcaggtcccagtcgccgcactggtcgtgggtgatatagcacaagttaagtacggagacctgcttcccgcagatggggtgctgatacaggccaatgatttgaagatcgacgagtcctcactgacaggcgaatccgaccacgtccgtaaatctgctgacaaagatcctatgctgctgagcgggacccacgtaatggagggcagtggccggatggttgtaaccgccgtgggcgttaattcacagaccggcatcatcttcacgcttctgggagccggtggagaggaggaggaaaagaaagataaaaagggaaagcagcaggacggcgccatggagagttctcagactaaagctaaaaagcaggacggcgccgtggccatggagatgcaacctcttaagagcgcggaagggggggaaatggaggaaagagaaaagaagaaggccaatgctccaaagaaagaaaagtcggtgttgcagggaaaactgactaaactcgcagtgcagattgggaaggcaggactggtaatgagcgcaatcaccgtgattatcctggttctctattttgtgatcgagacctttgtagtcgagggccgcacgtggctcgcagagtgtacccctgtctacgtgcaatattttgtcaagttcttcattattggagtaacagtgctagtggtggcagtccctgagggacttccactcgctgtgacgatttccttggcatactcagtgaagaagatgatgaaagataacaatctcgtcagacacctggacgcctgcgaaaccatgggaaatgcaactgccatctgctcggataagaccggaaccctcacgacaaaccggatgacagtggtgcagagctatctcggagacacccattataaagagattcctgcgccgagtgctctgactccaaaaatcctagacttgcttgttcatgccatatctattaactccgcatacacaacaaagattctaccaccagaaaaggaaggagccttgcctcgccaggtaggtaacaagaccgagtgtgctttgctcgggttcgtgctggacctgaagagagatttccagccagttcgcgagcaaattcctgaggacaagctctacaaagtgtacactttcaattctgtgagaaagtccatgtccacagtgatccggatgcccgacggaggcttcaggctcttttccaaaggggctagtgaaatcctgctgaagaagtgcaccaacattctgaattctaatggcgaactcaggggctttaggccccgggacagagacgacatggtgagaaagatcatcgaaccaatggcctgtgacgggctgcgaaccatttgcatcgcatatcgcgatttcagcgccggacaggagcccgattgggacaatgaaaacgaagtcgtgggcgatttgacatgcattgccgtggtggggattgaagaccccgttaggcccgaggttcccgaagctatcaggaaatgtcagcgcgctggcattactgtcagaatggtgacaggcgacaatattaacacagctcgggctatagcagcgaagtgcggcattatccagccaggggaagacttcctctgcctcgaaggcaaggaatttaatcgacggatacgcaacgagaagggggaaatcgagcaggagcgcttggacaaggtatggccaaaattgcgcgtgctcgcgagatccagtcccacagacaagcatactctagttaagggtatcattgacagcacaaccggcgagcaacggcaagttgttgccgtgacaggtgatgggacaaatgatggacccgctctgaaaaaagcagatgtcggtttcgcaatgggcatcgcggggaccgacgtggccaaagaagccagtgatatcattcttaccgacgacaacttcacatctatcgtgaaggcagtcatgtgggggaggaacgtgtatgattctatatctaagtttttacagtttcagctcacggtgaacgtcgtggctgttattgtcgcttttacaggtgcttgtatcacacaggattcaccattgaaggctgtgcagatgctgtgggtcaacttaataatggatacatttgctagtttagcgctcgccaccgagccaccaaccgaaagccttctcttgcggaaaccctatggaagagataaacctctcatttctaggaccatgatgaaaaatatcctcgggcacgctgtctaccagcttgccattatatttactttgctgtttgtaggcgagttattttttgatatcgacagcggccgcaacgccccactgcacagtcccccaagcgagcactataccattatcttcaatacattcgtaatgatgcaactcttcaacgaaattaacgctcgtaaaattcacggagaaaggaatgtgttcgacggaatcttctccaaccccatcttctgtaccatcgtcctaggaacatttggcatccagattgtgatcgtgcagtttggaggcaagcctttcagctgctccccactgtcaacagagcagtggctctggtgtcttttcgttggggttggggagctggtgtggggacaggtcatcgcaactatcccaacctcacaacttaagtgtttgaaagaggccggccacgggcccggcaaggacgagatgactgacgaagagctggcagagggcgaagaagaaatagaccacgctgagagggagctccgaaggggccaaattctctggtttagaggattgaacagaatacagacccagattcgggttgttaaggcatttcgcagctccctctacgaaggtctggagaaacccgaaagtaagactagcattcacaactttatggccacacctgaatttctgatcaatgattatacacacaatatcccccttattgacgataccgacgtggacgaaaatgaggaacgccttcgcgcaccaccacctccaagcccaaatcagaacaacaacgccatagactcaggcatatacctgacaacccatgtcaccaagtcggctacatcttcagtgttcagttcttccccagggtcaccgttacactccgttgaaacttcactttag

SEQ ID NO: 285371 - DNA, 3663 bp, Artificial Sequence
  derived and/or modified sequence
atgggcgatatggcgaactcatctattgagttccacccaaaaccccagcagcagcgggatgtgcctcaagcaggcgggttcggatgcacgctggctgaactgcgcaccctgatggagctccgaggcgctgaggcactgcaaaagatagaggaggcatacggggatgtaagtggcctgtgccgcagattaaaaaccagtccaacagagggcctggccgataatactaatgatctggaaaagaggcggcagatatatggacaaaatttcattccacctaaacagcccaaaactttccttcagttggtctgggaggcactgcaagacgttaccctgatcattttggaggtagcggcaatcgtttccttgggcctgtccttctatgctccacccggagaagagagcgaggcatgcgggaatgtgagcggtggtgccgaagatgagggggaagccgaggctggatggatagaaggcgccgccatcctgctctcggtgatttgtgtggtcctcgtgacagcttttaatgattggtcaaaagaaaaacaattccgaggactgcagtcccgtattgagcaggaacagaaatttaccgtgataagaaatggacaactgctgcaggttcccgtggcggcactggtggtgggtgacatcgcccaggttaagtacggcgatctgctgcccgccgacggcgtcttaatccaggccaatgatctgaaaatcgacgaatcgagtctgacaggcgagagcgaccacgtgcggaagagcgccgataaggacccgatgttactctctggaacccatgttatggaggggagtggcaggatggtggtcacggcagtcggagtgaattcccagaccggaatcatcttcacccttttgggcgccggaggagaggaagaggagaaaaaggacaaaaaagggaagcagcaagatggagctatggagtcttcccagaccaaggctaaaaagcaagacggagcagttgccatggaaatgcaacctctgaagtctgccgaaggaggagagatggaagagcgagaaaaaaaaaaggcaaacgctcctaagaaggagaagtctgtactccagggtaaattgacaaagttggccgtccaaatcggaaaagctgggctggtcatgtccgctatcacagtgatcatactggtgctgtactttgtgatagagacctttgtagttgaaggaaggacctggcttgccgagtgcacaccagtgtatgttcagtacttcgtaaaattttttatcattggcgtgactgtgttggttgtggctgtgcccgaaggcctgccactggctgtgactatctccctcgcctactcggtgaagaagatgatgaaagacaataatctggtaagacacctcgatgcttgcgaaactatgggcaacgctacagctatttgtagcgacaaaactggaacccttactacgaacaggatgacagtcgtacagtcatacctcggggacacccactataaagagattccagccccttccgctctgacaccaaaaatcctggatttattggtgcatgccatatcaattaactcagcctacactaccaagatactgccacccgagaaggagggagcactgcccaggcaggtaggcaataaaaccgaatgtgccctcctcggcttcgtcctggatcttaagcgcgatttccagcctgtgagggagcagatacccgaggacaagttgtataaggtatatacattcaattcagtgcgcaagtccatgtccacggtgattagaatgcctgatggcggattcaggctattctcaaagggcgcaagtgagattctgctgaaaaagtgtaccaatatcctgaactcaaacggtgaacttcggggattcaggcctagggaccgggacgatatggttcgaaaaattattgaacctatggcttgtgacggcctcagaactatttgcatcgcttatcgagatttttctgccggccaggagcccgattgggataacgagaatgaggtggtcggtgacctaacgtgcatcgctgttgtaggtattgaggaccctgtacgtcctgaagttcctgaggctattaggaaatgccagcgggccgggatcacggttcggatggtcaccggagacaacatcaatacggcgagagccatagcagccaaatgcggcatcattcaaccaggtgaggattttttgtgtctagagggcaaagagtttaatcggaggatacgcaacgagaagggcgaaatcgagcaagaacggctggacaaggtgtggccaaaactccgagttctagccagatcaagcccaaccgacaagcatacgctggtgaaggggatcatcgactccacaacaggtgaacagagacaagttgttgccgtgaccggagacggcacaaatgatggcccagccctcaagaaagcagacgttggcttcgccatgggaatcgcaggcacagacgttgcaaaagaagcctcagacattattctcacagacgataattttacttctatcgtgaaagccgtgatgtgggggagaaacgtgtatgattccatctctaagtttctgcagttccaactcactgtcaatgttgtcgccgtcattgttgctttcaccggtgcatgtatcacacaggacagcccgctcaaggcagttcagatgctctgggtcaacctgatcatggacacattcgcaagcctagctctggctactgagccgcccacagaatccttgctcctgcggaagccatatgggcgggataagcccctcatctcacggactatgatgaagaatattctgggtcacgccgtgtaccagctggcaattatctttacactgctctttgtcggagagctgtttttcgatatcgactcagggaggaacgctccgttgcatagccctccttctgaacattatacaataatcttcaatactttcgttatgatgcagctgttcaatgaaattaatgcaaggaaaatccacggagagcggaacgtctttgacggcatttttagcaatcccattttctgtaccatcgttctggggactttcgggatccaaatcgtaatcgtccagttcggcggaaaacccttctcctgtagtcctctgtcgacagaacagtggctgtggtgtctgttcgtcggggtgggagaactggtctggggccaagttattgctaccatacccacgagccaactcaaatgcctcaaagaggcgggccacggtcccgggaaggacgagatgaccgacgaggaactggcagagggggaagaggagatcgaccatgcggaacgagagctgcggcgaggtcagatattatggttcagagggctgaatcgcattcagacgcaaattcgggtggtcaaagccttccgttcaagcctgtacgagggcctcgaaaaaccagagtccaagacctcaattcataatttcatggccacccccgaattcctgattaacgattatacccataatattcctttgattgacgacactgatgtcgacgagaatgaggaaaggctgagggcacctccccccccatcacccaaccagaataacaacgccattgacagcggcatttaccttaccacgcacgtgactaaaagcgcaacaagtagcgtcttttccagcagcccgggatcccctctgcacagcgtcgagacttcgttatag

SEQ ID NO: 285372 - DNA, 3663 bp, Artificial Sequence
  derived and/or modified sequence
atgggcgacatggccaacagcagcatcgagttccaccccaagccccagcagcagcgcgacgtgcctcaggcgggaggttttggctgtactctggcagaattacgaaccctcatggagctcaggggtgccgaagccctgcagaagatcgaagaggcctacggcgatgtcagcggattatgccgacgcctgaagacatcgcctaccgaggggctggctgataacacgaacgatttagagaagcgccgacaaatatacggacagaacttcatccccccaaagcagcccaaaacctttctgcaactcgtgtgggaggccttgcaagatgtcacccttatcatattggaggttgccgctatcgtatctttaggtctgagtttttacgcaccccccggagaggaatcggaggcatgtgggaatgtatctggcggcgccgaagatgaaggagaagccgaagcgggctggatagagggggccgccatcctgctgtcagtcatctgcgtcgtgctggtcaccgcctttaatgattggtcgaaagagaaacaattcaggggccttcagtccaggattgaacaggagcaaaaatttactgtgattcgaaacggccaactgctccaagtcccagtagccgcacttgtcgtgggtgacattgcacaggtcaagtatggggacctgcttcccgccgatggggtgttaatccaggcaaatgacttgaaaatcgacgaatcatccttgacaggcgaaagcgaccatgtgaggaagtcagctgataaggatcccatgctactgtccggaacacacgtgatggaaggcagcgggaggatggttgttacagcagttggcgtgaattcacaaaccggtatcattttcacactccttggggctgggggagaggaggaggagaaaaaggataaaaagggaaaacagcaggatggagcaatggaatcttctcagacaaaggcgaaaaaacaggatggggcggtcgccatggagatgcaacctctgaaaagcgcagaaggaggcgaaatggaggagagggaaaagaagaaggcgaacgctccaaaaaaggagaaaagcgttctccagggaaaactgacaaaactggcagttcagatagggaaggccggcctagtcatgtctgccattacagttatcatcttggtgctgtacttcgtgatcgagacattcgtggtcgagggacgtacttggctcgccgaatgtactccagtgtacgtgcagtactttgtcaagttcttcatcataggagtgactgtgctggttgtggccgtgcccgagggcttgccgctcgccgtcactatttctctcgcatattcagttaaaaagatgatgaaagacaacaacttagtgcgccacctcgatgcttgtgaaaccatgggtaatgcaaccgctatctgtagtgataaaactggcacacttaccacgaataggatgactgtcgttcagagttatctcggtgatacgcattataaagaaattcccgccccctctgcactaacccctaaaatactagatctcttagttcacgctatcagcataaatagcgcgtataccacaaaaatcttgccgcctgaaaaggagggagcacttccaagacaggtaggaaacaaaacagaatgcgcgctccttggctttgtgctcgacttaaagcgtgacttccagccggtgagggaacagataccagaagacaagctctataaagtgtatacttttaatagtgttagaaaatccatgtccaccgttattaggatgcctgacggcggcttcaggctgtttagtaagggagcttcggagatactcctaaaaaagtgcaccaacatcctgaattccaacggtgagttgagaggttttaggcctcgggacagggacgatatggttcgaaaaatcattgaaccgatggcttgcgacggactccggacgatctgcatcgcctatagggacttctctgccggccaggagcccgactgggataatgaaaacgaggttgtgggcgacctgacatgtatagcggtggtgggaatcgaggatcctgttaggccagaagtgccagaggccatcaggaagtgccagagggccggaatcactgtgcgcatggtcaccggagacaatatcaatacagcccgcgcaatcgcggcgaagtgtggaatcattcagcccggcgaggatttcttgtgtctggaaggaaaagagttcaacagaagaattcgtaatgagaagggtgaaatcgagcaggagaggttagacaaggtttggccgaaactccgtgtccttgcacggtcctcacctaccgacaaacacaccctggtcaagggtatcatagattctaccacaggggaacagagacaggttgttgccgtaaccggcgacgggacgaatgacggccctgctttgaaaaaagcagatgtcggattcgcaatggggattgctggtactgacgtggccaaggaagcttccgacatcattctgacggacgacaactttacgtcgatcgtgaaagctgtgatgtggggcagaaatgtttatgattcaatttcgaaattcttgcagttccagctgactgtcaacgtagtggcagttattgtcgcgttcactggtgcatgcatcacccaggacagccctctgaaggcagttcagatgttgtgggtcaaccttatcatggacacctttgcatcattagctcttgccaccgaacccccgaccgagagcctgctcttgcgcaagccctacggccgcgacaagcctctcatcagccgcacgatgatgaaaaatatactggggcatgctgtgtaccagctcgcaataatatttacgctacttttcgtgggcgagctgttcttcgacattgacagcggtcgcaatgcacctctgcactcccccccatccgagcattacaccattattttcaatacattcgttatgatgcagctctttaacgagatcaacgcaaggaaaatccacggcgagcgaaacgtgttcgatggtattttttccaaccccattttttgtaccattgttttgggtaccttcggcattcagatcgtcatcgtgcagttcggcggaaagccgttttcgtgcagccctctatccacggaacagtggctgtggtgcctgtttgtgggggtaggcgaactggtttggggccaagtcattgccactatcccgacaagtcagctgaagtgtctgaaggaagctggccacgggcccgggaaggatgaaatgactgatgaggagctggctgagggtgaggaggagattgaccacgcggaaagggagctcaggcggggacagatactctggtttaggggcctcaatagaatccaaacgcagattcgggtggtgaaggcgtttcgatctagtctgtatgaggggctcgagaaacccgagtcgaagactagcatccataatttcatggccactccagagtttctgattaacgattacacacataatatccctctgatcgacgacacagacgttgatgaaaatgaggaacgcctgcgggcacctccgcccccttcgcctaatcagaataacaatgccatcgattctggcatttatctgacgacacatgtcaccaaaagcgcaactagctcagtgttttcgagctctcctgggagtcctcttcacagcgtggagacaagcttgtag

SEQ ID NO: 285373 - DNA, 3663 bp, Artificial Sequence
  derived and/or modified sequence
atgggcgacatggccaacagcagcatcgagttccaccccaagccccagcagcagcgagatgtgcctcaagctggtggctttgggtgcacactggctgaactgagaacgctaatggagcttcgaggagccgaagctctgcagaagattgaggaggcctatggcgatgtctctgggctttgccggcgcctgaaaacaagtcccaccgagggccttgcggacaatacaaatgacttggagaaacgaagacagatctatggacaaaacttcatacctcctaaacagccaaagaccttcttgcaactggtgtgggaagctctccaagatgtaaccttaattattctggaggtcgccgcaattgtgtccctgggcctctccttctacgctcctcctggcgaagagagtgaagcctgtggcaacgtgagtggcggggctgaagatgaaggtgaggccgaggcagggtggatcgagggggccgcaattctcctgagtgtgatttgcgttgtgctcgttacagccttcaacgactggtccaaggagaagcagtttaggggactgcaatcaagaattgagcaggagcagaagtttacagttattaggaacggccagttgctgcaggtgcccgtggcagctttggtggtgggagacatcgctcaggtcaaatatggcgacctgctgccagccgacggagtgttgatccaggccaacgatcttaaaattgatgaaagttccctgaccggcgagtctgatcacgtgcgtaaatccgctgacaaggaccctatgctcttaagtggcactcacgtcatggagggctctggaagaatggtggttaccgccgttggagtgaactcccagacgggaattatcttcactcttctgggtgctggaggcgaggaggaagaaaagaaagacaaaaagggtaaacagcaggacggggccatggaatctagccagacgaaagccaaaaaacaggacggggctgtggctatggaaatgcagccgctgaagagcgccgagggaggagagatggaggaaagagaaaagaagaaggcaaacgctcccaagaaggaaaaaagcgtcctacagggaaagcttacaaagctggccgttcaaattggaaaggctgggctggtaatgtcagcaatcactgtcattattttggtcctatacttcgttatcgaaacctttgtagtggagggccgtacatggttggccgagtgtacccccgtgtacgtgcagtattttgtgaagttttttatcatcggcgtcacggtgctggtagtcgccgtgccagagggcctccctcttgccgtaaccatttctcttgcatattcggtgaagaagatgatgaaagacaataatttggtccggcacctggacgcatgcgagaccatgggaaatgccaccgctatttgctccgacaaaaccggaacgctgaccaccaataggatgacagttgtccagagttatctgggagatactcactacaaagagatcccagctcccagtgccctgactcctaagatacttgacctgttggtgcacgcgatctctataaactccgcttataccactaaaattctgcctcctgagaaggagggggccttgccacgccaggttggaaataagaccgagtgcgcactgctgggtttcgtactggatttgaaaagagatttccaacctgtcagagaacagattccggaagacaaattgtataaggtgtatacttttaattccgtccgtaagagcatgtccaccgttattcgcatgcccgacgggggctttcgattattctctaaaggcgcctctgaaatcctgctcaaaaagtgtactaacatcctcaattccaacggagagctgaggggcttccggccgcgcgaccgtgacgatatggttcgaaagatcatcgaaccaatggcttgtgacggcctccgtacgatctgcatcgcctacagagacttttctgctggccaggagccagactgggacaatgagaatgaggttgtgggggacctgacatgcattgccgtcgtcgggatagaagacccggttcgccctgaggtccctgaagccattaggaagtgccagcgggctggaattacagtcagaatggtcaccggggataatatcaacaccgctcgagctattgcggccaagtgcggcatcattcaaccaggggaggactttctgtgcctggaagggaaagaatttaaccgcaggataaggaatgagaagggcgagatcgagcaagaaaggctggacaaggtgtggccaaaactgagggtgctggctaggtcatcgccgaccgataagcacactttagtcaaaggcattatagactcaactactggagaacaacggcaggttgtggctgtgacaggtgatggcacgaacgacggacctgccctgaagaaagccgacgtgggctttgcaatgggaatagccggaacagacgttgctaaagaagcctccgacattatattaaccgacgacaatttcactagcatcgtaaaggccgtgatgtgggggagaaatgtgtatgactcaatctctaaattcctgcagttccagttaactgtgaatgttgtcgccgttatcgtcgccttcaccggcgcctgcataacccaggactcacctctaaaggctgtgcagatgctgtgggtgaacctgatcatggacactttcgcctccctggccctcgcaacggaacctccgaccgagtccctgctgctgcggaaaccttatggaagagacaagcctctgatctccaggacaatgatgaagaatatcctcggtcacgcagtgtatcagctcgctatcatcttcacactgctgttcgtgggagagctcttcttcgatattgactcagggagaaatgcccctctgcacagtcctcctagtgagcactacactattatcttcaataccttcgttatgatgcagctcttcaatgagattaatgcaaggaagattcatggcgagcgcaacgtgtttgacgggatattcagtaaccctatcttttgcacaatagtccttggaacgttcgggatccaaatcgtgattgtccagttcggaggaaagccattctcctgctctcctctctctaccgaacagtggctatggtgtctcttcgttggagtgggggagctcgtgtggggtcaggtgatcgccaccattcctaccagccagctgaagtgtctaaaagaagctgggcacggcccagggaaagacgaaatgaccgacgaggaactcgccgagggggaggaggaaatcgatcacgccgagagggaacttcggaggggccagatcctgtggtttagagggctcaaccgaattcaaacacagatcagagtggtcaaagcctttaggagttccctctatgaaggcctggaaaagcccgaaagcaaaacctccatccacaattttatggcgactccagaattcctcatcaacgattacacacacaatataccactcatagacgacactgatgtggacgaaaacgaagaacggctccgggcccctccaccccccagccccaatcagaacaataacgcaatagacagtgggatctatctgacgacacatgtaactaagtcagctacgtcttctgtgttcagttcatctcccggctctcccttacattccgtcgagacatctctgtag

SEQ ID NO: 285374 - DNA, 3663 bp, Artificial Sequence
  derived and/or modified sequence
atgggcgacatggccaactcgagtatcgagttccacccgaaaccccaacaacagcgcgatgtcccacaggccggagggtttggttgcaccctggccgagctgaggactttaatggagttacgaggagccgaggcattgcagaaaattgaagaagcctacggcgacgtctccggactgtgtcggcgtcttaagacaagcccgactgagggcctggcagataataccaacgacttggaaaagcgccgacagatctacggacaaaattttattcctcccaagcagcctaaaacattcctgcagctcgtgtgggaggccctgcaggacgtcaccctaatcatcttagaggtggcggcaattgtctctttaggcctgtccttttacgcccctcctggggaagaatccgaggcttgcgggaatgtaagcgggggagctgaagacgaaggcgaagccgaggccggttggatcgaaggcgctgcaatactgctctcagtgatctgcgttgtgcttgtcacagccttcaacgactggtcaaaggaaaagcagtttcgcggtctgcagagcagaatcgagcaagaacaaaaattcaccgtgatccggaatgggcaactcctccaggtacccgtcgctgccctggttgtgggcgatattgctcaggtgaagtacggtgatctccttcctgccgacggggtgctgatacaggccaacgatctgaagattgatgagagctcactcaccggtgagagtgaccatgtgcgcaaatctgccgataaagatccaatgctgctatccggaacccacgtcatggaagggagcgggaggatggttgttactgcagtgggagtcaatagtcagacaggtataattttcacattattgggggcaggcggagaagaggaggagaagaaggataagaaagggaagcagcaggacggagccatggagtctagccagacaaaggctaagaagcaggatggcgcagtggcaatggagatgcaacctctgaagagcgctgaagggggagagatggaggaacgtgagaaaaaaaaagccaatgcaccaaaaaaagaaaaatctgttctgcagggaaaactgacaaaactcgcggtgcagattgggaaggccggtctagtgatgtctgcaatcacggtgatcattcttgtcttatatttcgtgattgaaactttcgtcgtcgagggcaggacatggcttgctgagtgtacccccgtctacgttcagtacttcgttaaattcttcatcatcggggtgaccgtgttagtggttgctgtgcctgagggccttccccttgcagtgacaatcagcctggcttactccgtcaaaaagatgatgaaggacaacaatcttgtcaggcatctggatgcttgtgagacgatgggcaatgccacagccatctgctcagacaagacagggacactgacgactaaccggatgacagtggtgcagagctatctaggggatacacattacaaggagattccggcaccttcagcgctgacccccaaaatactggatctgctggtgcatgccatttccatcaattcggcctataccactaagatcctgccaccggaaaaagaaggtgcccttccaaggcaggtaggtaataagacagagtgtgctctgctgggcttcgttctcgacttgaagcgcgacttccagccagtgcgcgaacagatccctgaagacaagctgtacaaagtctatacttttaattcggttaggaagtctatgtcaacggtcatccgtatgcctgacggcggtttcaggctcttcagtaagggcgcttcggagatcctgctcaagaaatgcaccaacatacttaattcaaacggagaactgagaggttttaggccgagggatcgtgatgacatggtgcgaaaaatcatagaacccatggcctgtgacgggctgcgaaccatttgtattgcctatagagacttcagcgcaggccaagaaccggactgggataatgaaaacgaagtggtgggcgatcttacctgcattgcagttgtggggatcgaggatccagtccggcctgaggtgccagaagctatccgtaaatgtcagagggccggtatcacagttcgcatggtaacgggagacaatataaacaccgcaagagccatagccgcaaagtgtggaatcatacagccaggtgaagactttctgtgtttggagggcaaggagttcaatcggcgaatacgtaatgaaaagggcgagatcgaacaggagcggctggataaggtatggcccaagctccgcgtgttagcgaggagttcccctacagataaacacaccttggtgaagggcatcatagatagcacaacgggagagcaacggcaagtggtcgccgtgactggcgacggcaccaatgacggcccagcattaaagaaggccgacgtggggttcgctatgggaatcgccggaactgacgttgccaaggaggccagcgatataatactgactgatgacaattttactagcatcgttaaagccgtcatgtggggcagaaacgtatatgattccatctctaaatttctgcagtttcaattgaccgtgaacgtcgtggctgtgatcgtagcctttaccggcgcatgtatcacccaagattcccccttaaaagctgtgcagatgttgtgggtgaacttaattatggatacctttgcttctcttgccctggctaccgaaccacctacagagtccctgctgttaagaaaaccttacggacgtgacaaaccacttatcagtaggaccatgatgaagaacattttggggcacgctgtctatcagttagccatcattttcactctccttttcgtaggtgagctgtttttcgacatagatagtggaagaaatgcccctctccactctcccccatcagagcattacactatcatttttaatacctttgttatgatgcagctgttcaatgaaattaatgccagaaaaattcacggtgagcggaatgtgttcgacgggatcttctccaatcctatattctgtactatagtgctcggcacttttggcatacagattgttattgtccagttcggcggtaaaccattctcttgtagccctttaagcacagaacaatggttgtggtgtttatttgtgggggtgggtgagctggtgtggggacaggtgatagccactattcctacctctcaacttaaatgcctcaaagaggcgggtcacggcccaggaaaagacgagatgacagatgaggaactagcagagggtgaggaagagatcgaccacgccgagcgagaactgcgcagaggtcaaattctgtggttccgaggccttaatcggatacagactcagattagggtggtgaaagctttccggagctcactgtatgagggtctcgagaaacccgagtctaagacctctattcataattttatggccaccccagagtttctcatcaatgattatactcataacatcccacttattgacgatactgacgtagacgaaaacgaagaacgtctgcgggctcctccccctccctcaccaaaccagaataacaatgctattgatagcggtatttaccttaccacacacgttaccaagtccgctaccagctcggttttctcatcatcaccaggatctcctctgcactccgtggagacctcgctgtag

SEQ ID NO: 285375 - DNA, 3663 bp, Artificial Sequence
  derived and/or modified sequence
atgggcgacatggctaatagtagcatagagtttcatcccaagccccagcaacagcgcgatgtcccacaggccggagggtttggttgcaccctggccgagcttcggaccctgatggagttgcggggtgcagaagcgttgcagaagatcgaagaggcctacggcgacgtgtccgggctttgtcggagacttaaaacatcacctaccgaaggcctggccgacaacaccaacgatctggagaaacggcgacaaatatacggtcaaaacttcatcccgcctaagcagcccaaaaccttcctccagttagtctgggaggccctacaggacgtgactctcattattttggaggtggcagccattgtctcccttggtttgtctttctatgcgcctcctggggaagagtcggaggcttgcggcaatgtctctgggggagcagaggatgagggcgaggcggaagctggatggatcgaaggtgcggcaatcctgcttagcgtaatctgcgtcgtgctcgtgacagcctttaacgattggagtaaggagaagcaatttcgaggtctgcaaagcaggatagagcaggaacaaaaatttacagtgataagaaacgggcaactccttcaggtcccggtggccgctttggtggttggggacattgctcaagtaaaatacggcgatctgctgcctgcagatggggtactcatacaggccaatgacctgaaaatcgatgagtcctccttgaccggcgagtcagaccacgttagaaagtctgccgacaaggatccaatgctcctctctggtactcatgtgatggagggatctggtcgtatggtagttaccgccgtcggggttaattctcaaaccggcatcattttcaccctgctgggcgcaggcggagaggaggaggaaaagaaggacaagaaggggaagcagcaggatggcgcaatggaaagctcacaaaccaaggctaagaaacaggacggtgccgtggccatggaaatgcaaccactcaagtccgccgagggcggagagatggaggagagagagaagaaaaaagccaatgcaccgaagaaagaaaaaagcgtacttcagggcaaactcaccaaactggccgtgcaaatcggaaaggctgggctagtgatgtccgcgattactgtgatcatcttggtgctgtatttcgtgatcgaaacatttgtggtggagggacgaacttggttagccgagtgtactccggtgtatgtccaatatttcgtcaagttcttcatcattggcgtgacagtgctggtcgttgccgttcccgaagggctccctctggctgtgaccatcagcctggcctattctgtgaaaaagatgatgaaggacaataaccttgtccgccaccttgacgcctgtgagacaatgggtaacgccaccgccatatgctcggacaagacaggaacattaaccactaataggatgactgtggtgcagtcctacctgggcgacacgcactataaggagatccccgctccctcagccctgaccccgaagatcttggatctcctcgtgcacgccatttctataaattcagcttacactaccaaaattcttcccccagaaaaagagggggcactgccacgacaggtgggcaacaagacggagtgcgccctgctcggattcgtgcttgacctgaaaagggactttcagcccgtcagagagcagattccggaggataagctgtacaaagtctacacgtttaactcagtgcgtaaaagcatgagcactgtgatcagaatgcccgatggtggctttcgcctattttcaaagggcgcatcagagatcctgctgaaaaaatgtacaaacatcctgaattctaacggtgaactgcggggatttaggccacgcgatcgcgatgacatggtgcgcaaaatcattgagccgatggcttgtgatggattgaggaccatttgcatcgcgtacagggacttctctgcgggtcaagaaccagactgggacaatgagaatgaggttgttggagacttgacatgcattgccgttgtaggtatcgaggatcccgtccggcctgaggtccccgaggcgatcagaaagtgtcagcgcgctgggatcaccgtgaggatggttaccggcgacaacattaatactgccagggccattgccgcaaagtgtggaatcatccaaccgggagaggactttctctgtttagagggaaaagaatttaatcggcgtatcaggaacgaaaagggcgaaatcgagcaggaaaggctggacaaagtatggcccaaacttcgcgtgcttgctagaagttccccgacggataagcacactctggttaaaggcattatcgactctaccactggtgagcagcgccaagtagtggcagtaactggtgacggcacgaacgatggacctgccttgaagaaggctgacgtcggttttgcgatgggaatcgcaggaactgatgtcgccaaagaagcaagcgacattattcttaccgacgataatttcacaagtatcgtcaaggctgtaatgtggggtcgcaatgtctacgacagcatctcgaaatttttgcagtttcagctaacagtgaacgtggtagcggttattgtcgcgttcaccggggcatgtatcacccaggattcccctctaaaagccgtgcagatgctgtgggtgaacctgataatggacacgttcgctagtctggctctggcaacagagccacctaccgagtctcttctgctcagaaagccttacggccgtgacaaacccctgattagcagaactatgatgaagaacatcctaggacatgcagtgtaccaactcgctattattttcaccctcctattcgtgggcgagctcttttttgacatagatagtgggcgtaacgcccctctccactccccacctagcgaacactatactattatcttcaataccttcgtgatgatgcagctgttcaatgaaattaatgccaggaaaatccatggagagcggaacgtgtttgacgggatattcagtaatcccatcttttgtacaattgttctaggcaccttcggaatccagatcgtcattgtgcaattcgggggaaagccgttcagttgctcccccctgagcaccgagcaatggctgtggtgcttgttcgtgggggtgggggaacttgtgtgggggcaggttatcgccacaattcctactagtcaactgaaatgtcttaaagaagccggtcatggtcccggtaaggacgagatgacggacgaggagctggccgagggcgaggaggagatcgaccatgctgagagggagctcaggcggggacagatattatggttccggggactgaaccggattcagacgcagatccgagttgtgaaggctttccggtctagtctgtacgaggggctggaaaaacccgagagcaaaaccagcattcataattttatggccacaccggaatttctgatcaatgactatactcacaatattccgttgattgatgataccgacgttgacgaaaatgaggaacgcctgagggcccctccaccgccaagtcctaaccagaataacaatgctattgacagcggcatctacctgacaacacatgtgacaaagtcagccacatcttccgtattttcctctagtcctgggagtcctctacacagtgtggagacctcactctag

SEQ ID NO: 285376 - DNA, 4280 bp, Artificial Sequence
  derived and/or modified sequence
ccgccgccggtgcagagcgtggggagcactcggccgcagccctcgcccgccgcagagggtcgcgtcccgcgccgccggccaggccgccccgtgcccaggcctttccatccttggagcggatcgttgcccgcctgacgcccgcccgcagcgacagcgcccgccggagccgaggccgcggcggcggccgtgcccatgcccgggtgtccacgcttagcagctttctcaccgccgccaaaccttgcctgggcactgggaccgtgggtggccgcctgtccctagctgtggctgagccaagattgcacttgtgagaaggcctgacaggcagcatgggcgacatggccaatagttccatcgagttccaccccaagccccagcagcagcgggatgtcccccaggctggaggctttgggtgcacgctggcggagctgcgcaccctcatggagctgcgaggggccgaggcgctgcagaagatcgaggaggcctacggggatgtcagcgggctctgccggaggctgaagacctcacccacagagggcctggcggacaacaccaatgacctggagaagcgcaggcagatctacgggcagaacttcatccccccaaagcaacccaagaccttcctgcagctggtgtgggaggccctgcaggacgtgaccctcatcatcctggaggtggctgccatcgtctctctgggcctctcgttctatgcgccgccaggagaggagagtgaagcctgtgggaatgtgtcgggaggcgcagaagatgagggcgaggccgaagctggctggatcgagggggctgccatcctgctgtccgtcatctgtgtggtgctggtcacggccttcaatgactggagcaaggagaagcagttccgaggcctgcagagccgaattgagcaggagcagaagttcacggtcatccggaacgggcagctcctccaggtccccgtggctgcgctggtggtgggggacattgcccaggtcaagtacggcgacctgctgccagccgacggcgtgctcatccaggccaatgacctcaagatcgacgagagctccctgacgggcgagtctgaccacgtgcgcaagtcagctgacaaagatcccatgctgctctcaggcactcatgtcatggaaggttctggaagaatggtggtgaccgccgttggcgtgaattcccagacaggcatcatcttcacgctgcttggagctggcggagaggaggaagagaagaaagataagaaaggcaagcagcaggatggggccatggagagtagccagaccaaagctaagaagcaggatggtgcagtggccatggagatgcagcccctgaagagcgcggagggtggggagatggaggagcgggagaagaagaaagccaacgcacccaaaaaggagaagtctgtccttcaggggaagctcacaaagctagccgtgcagatcgggaaagcagggctggtgatgtctgccatcaccgtcatcatcctggtcctctactttgtgattgagacgtttgtcgtggaaggccggacatggctggcagagtgcacgccggtctatgtacaatacttcgtgaagttcttcatcattggtgtcactgtgctggtcgtggctgtcccagagggcctgcctcttgctgtcaccatctccttagcttactctgtcaagaaaatgatgaaagacaacaacctggtgcgccacctggatgcctgcgagaccatgggcaacgccacagccatctgctccgacaagacgggcacgctcaccaccaaccgtatgaccgtggtccagtcctacctaggagacacccactacaaagagattccggcccccagcgccctgacccctaagatcctcgacctcctggtccatgccatctccatcaacagtgcctataccaccaaaatactacctcctgagaaggaaggcgccctcccacgccaggtgggcaataagacggagtgcgccctgctgggcttcgtcttggacctgaagcgggacttccagcccgtgcgcgagcagatcccggaagacaagctttacaaagtgtacaccttcaactcggtccgcaagtccatgagcacagtcatccgcatgcccgacggtggcttccgcctcttcagcaagggggcctcagagatcctcttgaaaaagtgcaccaacatcttgaacagcaatggcgaactccggggctttcggcctcgggaccgggacgacatggtgaggaagatcatcgagccgatggcttgcgatggcctccgcaccatctgcatcgcctaccgggacttctctgcaggccaggagcccgactgggacaacgagaatgaggtcgtgggtgacctcacctgcatagctgtcgtgggcattgaggaccctgtgcggcccgaggtccctgaagctatccgaaaatgccagcgtgctggcatcacagtccgcatggtgactggggacaacatcaacacggcccgggccatcgcagccaaatgcggcatcatccagcccggggaggacttcctgtgcctagaagggaaggagttcaaccggcggatccgcaatgagaaaggcgagatagaacaggagcggctggacaaggtgtggcccaagctgagggtgctggcccggtcgtctcccaccgacaagcacacactggtcaaagggattatcgacagcaccactggtgagcagcggcaggtggtggctgtgacaggggatggcaccaacgatgggccggccctcaagaaggcggacgtgggcttcgccatgggcatcgcagggaccgacgtggccaaggaggcctccgacatcatcctgaccgatgacaacttcaccagcatcgtcaaggcagtcatgtggggccgtaacgtctatgacagcatctccaagttcctgcagtttcaactgacggtcaatgtggtggctgtgatcgtggccttcacaggtgcctgcattactcaggactctcctctcaaagccgtgcagatgttgtgggtgaacttgatcatggacacatttgcctctctggccctggcgacggagccacccacagagtcgctgctgctgcggaagccgtacggccgcgacaagcccctcatctcccgcaccatgatgaagaacattctgggccacgccgtgtaccagctcgccatcatcttcaccctgctgtttgtcggggagctcttcttcgacatcgacagcgggaggaatgcgcccctgcactcgccaccctcagagcactacaccatcatcttcaacacgttcgtcatgatgcagctctttaacgagatcaacgcccgcaagatccacggcgagaggaacgtgttcgacggcatcttcagcaaccccatcttctgcaccatcgttttgggcactttcgggattcagattgtcatcgtccagtttggcgggaagcccttcagctgctccccactatccacagaacagtggctctggtgcctgtttgttggtgttggggagctggtctggggacaggtcattgccaccatccccaccagccagctcaagtgcctgaaggaagccgggcacgggcccgggaaggacgagatgaccgacgaggagctggccgaaggcgaggaagagatcgaccatgccgagcgggagctccgcaggggccagatcctctggttccggggcctgaaccggattcagacgcagatccgggtggtgaaagcgttccgtagctcgctctatgaaggcctggagaaaccagaatccaagacctccattcacaacttcatggccacgcccgagtttctgatcaatgactacacccacaacatcccgctcattgacgacacggacgtggacgagaacgaggagcgcctccgggcccccccgcccccgtcccccaaccagaacaacaacgccatagacagcggcatctacctgaccacgcatgtcaccaagtcagctacctcttcagtgttttcctccagtcccgggagcccgctccacagcgtggagacgtccctctaacaagaacttgtctcagcacatgcgcacacgcacactcggactcacacgaagtcacacgcacacatgcacgcacacacacatatggggacctgcacacctgcaaaacgagggaacaactaaggtggctgaagacctttctggcagggcatttgcaaggacccaaatccattcaacaagggtgcagcctgccacaggctcctcatccggactgaggaagacgaggacagggaggaggaaaaggaggaagaggaggacaaaaagggggaggagaaggttcttcgtccaaaggag

SEQ ID NO: 285377 - protein, 1173 aa, Artificial Sequence
  derived and/or modified sequence
MGDMANSSIEFHPKPQQQRDVPQAGGFGCTLAELRTLMELRGAEALQKIEEAYGDVSGLCRRLKTSPTEGLADNTNDLEKRRQIYGQNFIPPKQPKTFLQLVWEALQDVTLIILEVAAIVSLGLSFYAPPGEESEACGNVSGGAEDEGEAEAGWIEGAAILLSVICVVLVTAFNDWSKEKQFRGLQSRIEQEQKFTVIRNGQLLQVPVAALVVGDIAQVKYGDLLPADGVLIQANDLKIDESSLTGESDHVRKSADKDPMLLSGTHVMEGSGRMVVTAVGVNSQTGIIFTLLGAGGEEEEKKDKKGKQQDGAMESSQTKAKKQDGAVAMEMQPLKSAEGGEMEEREKKKANAPKKEKSVLQGKLTKLAVQIGKAGLVMSAITVIILVLYFVIETFVVEGRTWLAECTPVYVQYFVKFFIIGVTVLVVAVPEGLPLAVTISLAYSVKKMMKDNNLVRHLDACETMGNATAICSDKTGTLTTNRMTVVQSYLGDTHYKEIPAPSALTPKILDLLVHAISINSAYTTKILPPEKEGALPRQVGNKTECALLGFVLDLKRDFQPVREQIPEDKLYKVYTFNSVRKSMSTVIRMPDGGFRLFSKGASEILLKKCTNILNSNGELRGFRPRDRDDMVRKIIEPMACDGLRTICIAYRDFSAGQEPDWDNENEVVGDLTCIAVVGIEDPVRPEVPEAIRKCQRAGITVRMVTGDNINTARAIAAKCGIIQPGEDFLCLEGKEFNRRIRNEKGEIEQERLDKVWPKLRVLARSSPTDKHTLVKGIIDSTTGEQRQVVAVTGDGTNDGPALKKADVGFAMGIAGTDVAKEASDIILTDDNFTSIVKAVMWGRNVYDSISKFLQFQLTVNVVAVIVAFTGACITQDSPLKAVQMLWVNLIMDTFASLALATEPPTESLLLRKPYGRDKPLISRTMMKNILGHAVYQLAIIFTLLFVGELFFDIDSGRNAPLHSPPSEHYTIIFNTFVMMQLFNEINARKIHGERNVFDGIFSNPIFCTIVLGTFGIQIVIVQFGGKPFSCSPLSTEQWLWCLFVGVGELVWGQVIATIPTSQLKCLKEAGHGPGKDEMTDEELAEGEEEIDHAERELRRGQILWFRGLNRIQTQMEVVSTFKRSGSVQGAVRRRSSVLSQLHDVTNLSTPTHAILSAANPTSAAGNPGGESVP

SEQ ID NO: 285378 - protein, 1159 aa, Artificial Sequence
  derived and/or modified sequence
MGDMANSSIEFHPKPQQQRDVPQAGGFGCTLAELRTLMELRGAEALQKIEEAYGDVSGLCRRLKTSPTEGLADNTNDLEKRRQIYGQNFIPPKQPKTFLQLVWEALQDVTLIILEVAAIVSLGLSFYAPPGEESEACGNVSGGAEDEGEAEAGWIEGAAILLSVICVVLVTAFNDWSKEKQFRGLQSRIEQEQKFTVIRNGQLLQVPVAALVVGDIAQVKYGDLLPADGVLIQANDLKIDESSLTGESDHVRKSADKDPMLLSGTHVMEGSGRMVVTAVGVNSQTGIIFTLLGAGGEEEEKKDKKAKKQDGAVAMEMQPLKSAEGGEMEEREKKKANAPKKEKSVLQGKLTKLAVQIGKAGLVMSAITVIILVLYFVIETFVVEGRTWLAECTPVYVQYFVKFFIIGVTVLVVAVPEGLPLAVTISLAYSVKKMMKDNNLVRHLDACETMGNATAICSDKTGTLTTNRMTVVQSYLGDTHYKEIPAPSALTPKILDLLVHAISINSAYTTKILPPEKEGALPRQVGNKTECALLGFVLDLKRDFQPVREQIPEDKLYKVYTFNSVRKSMSTVIRMPDGGFRLFSKGASEILLKKCTNILNSNGELRGFRPRDRDDMVRKIIEPMACDGLRTICIAYRDFSAGQEPDWDNENEVVGDLTCIAVVGIEDPVRPEVPEAIRKCQRAGITVRMVTGDNINTARAIAAKCGIIQPGEDFLCLEGKEFNRRIRNEKGEIEQERLDKVWPKLRVLARSSPTDKHTLVKGIIDSTTGEQRQVVAVTGDGTNDGPALKKADVGFAMGIAGTDVAKEASDIILTDDNFTSIVKAVMWGRNVYDSISKFLQFQLTVNVVAVIVAFTGACITQDSPLKAVQMLWVNLIMDTFASLALATEPPTESLLLRKPYGRDKPLISRTMMKNILGHAVYQLAIIFTLLFVGELFFDIDSGRNAPLHSPPSEHYTIIFNTFVMMQLFNEINARKIHGERNVFDGIFSNPIFCTIVLGTFGIQIVIVQFGGKPFSCSPLSTEQWLWCLFVGVGELVWGQVIATIPTSQLKCLKEAGHGPGKDEMTDEELAEGEEEIDHAERELRRGQILWFRGLNRIQTQMEVVSTFKRSGSVQGAVRRRSSVLSQLHDVTNLSTPTHAILSAANPTSAAGNPGGESVP

SEQ ID NO: 285379 - protein, 1154 aa, Artificial Sequence
  derived and/or modified sequence
MGDMANSSIEFHPKPQQQRDVPQAGGFGCTLAELRTLMELRGAEALQKIEEAYGDVSGLCRRLKTSPTEGLADNTNDLEKRRQIYGQNFIPPKQPKTFLQLVWEALQDVTLIILEVAAIVSLGLSFYAPPGEESEACGNVSGGAEDEGEAEAGWIEGAAILLSVICVVLVTAFNDWSKEKQFRGLQSRIEQEQKFTVIRNGQLLQVPVAALVVGDIAQVKYGDLLPADGVLIQANDLKIDESSLTGESDHVRKSADKDPMLLSGTHVMEGSGRMVVTAVGVNSQTGIIFTLLGAGGEEEEKKDKKAKKQDGAVAMEMQPLKSAEGGEMEEREKKKANAPKKEKSVLQGKLTKLAVQIGKAGLVMSAITVIILVLYFVIETFVVEGRTWLAECTPVYVQYFVKFFIIGVTVLVVAVPEGLPLAVTISLAYSVKKMMKDNNLVRHLDACETMGNATAICSDKTGTLTTNRMTVVQSYLGDTHYKEIPAPSALTPKILDLLVHAISINSAYTTKILPPEKEGALPRQVGNKTECALLGFVLDLKRDFQPVREQIPEDKLYKVYTFNSVRKSMSTVIRMPDGGFRLFSKGASEILLKKCTNILNSNGELRGFRPRDRDDMVRKIIEPMACDGLRTICIAYRDFSAGQEPDWDNENEVVGDLTCIAVVGIEDPVRPEVPEAIRKCQRAGITVRMVTGDNINTARAIAAKCGIIQPGEDFLCLEGKEFNRRIRNEKGEIEQERLDKVWPKLRVLARSSPTDKHTLVKGIIDSTTGEQRQVVAVTGDGTNDGPALKKADVGFAMGIAGTDVAKEASDIILTDDNFTSIVKAVMWGRNVYDSISKFLQFQLTVNVVAVIVAFTGACITQDSPLKAVQMLWVNLIMDTFASLALATEPPTESLLLRKPYGRDKPLISRTMMKNILGHAVYQLAIIFTLLFVGELFFDIDSGRNAPLHSPPSEHYTIIFNTFVMMQLFNEINARKIHGERNVFDGIFSNPIFCTIVLGTFGIQIVIVQFGGKPFSCSPLSTEQWLWCLFVGVGELVWGQVIATIPTSQLKCLKEAGHGPGKDEMTDEELAEGEEEIDHAERELRRGQILWFRGLNRIQTQMEVVSTFKRSGSVQGAVRRRSSVLSQLHDVTNLSTPTHAILSAANPTSAAGSES

SEQ ID NO: 285380 - DNA, 3522 bp, Artificial Sequence
  derived and/or modified sequence
atgggtgatatggcgaacagctccatcgaatttcaccccaaaccccagcaacagcgtgacgtgccgcaggccgggggctttggctgtactctggcggagctgagaacactgatggaattaagaggggccgaggctctgcagaaaattgaggaagcgtatggggacgtgtccggcctatgtagaagactaaagacgtctccaacagaaggtttggccgataacactaacgatctggaaaaaagaaggcaaatctatgggcaaaactttataccacccaagcagccgaagaccttcctgcaactggtgtgggaagcactacaggatgtcactctcataatcctcgaggttgcagctatcgtctccctgggcctgtcattttatgcccctcctggcgaggaaagcgaggcttgtggcaatgtgtcaggcggcgccgaagacgaaggtgaagccgaagccggctggatagaaggtgctgcaatcctactgagtgtgatatgcgtcgtcctggtgactgccttcaatgattggagcaaagagaagcaattcagaggcctccagtcgcgtatcgaacaggaacagaaattcactgtaatccggaacggacaacttctccaagtgcccgttgctgccctggtggtcggagatatcgctcaggtcaaatacggggatctcttgccagcagacggcgttctgatccaagcaaacgacctgaaaattgatgagagctccctcacaggtgagtcagaccatgtccgcaaaagcgcagacaaggaccctatgcttctgagcggcactcacgttatggagggatcaggcaggatggtagttacagccgttggcgtcaactcgcaaaccggaattatctttaccctgctgggtgccggcggagaggaggaagagaagaaagacaaaaagggcaagcagcaggacggggccatggagtccagccagacaaaagccaagaagcaggacggcgccgtggctatggagatgcagcctcttaaaagcgctgagggaggggagatggaggagagagagaaaaaaaaagccaacgcacctaaaaaagaaaagtcagtcttgcagggcaaactgaccaaattggccgtgcagattggaaaggcaggactcgttatgtcagctattaccgttattatcctggtgttgtattttgtaattgagacattcgttgtagaagggcgaacgtggttggccgagtgcactcccgtttacgtccagtattttgtgaaattcttcataatcggcgtcacagtcctcgtggtggcagtaccagagggcctgccgcttgccgtgacaatatctctggcttacagcgtaaagaaaatgatgaaagataacaatcttgtcagacacctcgacgcctgcgagacaatgggaaatgctacggctatatgttctgataaaacgggaaccctaacgaccaatcggatgactgtagtccagtcttacctgggcgacacgcattacaaagagatacccgcaccaagcgccctaactcctaaaatccttgacttacttgtccacgccatctctatcaactccgcctacactacaaagattctgccacccgagaaggaaggcgctctccctcgccaagttgggaacaagaccgagtgcgcacttctgggttttgtcctggacctcaagagagacttccagccagtgcgcgagcaaattcccgaagataagctgtacaaggtgtacactttcaattccgtgcggaagtctatgagcactgtcattcgcatgcccgacggcggcttcagattgttctccaaaggagcctctgagattctgctgaaaaaatgtaccaacatcctgaattccaacggggagctgaggggctttaggccacgggatcgggacgacatggtgaggaaaatcattgagcctatggcgtgcgatggcttgcgcactatttgtattgcctaccgggactttagcgccggacaggagcccgactgggacaatgagaacgaggtggtgggggaccttacctgtattgccgtcgtgggaattgaagatcccgttcgcccagaagtgccagaggcaatacgcaaatgtcagcgggccggtatcaccgtccggatggtgacgggcgataacatcaacactgctagagcaatcgccgccaaatgtggaattatccagcctggagaggactttttgtgcctggaaggaaaggagttcaaccggaggatacgcaatgagaagggggagattgaacaggagagactggacaaagtgtggcctaagttgagggtgctcgcccggagctcccccacggataagcataccttggtgaaaggcattattgacagtactacaggggagcagaggcaagtggtcgcagtcacaggagacggaacaaacgatggcccagcgctgaaaaaggcagatgtgggctttgcaatgggtatagccgggaccgatgtggctaaggaagctagcgatatcattctgacggatgataacttcacgagcatagtcaaagcagttatgtggggtaggaacgtgtacgattctattagcaagtttctccaattccagttaacagtcaatgtggtagctgtcatcgtggctttcacaggagcctgtatcactcaagactcccccttaaaagccgtccaaatgttgtgggtgaacctaattatggatacctttgctagccttgccttagccacagagccgcccactgaatcactgctgcttagaaagccatatggaagagacaaaccactcatttcaagaaccatgatgaaaaacatcctgggacacgccgtgtaccagctcgctatcatttttaccctcctatttgtaggtgagctcttctttgatatagacagcggcagaaatgcccctctccacagtcctccttcagagcattatactatcatattcaatacatttgtgatgatgcagctcttcaatgagattaacgcacgaaagatccatggtgagcgtaacgtttttgatggaatctttagcaaccccatattttgtacaattgtgttaggcacttttggcatccaaattgtaatcgtccagtttggcggcaagccgttttcctgcagccctttaagcactgagcagtggctctggtgcctctttgtaggcgtaggggaattagtttggggacaagtcatagccacgatccccacatctcaactgaaatgtttgaaggaggccgggcatggccccggcaaagacgagatgaccgatgaggaattggccgagggcgaggaggaaattgatcacgctgaaagggagcttcgcaggggtcaaatcctctggtttcgcggactgaaccgcatccagactcagatggaagttgtgtcaacattcaagcgctccggctcggtacagggggccgtgaggcggcgctcaagcgtactgagccagctgcacgacgtaacaaacttgtccactcccacgcacgcgatactctctgccgcaaatcctacgtccgccgcgggcaacccaggaggcgaaagcgttccttag

SEQ ID NO: 285381 - DNA, 3480 bp, Artificial Sequence
  derived and/or modified sequence
atgggggacatggctaactcatctatcgaatttcatcccaagccgcagcagcagagggatgtaccccaagccggcggattcggctgcaccctggctgaactacgtacactaatggagttgaggggggcagaggccctgcagaagattgaagaggcatatggggatgtgagtggattgtgccgacggcttaaaaccagcccaacagagggtctcgcagacaatactaatgacctggaaaagaggagacagatttatggtcagaatttcatcccaccgaaacaaccaaaaacctttctacaactggtttgggaggctcttcaggacgtcaccctgatcatcttagaggtggcagcgatcgtgtctctcgggctctctttctatgcaccacccggcgaagagtccgaggcctgtggtaacgtcagcggtggcgcggaagatgagggtgaagcagaggctggatggatcgagggcgctgccatccttctgtccgttatttgcgtcgttcttgtgactgctttcaatgattggtcaaaggagaaacagtttcgcgggctgcagagccggatcgagcaagagcagaagtttactgttatccggaatgggcagctgctgcaggtaccagtggcagccctggtggttggcgatatcgcccaggtaaagtatggagatttactgcccgccgacggggtgctcattcaagcaaatgacctaaagatagacgagtcaagcttgactggggaatctgaccatgttagaaagtctgccgataaggatcctatgctgctgtccggcactcacgtcatggagggcagcggcaggatggtcgtcacagctgtaggggtcaactcccaaaccggcattatctttacacttctcggagctggcggggaggaggaggagaagaaggacaaaaaagccaaaaagcaggacggagcagttgccatggaaatgcagcccctgaaaagcgcagaagggggcgaaatggaggagcgcgaaaagaaaaaagctaacgcccccaaaaaggaaaaatccgtcctccaaggcaagcttaccaaactggctgtgcagatcggaaaggcgggactggtcatgtcagctattactgtaatcatcctcgtgttatattttgtgatagagacatttgtggtggagggaaggacttggctggcggaatgtacgccggtttacgtgcagtatttcgtgaagttcttcattattggagtgacggtcctggtggtcgcggtccccgaagggctgcccttagcagtaacgattagcttggcctattcagtcaagaagatgatgaaggacaataatctcgtgaggcacctcgatgcatgcgagaccatgggaaatgcaacagcaatctgctcagacaaaactggaactctgacaacaaaccggatgactgtggtgcagagctatctgggtgatactcactacaaggagatccccgcccctagcgcactgacgcccaaaattttagatttgttggtacacgccatttcaattaactcggcttacactacgaaaatcttaccaccagaaaaagaaggggccttaccccggcaggtgggaaataagaccgagtgcgcgctgttaggatttgttcttgaccttaagagggatttccagccagttagagagcagatcccagaggacaagctgtacaaggtgtatacattcaactccgtccgaaagtctatgtccaccgttatccgaatgcctgatggcggattcagactgttctccaaaggagcctctgagattcttctgaagaaatgcactaatattttaaatagcaatggcgaactcagaggctttaggccccgggacagggacgatatggtcaggaaaatcattgaacccatggcctgtgacgggctacggaccatatgtatcgcttatcgagacttctctgccgggcaggagccagactgggacaacgagaacgaggtggtcggagatttaacttgcattgctgtggtgggaatcgaggaccccgttcggccagaggtacctgaggccataagaaagtgtcaaagagcaggcataacggtcaggatggtcacaggcgataacatcaacactgcccgggccattgccgccaaatgtggaatcatacaacccggtgaggattttctgtgcctggaaggcaaggagttcaatcgacgcattcgaaatgagaagggcgagatcgagcaggaaaggctggataaagtttggccaaagctgcgcgttctggccagatctagccccaccgacaagcatactctggtaaagggaatcatcgactcaactaccggagagcagcggcaggtagtggctgtgaccggagacggcacaaatgacggacccgccctcaaaaaagccgacgttggtttcgcgatggggatcgcaggcaccgacgtcgcaaaggaagctagtgatattattcttacagatgataattttacctctatcgtcaaagcagtaatgtgggggagaaacgtctatgactcgatatctaagtttttgcagtttcagctaacagtaaacgtagtcgctgtgatcgtggctttcaccggcgcatgcatcactcaggattctcccctgaaagccgtccagatgctgtgggtgaacctaataatggatacgtttgcaagcctggccctcgcaacggaacctcctacagagtcgctgctgctaagaaagccctacggcagagataaaccactaatcagtcgcactatgatgaagaatatactcggtcacgctgtgtatcagttggcaattatcttcactttgctgtttgtgggggagcttttcttcgacattgatagtggtaggaatgctccccttcattctccacccagtgagcactacactatcatatttaatacattcgttatgatgcagcttttcaatgagattaatgccaggaagatccacggggaacggaatgtcttcgacggcatattttcaaatccaatcttctgtaccattgtgttagggacatttgggatacagatagtgattgtccagtttggggggaagccattctcctgttcccctctctctactgaacaatggttgtggtgcctgtttgttggcgtcggggaattagtgtggggccaagtgattgccaccattcccacttctcagctcaagtgcttgaaggaggcaggccatggcccaggaaaggatgagatgactgatgaggagctggccgagggcgaagaggagatcgaccatgccgaaagggaactgcggcgtgggcaaatactgtggttccgcggactcaatcgcattcagactcaaatggaagtggtgtcgacatttaagagatccgggtccgttcaaggagctgttcggagaaggagtagcgtactctctcagcttcacgacgtaaccaacttgtccacccctacacacgcaatcttaagcgcagcaaatcccacatctgctgccggtaatccggggggcgagagtgttccatag

SEQ ID NO: 285382 - DNA, 3480 bp, Artificial Sequence
  derived and/or modified sequence
atgggagacatggcaaacagtagtatcgagtttcatccaaaaccacagcagcaacgcgatgtgccacaggcaggtggtttcgggtgcacattggcggagctccgaactctgatggagctaagaggagctgaggcactgcaaaaaattgaggaggcatatggagacgtgtccgggctctgtaggagactgaagacgagcccgactgaaggactggccgacaatacaaacgacctggagaagcgccgacagatttatgggcagaatttcatcccaccgaaacaacccaaaacgttcctccagttagtctgggaggccctgcaagacgtcaccttgatcatattggaggttgccgcaatcgtgtccctggggctctcattttatgcaccacccggcgaagagagtgaagcctgcggtaatgtttccggtggcgccgaggacgaaggggaggctgaagccggctggattgaaggcgccgcaattttgttaagcgtcatctgtgtggtgttagtgacagccttcaacgattggtcaaaagagaaacagtttcgcggtctgcaatcccggattgagcaggaacagaaattcaccgttatccgaaacggccagcttttgcaggtgcccgtagctgccttggtggtcggcgacattgctcaggtgaaatacggcgatcttctgcccgccgatggagtgctaatccaggctaatgacctcaaaatagatgaatctagcctgacgggcgagtccgaccacgtaagaaaatcagcagacaaagatccgatgttgctgagcgggacacacgtcatggagggcagcgggcgtatggtcgtcaccgcagtgggggtcaactcacagactggcatcattttcactctcttgggagctggcggcgaagaggaggagaaaaaggataagaaggccaagaagcaggacggagccgtcgccatggaaatgcagcccctgaaatccgccgagggcggagagatggaggagagagagaagaaaaaggccaacgcccctaaaaaggagaagtctgtactccaagggaagttgactaagctggccgtacaaatcggcaaggccggactggtcatgtcagcaatcacagtgattatcctcgtattatactttgtgatcgaaacattcgtggtcgaggggcgcacctggctggcagaatgcacaccggtatacgtgcagtattttgtcaaattcttcataattggggtgacagtgctcgtggtggccgtgcctgagggcttgcctctggccgttacaatttcactggcctactccgtcaagaaaatgatgaaggataacaatctggtgcgacacctggacgcttgtgagaccatgggcaacgcgaccgcaatctgctccgacaagactggcactttaaccactaacagaatgacagtggttcagagctatctcggggacacccattataaagaaatacccgcacccagcgccctgacccctaaaattctggacctgcttgtccacgcgatcagcattaattctgcttataccaccaaaatcctccccccagagaaggagggggctctgcccagacaggtgggaaataagacagagtgtgctttgctgggctttgtgttagacctcaaaagagatttccagccagtgagggaacaaatcccagaagacaaactgtacaaggtctacactttcaattctgtcagaaaaagcatgtcaaccgttatcagaatgccagatggcggcttcaggctctttagtaaaggagcttcagaaatcctgctgaaaaaatgcactaacatcctgaacagtaacggagagctgcggggattcaggccgcgcgaccgggatgatatggtgcgtaagatcatagaacccatggcatgtgatggactccgaactatctgcatcgcatatcgagatttcagcgcagggcaggaacccgactgggacaacgaaaacgaggtggttggggatctgacatgtattgccgttgtgggcattgaagaccccgttagaccagaggttccagaagccatccgcaagtgccagcgcgctggcattactgttcgcatggttaccggcgacaacattaatacagcccgggctattgcggccaagtgcggcattatccaaccgggagaggacttcttgtgtctggagggcaaagaatttaataggcgcattcgcaacgagaagggtgagatcgaacaggaacgcctggacaaggtgtggcccaaactgcgcgtgttggcccggagtagcccgaccgataagcacacgctggtaaagggaatcatagactccaccacgggcgaacaacgacaggtggtggcagtgaccggcgacgggactaatgacggccccgctctaaagaaagctgacgttgggttcgccatgggtatcgcggggacggatgtggcgaaagaggcaagcgacataatactgaccgacgacaactttactagcatcgtgaaggcggttatgtggggacgcaacgtgtatgactcaatctccaagttcctgcagttccagcttactgtgaacgtggtggcagttatcgtcgcttttactggagcatgcattacgcaagactccccccttaaggctgtgcagatgctctgggttaacctcatcatggatacgttcgcctccttggcactcgctaccgagccacccaccgaatcgttgctactccggaagccctatggaagagacaaaccactgatctcgagaaccatgatgaagaatatcctgggacacgcagtgtatcagttggcgataatcttcaccctgctgttcgtaggagagttgttctttgatatcgatagtggacggaatgcccccctccactcacctccttccgagcattatacaataatcttcaacacgtttgtgatgatgcagttatttaacgaaatcaacgcgcgtaagatccacggagagcgtaatgtcttcgatggtatcttctctaaccctatcttctgcaccatcgtgctgggaacatttgggatccagatcgtcatcgtgcagtttgggggcaaaccattctcctgttcaccattgtccactgaacaatggttatggtgcctgtttgtgggggtgggtgaactggtctggggtcaggtgatcgctactatacccactagtcagttaaagtgcttaaaggaggctggccacggtccaggaaaggatgaaatgacagacgaggagctggctgagggggaggaagagatcgatcacgccgaacgggaattaaggcgaggtcagattctttggttccggggacttaaccgcatccagactcagatggaagtggtgtctacctttaaacgcagtggctccgtgcagggtgcagttcggagacggtctagcgtgttgagccagctgcatgacgttaccaacctgtccaccccaactcacgcaattctttctgcggctaatcccacatccgcagctgggaatcccgggggagagtccgtaccttag

SEQ ID NO: 285383 - DNA, 3465 bp, Artificial Sequence
  derived and/or modified sequence
atgggggatatggccaattcctccattgagtttcaccctaagccacaacagcagagggacgtgccccaggcaggcggcttcgggtgtaccctggcagagctccgtacactaatggagcttcgtggggcagaggccctgcagaagatcgaagaagcttacggggacgttagcggactttgtaggagacttaagacttctcccaccgagggcctggcagataataccaacgatcttgagaaacgcaggcagatctacggacaaaatttcatcccccctaaacagcccaaaacgtttttacagcttgtgtgggaagccctgcaggatgtcactttgattattctcgaagtagcagcaatcgtgtcccttggtttgagcttctacgcccctccaggggaagagtctgaggcttgcgggaacgtgagcggtggagcagaagatgagggggaagccgaggctggttggatcgagggcgcagctattctgctgagtgtcatctgtgttgtgctagtgacagccttcaatgattggtcaaaagagaaacagttcaggggcctccaatccaggattgagcaagaacagaaattcacagtgatccgaaacggtcaactcctgcaggtgcctgtggcggctctggtggtgggcgatatcgctcaggtgaagtacggcgaccttttaccggcagacggcgtcttgatccaggccaacgacctgaagatagacgaatcgtcactgaccggcgaatctgaccacgtgcggaaatctgccgataaagacccaatgctactaagtggaactcacgttatggagggatctggtagaatggtcgtcaccgctgtcggcgtcaattcacagacggggataattttcacactgctaggagccggaggggaagaagaggaaaaaaaggacaaaaaagcaaagaagcaagacggggcagtggcgatggagatgcagcctctcaagtccgccgagggtggagaaatggaggagcgtgagaaaaagaaagccaacgcccccaaaaaagaaaaatctgtacttcagggcaagttgactaagcttgctgtgcaaatcggaaaggctggtctggtcatgtccgccataacagtcataatcttggtgctgtacttcgtgatagagacgtttgtggttgaagggagaacatggctagcggagtgcacacccgtgtacgtccagtacttcgttaagttcttcatcataggagtcaccgtcctggtcgtggccgtgccggaaggactaccactggcagtgaccatctccctcgcatattcagtcaagaagatgatgaaagacaataacctggtccggcatctggatgcatgtgagaccatggggaatgccactgccatttgctccgacaaaacgggaaccctgacgaccaatcgcatgacagttgtgcagagctacctcggagatacccattataaagaaattccggcgccgtctgcgctgacaccaaagattcttgacctgctggtccatgccatttccatcaactccgcatacactaccaagatcctgccacctgaaaaagagggtgccctcccgcgccaggtggggaacaagacggaatgcgccctgctgggttttgtcctcgatctcaagagggatttccaaccagtgcgcgagcaaatccctgaggacaagctgtacaaggtttacaccttcaatagcgtccggaagtctatgagcacagtgatccgaatgcctgatggcggttttaggctctttagcaaaggagccagcgaaattttactgaaaaagtgcactaacattctcaatagcaacggtgagctacgggggtttcgccctagagaccgcgacgatatggtgcgcaagattatagagccaatggcatgtgacggactgagaacgatctgcatcgcttatagggatttctccgctggacaggaaccggattgggataacgagaacgaggtcgtgggtgacctgacatgtatagcggtcgtcggtatcgaggaccctgtgaggccggaggtccctgaggccatccggaagtgccagcgagctggcataacagtacggatggtgactggcgacaacatcaacaccgctcgtgccatcgccgctaaatgtggcatcatccaacctggagaagactttctgtgtctcgagggcaaggagttcaaccggaggatccggaatgagaaaggggaaatcgaacaggaaagactggacaaagtgtggcctaagctgagagtcctcgcccggtcatccccaacggacaaacacactctcgtgaaagggatcatcgactctaccactggcgaacaacgacaggtcgtcgctgtgacgggcgatggcacaaacgacggacccgctctgaaaaaggcggacgtgggatttgccatgggcattgcgggcaccgacgttgccaaggaggcatctgatatcatactcacagacgataatttcacctcgattgtcaaagccgtaatgtggggaaggaatgtgtatgactccatatcaaagttcctgcagtttcagctaacggtgaatgtggtagccgtgattgtcgccttcaccggagcttgtattacacaggactctcctttgaaggccgtgcagatgctgtgggtgaatttgataatggacacttttgcctctctggcactggctactgaacctcctactgaatcccttctgctgcgaaaaccttacggccgagataagcctctcattagtcgcacaatgatgaagaatattctgggccacgctgtttatcaactggccattattttcactctcctgtttgtcggagagctgttttttgacatcgacagcgggcggaatgccccactgcacagtcccccatcagagcactacactattatattcaacactttcgtgatgatgcaattattcaatgaaatcaacgcccgtaagatacatggggaacgtaacgtgtttgatgggatcttcagtaaccccatcttttgcaccatcgtgctcggaacctttggaatccagatcgtaattgtccaatttggcgggaagcccttctcttgctcacctctgagcaccgagcagtggctgtggtgtctgttcgttggagtgggggagctcgtgtggggccaagtgattgcaacaattcccacctcccagctgaagtgcctgaaagaggccggtcatggccccggaaaggacgagatgaccgacgaggagctcgccgagggggaagaggagatcgatcacgctgaaagagagctcaggagaggtcaaatcctctggttccgcggcctgaatcgcattcagactcaaatggaagtagtgagcactttcaaacgcagcgggtccgtgcagggagcggtgcgccgacggagctctgtgctatctcaactccacgacgtcactaatctctccacacccacacacgcgatcctgagtgccgctaacccaaccagcgcagccggttctgagagctag

SEQ ID NO: 285384 - DNA, 3522 bp, Artificial Sequence
  derived and/or modified sequence
atgggagacatggccaacagcagcattgagttccaccccaagccccagcagcagagagatgtgccccaggccggcggcttcggctgcaccctggccgagctgcggaccctgatggagctgcggggagctgaggccctgcagaagattgaggaggcctatggagatgtgtctggcctgtgccggcggctgaagaccagccccacagagggcctggccgacaacaccaatgacctggagaagaggcggcagatctacggccagaacttcatcccccccaagcagcccaagaccttcctgcagctggtgtgggaggccctgcaggatgtgaccctcatcatcctggaggtggccgccatcgtgtccctgggcctgtccttctacgcccctcctggagaggagagcgaggcctgtggaaatgtgtctggaggagcagaagatgaaggagaggccgaggccggctggattgaaggagctgccatcctgctgagcgtcatctgtgtggtgctggtgacagccttcaatgactggagcaaggagaagcagttccggggcctgcagagcagaattgagcaggagcagaagttcaccgtcatcagaaatggccagctgctgcaggtgcctgtggccgccctggtggtgggggacatcgcccaggtgaagtatggagacctgctgcctgcagatggagtgctgatccaggccaatgacctgaagattgatgagagcagcctgactggagagagtgaccacgtgaggaagtctgctgacaaggaccccatgctgctgagcggcacccacgtgatggagggcagcggccgcatggtggtgacagctgtgggcgtgaacagccagacaggcatcatcttcaccctgctgggcgctggaggagaggaggaggagaagaaggacaagaagggcaagcagcaggatggagccatggagagcagccagaccaaggccaagaagcaggatggagctgtggccatggagatgcagcccctgaagtctgctgagggcggggagatggaggagcgggagaagaagaaggccaatgcccccaagaaggagaagtctgtgctgcagggcaagctgaccaagctggccgtgcagatcggcaaggccggcctggtgatgtctgccatcaccgtcatcatcctggtgctgtacttcgtcatcgagacctttgtggtggagggccgcacctggctggctgaatgtacccctgtgtatgtgcagtactttgtgaagttcttcatcatcggcgtgacagtgctggtggtggccgtgcctgagggcctgcccctggccgtgaccatcagcctggcctacagcgtgaagaagatgatgaaggacaacaacctggtgcgccacctggatgcctgtgagaccatgggaaatgccacagccatctgcagcgacaagacaggcaccctgaccaccaacaggatgacagtggtgcagagctacctgggggacacccactacaaggagatcccagcccccagcgccctgacccccaagatcctggacctgctggtgcacgccatcagcatcaacagcgcctacaccaccaagatcctgcccccagagaaggagggcgccctgccccggcaggtgggcaacaagacagaatgtgccctgctgggctttgtgctggacctgaagagggacttccagcctgtgcgggagcagatccctgaggacaagctgtacaaggtgtacaccttcaacagcgtgaggaagtccatgagcaccgtcatccgcatgccagatggcggcttccgcctcttcagcaaaggagccagcgagatcctgctgaagaagtgcaccaacatcctgaacagcaatggagagctgcggggcttccggccccgggacagagatgacatggtgaggaagatcatcgagcccatggcctgtgatggcctgcggaccatctgcatcgcctacagagacttctctgctggccaggagccagactgggacaatgaaaatgaggtggtgggggacctgacctgcatcgctgtggtgggcatcgaggaccctgtgcggcctgaggtgcctgaggccatcaggaagtgccagagagctggcatcaccgtgaggatggtgactggagacaacatcaacacagcccgggccatcgccgccaagtgtggcatcatccagcccggggaggacttcctgtgcctggagggcaaggagttcaacagacgcatcagaaatgagaagggggagattgagcaggagcggctggacaaggtgtggcccaagctgcgggtgctggcccggagcagccccacagacaagcacaccctggtgaagggcatcatcgacagcaccaccggggagcagaggcaggtggtggccgtgactggagatggcaccaatgatggccctgccctgaagaaggcagatgtgggctttgccatgggcattgctggaacagatgtggccaaggaggccagtgacatcatcctgacagatgacaacttcaccagcatcgtgaaggctgtgatgtggggcagaaatgtgtatgacagcatcagcaagttcctgcagttccagctgactgtgaatgtggtggccgtgattgtggccttcaccggggcctgcatcacccaggacagccccctgaaggctgtgcagatgctgtgggtgaacctgatcatggacacctttgccagcctggccctggccacagagcccccaacagagagcctgctgctgaggaagccctacggccgggacaagcccctcatcagcaggaccatgatgaagaacatcctgggccatgctgtgtaccagctggccatcatcttcaccctgctgtttgtgggggagctgttctttgatattgattctggaagaaatgcccccctgcacagcccccccagcgagcactacaccatcatcttcaacacctttgtgatgatgcagctgttcaatgagatcaatgccaggaagatccatggagagagaaatgtgtttgatggcatcttcagcaaccccatcttctgcaccatcgtgctgggcaccttcggcatccagatcgtcatcgtgcagtttggaggcaagcccttcagctgcagccccctgagcacagagcagtggctgtggtgcctgtttgtgggcgtgggggagctggtgtggggccaggtgattgccaccatccccaccagccagctgaagtgcctgaaggaggccggccacggccctgggaaggatgagatgacagatgaggagctggccgagggggaggaggagattgaccatgctgagcgggagctgcggcggggccagatcctgtggttccggggcctgaaccgcatccagacccagatggaggtggtgtccaccttcaagaggagcggctctgtgcagggcgctgtgagaagaagaagctctgtgctgagccagctgcatgatgtgaccaacctgagcacccccacccacgccatcctgtctgctgccaaccccaccagcgctgctggcaaccctggaggagagagcgtgccctag

SEQ ID NO: 285385 - DNA, 3480 bp, Artificial Sequence
  derived and/or modified sequence
atgggagacatggccaacagcagcattgagttccaccccaagccccagcagcagagagatgtgccccaggccggcggcttcggctgcaccctggccgagctgcggaccctgatggagctgcggggagctgaggccctgcagaagattgaggaggcctatggagatgtgtctggcctgtgccggcggctgaagaccagccccacagagggcctggccgacaacaccaatgacctggagaagaggcggcagatctacggccagaacttcatcccccccaagcagcccaagaccttcctgcagctggtgtgggaggccctgcaggatgtgaccctcatcatcctggaggtggccgccatcgtgtccctgggcctgtccttctacgcccctcctggagaggagagcgaggcctgtggaaatgtgtctggaggagcagaagatgaaggagaggccgaggccggctggattgaaggagctgccatcctgctgagcgtcatctgtgtggtgctggtgacagccttcaatgactggagcaaggagaagcagttccggggcctgcagagcagaattgagcaggagcagaagttcaccgtcatcagaaatggccagctgctgcaggtgcctgtggccgccctggtggtgggggacatcgcccaggtgaagtatggagacctgctgcctgcagatggagtgctgatccaggccaatgacctgaagattgatgagagcagcctgactggagagagtgaccacgtgaggaagtctgctgacaaggaccccatgctgctgagcggcacccacgtgatggagggcagcggccgcatggtggtgacagctgtgggcgtgaacagccagacaggcatcatcttcaccctgctgggcgctggaggagaggaggaggagaagaaggacaagaaggccaagaagcaggatggagctgtggccatggagatgcagcccctgaagtctgctgagggcggggagatggaggagcgggagaagaagaaggccaatgcccccaagaaggagaagtctgtgctgcagggcaagctgaccaagctggccgtgcagatcggcaaggccggcctggtgatgtctgccatcaccgtcatcatcctggtgctgtacttcgtcatcgagacctttgtggtggagggccgcacctggctggctgaatgtacccctgtgtatgtgcagtactttgtgaagttcttcatcatcggcgtgacagtgctggtggtggccgtgcctgagggcctgcccctggccgtgaccatcagcctggcctacagcgtgaagaagatgatgaaggacaacaacctggtgcgccacctggatgcctgtgagaccatgggaaatgccacagccatctgcagcgacaagacaggcaccctgaccaccaacaggatgacagtggtgcagagctacctgggggacacccactacaaggagatcccagcccccagcgccctgacccccaagatcctggacctgctggtgcacgccatcagcatcaacagcgcctacaccaccaagatcctgcccccagagaaggagggcgccctgccccggcaggtgggcaacaagacagaatgtgccctgctgggctttgtgctggacctgaagagggacttccagcctgtgcgggagcagatccctgaggacaagctgtacaaggtgtacaccttcaacagcgtgaggaagtccatgagcaccgtcatccgcatgccagatggcggcttccgcctcttcagcaaaggagccagcgagatcctgctgaagaagtgcaccaacatcctgaacagcaatggagagctgcggggcttccggccccgggacagagatgacatggtgaggaagatcatcgagcccatggcctgtgatggcctgcggaccatctgcatcgcctacagagacttctctgctggccaggagccagactgggacaatgaaaatgaggtggtgggggacctgacctgcatcgctgtggtgggcatcgaggaccctgtgcggcctgaggtgcctgaggccatcaggaagtgccagagagctggcatcaccgtgaggatggtgactggagacaacatcaacacagcccgggccatcgccgccaagtgtggcatcatccagcccggggaggacttcctgtgcctggagggcaaggagttcaacagacgcatcagaaatgagaagggggagattgagcaggagcggctggacaaggtgtggcccaagctgcgggtgctggcccggagcagccccacagacaagcacaccctggtgaagggcatcatcgacagcaccaccggggagcagaggcaggtggtggccgtgactggagatggcaccaatgatggccctgccctgaagaaggcagatgtgggctttgccatgggcattgctggaacagatgtggccaaggaggccagtgacatcatcctgacagatgacaacttcaccagcatcgtgaaggctgtgatgtggggcagaaatgtgtatgacagcatcagcaagttcctgcagttccagctgactgtgaatgtggtggccgtgattgtggccttcaccggggcctgcatcacccaggacagccccctgaaggctgtgcagatgctgtgggtgaacctgatcatggacacctttgccagcctggccctggccacagagcccccaacagagagcctgctgctgaggaagccctacggccgggacaagcccctcatcagcaggaccatgatgaagaacatcctgggccatgctgtgtaccagctggccatcatcttcaccctgctgtttgtgggggagctgttctttgatattgattctggaagaaatgcccccctgcacagcccccccagcgagcactacaccatcatcttcaacacctttgtgatgatgcagctgttcaatgagatcaatgccaggaagatccatggagagagaaatgtgtttgatggcatcttcagcaaccccatcttctgcaccatcgtgctgggcaccttcggcatccagatcgtcatcgtgcagtttggaggcaagcccttcagctgcagccccctgagcacagagcagtggctgtggtgcctgtttgtgggcgtgggggagctggtgtggggccaggtgattgccaccatccccaccagccagctgaagtgcctgaaggaggccggccacggccctgggaaggatgagatgacagatgaggagctggccgagggggaggaggagattgaccatgctgagcgggagctgcggcggggccagatcctgtggttccggggcctgaaccgcatccagacccagatggaggtggtgtccaccttcaagaggagcggctctgtgcagggcgctgtgagaagaagaagctctgtgctgagccagctgcatgatgtgaccaacctgagcacccccacccacgccatcctgtctgctgccaaccccaccagcgctgctggcaaccctggaggagagagcgtgccctag

SEQ ID NO: 285386 - DNA, 3465 bp, Artificial Sequence
  derived and/or modified sequence
atgggagacatggccaacagcagcattgagttccaccccaagccccagcagcagagagatgtgccccaggccggcggcttcggctgcaccctggccgagctgcggaccctgatggagctgcggggagctgaggccctgcagaagattgaggaggcctatggagatgtgtctggcctgtgccggcggctgaagaccagccccacagagggcctggccgacaacaccaatgacctggagaagaggcggcagatctacggccagaacttcatcccccccaagcagcccaagaccttcctgcagctggtgtgggaggccctgcaggatgtgaccctcatcatcctggaggtggccgccatcgtgtccctgggcctgtccttctacgcccctcctggagaggagagcgaggcctgtggaaatgtgtctggaggagcagaagatgaaggagaggccgaggccggctggattgaaggagctgccatcctgctgagcgtcatctgtgtggtgctggtgacagccttcaatgactggagcaaggagaagcagttccggggcctgcagagcagaattgagcaggagcagaagttcaccgtcatcagaaatggccagctgctgcaggtgcctgtggccgccctggtggtgggggacatcgcccaggtgaagtatggagacctgctgcctgcagatggagtgctgatccaggccaatgacctgaagattgatgagagcagcctgactggagagagtgaccacgtgaggaagtctgctgacaaggaccccatgctgctgagcggcacccacgtgatggagggcagcggccgcatggtggtgacagctgtgggcgtgaacagccagacaggcatcatcttcaccctgctgggcgctggaggagaggaggaggagaagaaggacaagaaggccaagaagcaggatggagctgtggccatggagatgcagcccctgaagtctgctgagggcggggagatggaggagcgggagaagaagaaggccaatgcccccaagaaggagaagtctgtgctgcagggcaagctgaccaagctggccgtgcagatcggcaaggccggcctggtgatgtctgccatcaccgtcatcatcctggtgctgtacttcgtcatcgagacctttgtggtggagggccgcacctggctggctgaatgtacccctgtgtatgtgcagtactttgtgaagttcttcatcatcggcgtgacagtgctggtggtggccgtgcctgagggcctgcccctggccgtgaccatcagcctggcctacagcgtgaagaagatgatgaaggacaacaacctggtgcgccacctggatgcctgtgagaccatgggaaatgccacagccatctgcagcgacaagacaggcaccctgaccaccaacaggatgacagtggtgcagagctacctgggggacacccactacaaggagatcccagcccccagcgccctgacccccaagatcctggacctgctggtgcacgccatcagcatcaacagcgcctacaccaccaagatcctgcccccagagaaggagggcgccctgccccggcaggtgggcaacaagacagaatgtgccctgctgggctttgtgctggacctgaagagggacttccagcctgtgcgggagcagatccctgaggacaagctgtacaaggtgtacaccttcaacagcgtgaggaagtccatgagcaccgtcatccgcatgccagatggcggcttccgcctcttcagcaaaggagccagcgagatcctgctgaagaagtgcaccaacatcctgaacagcaatggagagctgcggggcttccggccccgggacagagatgacatggtgaggaagatcatcgagcccatggcctgtgatggcctgcggaccatctgcatcgcctacagagacttctctgctggccaggagccagactgggacaatgaaaatgaggtggtgggggacctgacctgcatcgctgtggtgggcatcgaggaccctgtgcggcctgaggtgcctgaggccatcaggaagtgccagagagctggcatcaccgtgaggatggtgactggagacaacatcaacacagcccgggccatcgccgccaagtgtggcatcatccagcccggggaggacttcctgtgcctggagggcaaggagttcaacagacgcatcagaaatgagaagggggagattgagcaggagcggctggacaaggtgtggcccaagctgcgggtgctggcccggagcagccccacagacaagcacaccctggtgaagggcatcatcgacagcaccaccggggagcagaggcaggtggtggccgtgactggagatggcaccaatgatggccctgccctgaagaaggcagatgtgggctttgccatgggcattgctggaacagatgtggccaaggaggccagtgacatcatcctgacagatgacaacttcaccagcatcgtgaaggctgtgatgtggggcagaaatgtgtatgacagcatcagcaagttcctgcagttccagctgactgtgaatgtggtggccgtgattgtggccttcaccggggcctgcatcacccaggacagccccctgaaggctgtgcagatgctgtgggtgaacctgatcatggacacctttgccagcctggccctggccacagagcccccaacagagagcctgctgctgaggaagccctacggccgggacaagcccctcatcagcaggaccatgatgaagaacatcctgggccatgctgtgtaccagctggccatcatcttcaccctgctgtttgtgggggagctgttctttgatattgattctggaagaaatgcccccctgcacagcccccccagcgagcactacaccatcatcttcaacacctttgtgatgatgcagctgttcaatgagatcaatgccaggaagatccatggagagagaaatgtgtttgatggcatcttcagcaaccccatcttctgcaccatcgtgctgggcaccttcggcatccagatcgtcatcgtgcagtttggaggcaagcccttcagctgcagccccctgagcacagagcagtggctgtggtgcctgtttgtgggcgtgggggagctggtgtggggccaggtgattgccaccatccccaccagccagctgaagtgcctgaaggaggccggccacggccctgggaaggatgagatgacagatgaggagctggccgagggggaggaggagattgaccatgctgagcgggagctgcggcggggccagatcctgtggttccggggcctgaaccgcatccagacccagatggaggtggtgtccaccttcaagaggagcggctctgtgcagggcgctgtgagaagaagaagctctgtgctgagccagctgcatgatgtgaccaacctgagcacccccacccacgccatcctgtctgctgccaaccccaccagcgctgctggcagcgagagctag

SEQ ID NO: 285387 - DNA, 3522 bp, Artificial Sequence
  derived and/or modified sequence
atgggcgacatggccaacagcagcatcgagttccaccccaagccccagcagcaaagggatgtcccgcaggctggaggctttggctgtaccctcgccgagctccgcacgctcatggaacttaggggcgctgaagctcttcagaagattgaggaggcgtatggtgacgttagtgggttatgccgccggctgaaaacctcaccgactgagggattagccgacaacacaaacgatctagagaagcggagacagatctatggacagaatttcattcctccaaaacagcctaaaacttttttgcagttggtgtgggaagctctgcaggatgtgaccctcatcattctggaggtggcagctatagtgtccctgggcttgagtttttacgcaccccccggtgaggagtccgaggcctgtggtaatgtttcagggggcgccgaggacgaaggcgaagccgaggctggctggatagagggagccgcaatcctcctaagtgtaatttgcgtggttctggtgacagctttcaatgattggtcaaaggaaaaacagttcagagggcttcagagccgaatcgaacaggaacaaaaattcacagtaatacggaacggccagctcctgcaggttcctgtggctgccttggtggtcggggacattgcccaggtaaagtacggagatttgctgccagccgatggggtattgatccaggcaaatgatctcaagatcgatgaatcctccttgaccggtgagagcgatcacgtacgcaagagtgcagacaaggatccaatgcttctgagcggcactcacgtgatggaaggtagcggcagaatggtcgtgactgcagttggcgtaaattcccagacaggcatcatcttcaccttactgggagccggtggagaagaagaggagaaaaaggataaaaagggaaagcagcaggatggcgctatggagtcatctcagactaaggctaagaaacaggatggcgcagttgcaatggagatgcagcctttaaagtctgctgaagggggcgagatggaagaaagagagaagaaaaaagctaacgctccaaagaaggaaaagtctgtgcttcaaggtaaacttacaaagctagcagttcagatcggaaaggccggcttggtgatgtcggccattacggtgattatcttagttctgtacttcgtgattgagactttcgttgtggaagggagaacatggctggcagaatgtacaccggtgtacgtgcagtacttcgtaaagttcttcatcataggcgtgaccgtgttggtggttgctgtgccagaaggcctcccgctggcagtcactatttcattggcttacagcgtcaagaagatgatgaaagataacaatctggtgcggcatcttgacgcttgcgagactatgggaaacgcgaccgccatttgctctgacaagaccgggacactgacaactaatcgcatgaccgtggtccagtcatacttgggggacacacattacaaggagatccctgccccaagtgcccttactcccaagatcctcgatctgttggtgcatgcaattagcataaactctgcatatactacaaaaatcctcccgcccgaaaaagaaggagctttgccaaggcaggttggcaataagacagaatgtgcgctgctggggttcgtgttagacctgaaaagagattttcaacctgtgagggagcagattccagaagataaactttataaagtgtacactttcaatagcgtgaggaaaagcatgtctactgtgatccgtatgcctgacggtggcttccggcttttctctaagggcgcttcagaaattctactgaaaaagtgcacaaacatcttaaactcgaatggcgagctgcgaggatttcgaccacgagatcgtgacgatatggtaaggaaaataattgaaccaatggcctgcgatgggcttaggactatctgcatcgcctacagagatttctctgctgggcaggagcctgactgggataacgagaatgaggtggtgggcgacctgacgtgtatcgcagtcgtcggcatcgaggacccggtgcgccccgaagtccctgaagcgatacgcaagtgccaaagggccggcatcaccgtaagaatggtcacaggggataatatcaataccgccagagctattgccgccaagtgtggcattatccagccaggcgaagatttcctttgccttgaagggaaagagtttaataggaggattcgcaacgagaagggggaaattgaacaggaacgcttggacaaggtgtggccaaaactgcgcgtgctggcccgttctagccctacagacaagcatacattggtgaaaggaataatcgactcaactaccggagagcagcgccaggtggtagcagttacaggggacggcactaacgatggccccgcgcttaaaaaagccgatgtcggatttgcaatgggcattgcaggcacggacgtggccaaggaggcttctgacatcatcttgacagacgataactttacttctatcgttaaagctgtgatgtggggacgaaacgtgtacgacagcatctccaagttcctccagtttcagttaacagttaatgtcgttgcagtgattgttgccttcacaggagcctgtattacccaggattcccctctcaaagccgtccagatgctctgggttaacctgatcatggacacatttgcatccttggccctcgccaccgagccaccaacggaaagcctcctcctcaggaagccgtacgggcgggataaacctctgatcagtaggaccatgatgaaaaatatcctcggacatgcagtgtatcaactcgcgattattttcaccctcctattcgttggtgaattattctttgacatcgactctggaaggaatgctccccttcacagccctccatcagagcattacacaattatcttcaacactttcgtgatgatgcaacttttcaatgaaattaatgccagaaagatccatggtgagcgtaatgtgtttgacggcattttcagcaatcccatattttgtacaattgtgctggggacgtttggaattcagattgttatcgtgcaatttggagggaaacccttcagctgcagtcccctgagcacagaacagtggctatggtgcctcttcgtcggtgtgggcgagttggtttggggccaggtgattgcgactattcccacaagccaactcaagtgcttaaaagaggcaggtcacggccctggcaaggacgagatgacggacgaggagctggctgagggcgaagaagaaatcgaccatgctgaacgagagctgaggaggggacagatcctgtggttccgaggcctcaatcggatccaaacccagatggaagtggtgtccacttttaagaggtctggcagtgttcaaggggctgtcaggagaaggtcttcagtcttgtcccagctgcatgacgtcacgaatctgagtacccccacacatgcaatcctcagcgccgccaaccccacctctgccgcgggaaaccctggcggagagagtgtgccctag

SEQ ID NO: 285388 - DNA, 3480 bp, Artificial Sequence
  derived and/or modified sequence
atgggcgacatggccaacagcagcatcgagttccaccccaagccccaacagcaaagggatgtgccacaggcaggagggtttggatgtactctggccgagcttcggacccttatggagctgaggggcgctgaagccctacagaagattgaagaagcctatggagatgttagcggtttatgccgacgtctcaagacttcaccgacggaaggactcgctgataacaccaacgacttagaaaaaagacggcagatctacggacagaacttcatcccaccaaaacaaccaaagacctttttgcagctggtctgggaggcccttcaggacgtgaccctgattatcctagaggtggcggccatcgtgtctctcggcctgtcattctatgcccctccaggagaggaaagtgaagcttgtggcaacgtaagtggaggagccgaggatgagggcgaggctgaggcaggttggatagaaggagccgctatcttactcagcgttatctgcgtggtgctcgtaacagccttcaatgactggagcaaggaaaagcaatttaggggcctgcaaagccggatcgagcaagagcagaaattcacagtaatccgcaatggccaactcctacaggttccggttgccgctctcgtggtaggggatatcgcccaggtgaagtatggcgacttgctgcccgccgatggagtgttgatacaggctaatgatctgaagatcgacgagtcttcactgactggggagtcagaccacgtccggaagtctgcagataaggatcctatgctgttaagtggtactcacgtcatggagggaagtggccgaatggttgtcacagcggtgggcgtgaacagtcagacggggataatcttcacgctccttggggcagggggagaggaagaggagaaaaaggataagaaggccaagaagcaggatggagcagttgctatggaaatgcaaccattaaaaagtgcagagggcggcgaaatggaagaacgagaaaaaaagaaagctaacgcacccaaaaaagagaagtctgtattgcagggaaaactgacaaaactcgctgtacagataggaaaggctggtctggtaatgtcagctattactgtgatcattctggtcctgtacttcgtaatagagactttcgtcgtggaaggccggacctggctggctgagtgcaccccggtgtatgtacaatattttgtaaaattcttcatcatcggcgtcactgtgctcgtggtggccgtccccgagggccttcccttagcagtgacaataagtctcgcctatagtgtcaagaaaatgatgaaggataacaaccttgtgagacatctcgatgcctgcgaaacaatggggaatgcaaccgctatctgttctgacaagacgggcaccctaaccactaatcgaatgaccgtcgtgcaaagctacctgggcgacacacactacaaagaaatcccggcgccttctgcccttacacccaaaatccttgatctgctggtccatgctatctctatcaactccgcctacaccaccaaaattctgccacccgagaaagaaggagcactgcctcgccaggtgggcaataagacagaatgtgcacttctcgggttcgtcctggacctgaagcgggactttcagcctgtgcgagagcagatacccgaggataaactgtataaagtctatacctttaacagcgtgcgcaagtcaatgtcgacggtcatccgtatgcctgacggaggctttcgcctgtttagcaaaggcgccagtgaaatccttctaaagaagtgcacgaatattttgaactccaatggggagctcagaggctttcgtcctagagatcgcgatgacatggtaagaaaaatcattgaaccaatggcctgtgatgggttaaggaccatatgcattgcttatcgggatttttcggctggtcaggaacccgattgggacaatgaaaatgaggtagttggcgacctcacatgtatagcagtggtggggattgaggacccggttcgtcctgaggttccagaggccatccgcaaatgtcagcgggcaggcataaccgtgagaatggtgactggcgacaacattaacacagctcgggcgattgccgccaagtgcggtatcattcaacccggggaggactttttgtgcctcgagggaaaagagttcaatagaagaatcagaaacgaaaagggcgaaatagaacaggagcgcctagataaagtctggccgaaactgcgagttctcgcacgctcgagccctactgataaacacaccctggtgaagggaattatagatagcacaaccggcgaacagcggcaagtcgtcgccgtcaccggggacggaaccaacgatgggcccgccctcaaaaaagccgacgtcggtttcgcaatgggcattgccgggaccgacgtggcaaaggaagcatccgatataatcttgacggatgacaatttcacttccatcgttaaagccgtgatgtggggacgtaacgtgtacgacagcatctctaagttcctgcaattccaactgactgtaaacgtcgttgctgtgattgtggccttcactggggcctgtatcactcaggactctcccctgaaggccgtccagatgctttgggtgaacttgataatggatacttttgctagcctggcactagcaacagagccaccaactgaaagcctgcttctcagaaagccatacggaagggacaaacctttaatcagcagaaccatgatgaagaatatccttggtcacgccgtgtaccagctggctatcatatttacactgctgtttgtgggcgaactcttcttcgacattgacagtggtcggaacgctccactgcacagtccaccatccgaacactatacaattatctttaacactttcgtgatgatgcaactgttcaacgagatcaatgccagaaagatccacggcgagcggaacgtgtttgacggcattttcagcaaccctatcttttgcacaatcgtcctgggcactttcggcatccagatcgtaattgtccagtttggcggcaaacccttctcatgtagtccactgtcaactgaacagtggttatggtgcctttttgtgggagtgggagagctagtatggggccaggtgattgcaactattccgacttctcagctcaaatgccttaaagaagctggacatggacctggaaaggatgaaatgacggacgaggaactggctgagggggaggaggagatagatcatgccgagcgggaactgcggagaggtcagatcctctggtttcgaggccttaatcgaatccagacgcagatggaagttgttagtacctttaagcggagcggcagcgtccagggcgctgtaagacggaggagtagcgtactgtctcagctacatgacgtgaccaacctctccacgcctacacacgccatcctatccgccgctaacccgacctctgctgccgggaaccctggaggcgagtcggtcccgtag

SEQ ID NO: 285389 - DNA, 3480 bp, Artificial Sequence
  derived and/or modified sequence
atgggcgacatggccaacagcagcatcgagttccaccccaagccccagcagcaacgggatgtgcctcaagccggcggctttgggtgcacactggctgagctgaggaccctaatggaactgaggggtgcagaagctctgcagaagatcgaggaagcctatggtgacgtgtcaggcctctgcaggcgcctgaagacatcccccactgagggtctggctgataacacaaacgacctggaaaagcggcggcagatctacggacagaacttcatcccccctaaacagccaaagactttcctccaactcgtctgggaagcattgcaggacgtcacactaatcatcctagaggtcgcggctatcgtaagtctcggacttagtttttacgctcctccaggtgaggaatctgaggcgtgcgggaacgtttccggtggcgcggaagatgaaggggaggccgaggctggctggatcgaaggcgcagctatcctgttgtccgttatttgtgtggtcctcgttacagcttttaatgactggtccaaggagaagcagtttcgagggctgcaatcacggattgagcaggagcagaagtttaccgtcattcgaaacggtcagctgttgcaggtccccgtggccgcattggtggtgggggacatcgcccaagtgaagtatggcgatctgctccccgctgacggtgtactaatccaggcaaacgacctgaagatcgacgaaagctccctgacaggcgaatcagatcacgtccgcaagtccgccgataaggatccgatgcttctctccggtacacatgtgatggaaggttctggcagaatggtggttactgctgtaggcgtcaacagtcagactggcattattttcacccttctcggtgctggcggggaggaggaggaaaagaaggacaagaaagctaagaaacaggacggggccgtcgccatggagatgcagcccctaaaaagcgctgagggcggggagatggaagagcgcgagaaaaaaaaagccaacgctcctaagaaggagaagagtgtgctgcaaggcaagctgaccaagctggcagtccaaattggaaaagccggactcgtgatgtccgcaattaccgtgatcattttggttctatatttcgttattgagacattcgtcgtggaggggcgcacatggctcgcagaatgcacacccgtgtacgtgcaatactttgtcaaatttttcatcatcggcgtgacagtccttgtggtggcagttcctgagggcctgccgttggccgtaacgatatccctcgcctactctgtcaaaaagatgatgaaagataataacctggtccggcatctggacgcttgtgagaccatgggtaacgccaccgcgatctgttctgacaagacaggcactctaacaacaaacaggatgacagtcgttcagtcataccttggcgatacccactacaaggaaatccctgcccccagtgcactgactcctaagatcctagacctgctggtccacgcaatctccatcaattcagcatatacaacaaagatcctgcctcccgagaaagaaggtgctctccctcgccaggtagggaacaaaaccgaatgcgccctgttgggctttgtacttgatctgaaacgagactttcagcccgtgcgcgaacagatccccgaagacaagctctacaaggtgtataccttcaactctgtcagaaagagtatgtcaacagtcatcaggatgcctgacggggggttccgactgtttagcaaaggtgcctctgaaatcctcttaaaaaaatgtacaaacatacttaacagtaacggcgagctcagagggtttcggccgagagatagggatgatatggtgcggaaaattatcgagcctatggcttgtgatgggcttagaacaatctgcatagcttatcgtgattttagcgccggccaggaaccagactgggataatgaaaacgaagtagtgggcgacctgacttgtattgccgtggtgggcatcgaggatcctgtccggcccgaggtgcccgaagcaatacgtaaatgccagcgcgcagggatcaccgtccgaatggtgaccggcgataatattaacacggcacgggccatagccgcaaaatgcggtatcattcaacctggcgaggactttttgtgtttagagggcaaagagttcaacagaagaatacgcaatgagaagggagaaatcgagcaggagagactcgacaaagtatggccaaagctgagagtgttggcccgctcctcacccacagacaaacacacactggttaagggtatcatcgactctaccacaggggagcagaggcaggtcgttgcggtcacgggagatggcacgaatgacggtccggcactgaagaaggccgacgttgggttcgctatgggaatcgcaggaactgacgtcgccaaggaggcttccgacattattctgacagacgacaacttcacatccattgtaaaagctgtgatgtggggccgcaacgtttacgattccatctcaaaatttcttcaatttcaactgacggttaatgtggttgcagtaatcgtggctttcactggagcctgtattactcaggattctccactgaaggcggtacagatgctttgggttaatcttatcatggatacgttcgctagtttggcactggcaacagaaccgcctaccgaaagtttattgctcagaaagccctatggtagagataagcctctcatttctagaactatgatgaaaaatattctaggacatgccgtgtaccagttagcgatcatttttacacttttgttcgttggtgagttgttctttgatatcgattccgggcgaaacgctccgctgcattcacctccgtctgagcattatactataattttcaacacctttgtgatgatgcaactcttcaacgaaattaacgccaggaagattcacggagagcgcaacgtttttgacgggattttctccaatcccatattctgcaccatcgtcttggggacatttggcatacagatcgtcatcgtgcagttcggcggcaaacctttctcctgttctcccttatccaccgaacagtggctgtggtgtctgtttgtcggtgtgggcgagcttgtttgggggcaggtgatcgctacaatccctacaagtcagctcaaatgtctgaaagaggccggccatggacctggtaaggacgagatgaccgacgaggagctcgcagaaggagaggaagaaatcgaccacgcagagagagagttacggcggggtcagatcctgtggtttagaggattaaacagaattcagacgcaaatggaggtcgtctctacttttaaacggagtggaagtgtgcaaggagccgtgagacgcagaagcagtgtgttatcccaactgcatgacgtcaccaacctgtccactccaacgcacgctattctttctgctgcaaatccgacttccgccgcaggcaacccagggggcgagtcagtgccgtag

SEQ ID NO: 285390 - DNA, 3465 bp, Artificial Sequence
  derived and/or modified sequence
atgggcgacatggccaacagcagcatcgagttccaccccaagccccagcagcagcgggacgtcccacaggccggcggatttggctgtactctggcggaactgcgcaccctcatggagcttcggggcgccgaggcccttcagaagatcgaggaagcctatggcgacgtctccggtctctgtcggaggttaaaaacatcccccacggaggggctggcagataacaccaatgatctcgaaaagcgcagacaaatctacggccaaaactttattccccctaaacagccgaaaacattcctgcagctcgtttgggaggccctgcaagacgtcaccctgatcattcttgaagtggcagcaatcgtttccctgggcctgtccttctatgcccccccaggcgaggagtctgaagcctgcggcaatgtgtctggcggtgcagaggacgagggcgaagccgaggctggttggattgaaggggcggccatcctcctgtcagttatttgcgtggttttggtcaccgccttcaatgattggtctaaggagaagcaatttagaggacttcagtccagaatcgagcaagaacagaaattcaccgtgatccgaaacggccagctgctccaggtgcccgtagccgccctcgtggtgggcgacattgcccaggttaagtacggagatctgttgccagccgatggggtgctgatccaagccaacgatctgaaaatcgatgaatcaagcctgacaggggaaagcgatcacgtgcgcaagagtgccgataaggatcccatgctgctaagcgggacccacgtgatggaggggtcaggaaggatggtggtcacagcggtcggcgtcaattcacagacaggcatcattttcactctgctgggcgccggaggcgaggaggaagagaaaaaagacaaaaaagctaagaagcaggatggcgccgtggccatggagatgcagcctcttaaaagcgccgaaggcggggagatggaagagcgcgagaagaagaaggcaaacgcccctaaaaaagaaaaaagcgtcctacagggaaaacttacaaaactcgctgtacaaattggcaaagctggccttgtgatgagcgctataaccgtaatcatccttgtattgtactttgtgatcgagacatttgtagttgagggccgaacatggctggctgagtgtaccccagtgtatgtgcagtactttgtcaaatttttcatcattggtgtgactgtcctcgtggtcgctgtgcccgaggggctgcctctcgccgtcactataagcttagcatactcagtgaagaaaatgatgaaggataataatttggtaagacacctcgacgcctgtgaaaccatgggcaatgctacggccatctgttcggacaagacaggtacgctgacaaccaaccgtatgacagtcgttcaatcttatctcggagatacccattacaaggagatacctgccccatctgctctgacaccgaagatactggaccttttggtgcatgccattagtatcaactctgcctatacaaccaagatcttacctccagagaaggaaggcgccctcccacgtcaggtaggaaataaaacagagtgtgcgcttctgggtttcgttttggatctgaagagggattttcagcctgtcagggagcagattcctgaggataaactgtacaaggtctacaccttcaactctgtccgaaagtctatgtctacagtcattcgaatgccagacggcggcttcaggttattttccaaaggagcttcagagattcttctcaaaaagtgcactaacatcctgaatagcaacggcgaactgaggggttttcggcctagggatcgtgacgacatggtgcggaaaatcatcgaacccatggcctgtgacggactgcgtacgatttgtatcgcttatcgcgactttagtgctggacaggagcccgactgggataatgagaacgaggtggtgggagacctgacctgcattgccgttgtggggattgaggaccccgtcagacccgaggttcccgaggctattcgcaaatgccaaagggcgggcatcaccgtgcgcatggtgaccggtgataacatcaacacggctcgggctatcgctgctaaatgcggcattatccagcctggtgaggactttctgtgcctcgaagggaaagagttcaacagacgcataaggaatgaaaagggggagatcgaacaggaaaggcttgataaggtgtggccgaagctgcgggttctggcacgatcgagtcccacagataagcacaccctggtaaaggggatcattgacagcaccaccggagagcagcgccaggtagtggcagtgaccggggatggcacaaacgacggccccgccctcaagaaagccgatgtgggctttgcaatggggatagccgggaccgatgtggccaaagaggcctccgacatcatccttacagatgataatttcacgtcgatcgtgaaagctgtcatgtggggccgcaatgtgtacgatagtatcagtaaattcctgcaatttcaactgaccgtgaatgttgtcgcagtaattgtggcgtttactggtgcctgcattacgcaggatagcccgctgaaggccgtgcaaatgctgtgggtcaatctcatcatggacaccttcgctagtctggctttggcaacggagccaccaactgagtccctattgctgcgcaagccatatggacgggataaaccactaataagcaggacgatgatgaagaatatcctcgggcacgccgtgtatcagttggctatcatcttcaccctgctgtttgtgggagagctttttttcgatatagattccggccgaaatgcacccttacatagcccaccatccgagcattacacaattatttttaatacgttcgtcatgatgcagctgttcaacgaaattaatgctcgcaagattcatggtgaacgcaatgtgtttgacggaatcttcagcaatcccattttctgtactattgttctgggtacgtttggcatccagatagtgattgttcaatttggtgggaagcctttttcatgctcacctctgtccactgaacagtggttgtggtgcctctttgtgggtgttggcgagctggtgtgggggcaggtcatagccacaatcccgacgagccagcttaagtgcttgaaggaggcgggccacggcccaggaaaggatgaaatgacggacgaggagctggccgagggcgaggaagagatcgatcatgccgagagggaactgagacggggacagatcctgtggttccggggtctgaatcgtatccagacgcaaatggaggtggtaagtactttcaaacgatccggtagcgtgcagggagctgttcggagacggtcatcagtgttgagccagctccatgatgtaacaaatctgtcgacgcctacccacgccattctctcagccgccaatccaacctccgccgctgggtcagaaagctag

SEQ ID NO: 285391 - DNA, 3522 bp, Artificial Sequence
  derived and/or modified sequence
atgggagacatggctaactcatcaatcgagtttcaccccaagccacagcagcagcgagacgtccctcaggcagggggatttgggtgcaccctggcggagttgcgaaccctcatggagctgcgtggggcagaggctctgcaaaagattgaagaggcctacggcgatgttagcgggttgtgcaggcgattaaagacgagcccgacggaggggcttgccgataatacaaacgatcttgaaaagcgaaggcagatttatggtcagaactttattccacctaaacaaccaaaaacattcctccagctggtgtgggaggctcttcaggatgtgactctgatcattcttgaagtcgctgccatcgtctccttgggtttgtctttctatgcccctcctggggaagaaagcgaggcttgcggaaacgtgagcggaggcgctgaggacgagggcgaggcggaggcaggttggattgagggcgctgcaatattgctcagtgtaatttgcgtcgtacttgtgaccgcatttaacgattggtctaaggagaaacagttccgcggacttcaatcaaggattgagcaggaacagaagttcactgtgatcaggaacggccaactgctgcaggttccagtagcagccctggtcgtcggcgacatcgctcaggtgaagtatggagacctgttgcccgctgacggggtgttgattcaggccaatgatctgaaaattgacgaatcctccctgactggagaatccgaccacgtcaggaagtcagcagataaggatcctatgttactgtccggcactcatgtgatggagggcagtggccgtatggtggtcaccgcggtgggggtaaattctcagaccggtattatatttacactcttaggggctggaggcgaggaggaggaaaaaaaggacaagaaagggaagcagcaagatggggcaatggagagcagccaaactaaggctaagaaacaggacggtgcggtcgccatggaaatgcagccactcaaaagcgcagagggtggagagatggaagaaagagagaaaaagaaagctaatgccccaaaaaaagagaaatcggtgctgcagggcaaactgacaaagctggcggttcagattggcaaagcaggcctcgtaatgtccgcaatcaccgtcatcattttagtcctgtactttgtcatcgagacatttgtcgttgaggggcgaacttggctggctgagtgcacccctgtgtatgtccagtactttgtcaaattctttatcataggcgttactgttttggtcgtagcagtaccagagggattacctctggcagtgaccattagcctggcatattctgtcaagaaaatgatgaaggataacaacctagtaagacacttggacgcttgcgagactatgggtaacgcaaccgccatttgctccgacaagacaggcacgcttacaactaatagaatgaccgtcgtgcaatcctatttgggcgacacccactacaaggagattcccgctccatccgccctcacccccaagatcctcgacttactggtccacgctataagcataaattccgcctacactaccaaaatccttccgcctgaaaaagaaggggctctccccaggcaggtgggcaacaagactgaatgcgccctgctaggcttcgtactggatctgaaaagggattttcagcccgtgcgcgagcagattcctgaggacaagctctacaaggtgtacaccttcaacagcgtccgaaagtccatgtctacggtaatccgcatgcctgatggcggatttcgactgttctctaaaggcgcatcggaaatactactgaagaagtgtaccaatatcctcaactccaatggtgaattaagaggtttccggcctcgggatcgggatgacatggtccgcaagattatcgaacccatggcatgcgacggcttgcgcacaatttgcatagcctaccgcgatttttcagctggtcaagaacctgactgggataacgaaaacgaagtcgtcggagacttgacttgtatcgcggtagttggcattgaagatccggtccgcccagaagtccccgaagctatcaggaagtgccagcgcgctggaatcaccgtgcggatggtcacgggagataacattaatactgccagagccatcgcagctaaatgcgggattattcaacctggcgaggacttcctgtgtctcgagggcaaggagttcaataggcgtatccggaatgagaagggtgaaatagagcaggagcggctcgataaggtgtggcctaaactccgggttctggctaggagttctcctaccgacaagcatactctcgtgaaggggatcattgactctaccactggcgagcagcgccaggtggtggcagtaacaggggacggtaccaacgatggacccgcactgaaaaaggccgatgttgggtttgccatgggaatcgcaggcaccgacgttgctaaggaagcatcggatattatcctcaccgatgacaattttacgtctatcgtgaaagcagtcatgtggggtcgcaacgtctacgactcaatcagcaaatttctccagtttcagttgactgtcaacgttgtggccgtgatcgtggcttttactggcgcttgcattacacaggatagcccactaaaggcagtccagatgctttgggttaacctaattatggacaccttcgcatccctggcactcgccactgagccaccgaccgagtctttattattgcgtaagccttatgggcgagataagccactgatctccaggacaatgatgaaaaacattcttggccacgctgtttatcagcttgccattattttcaccttgctattcgtgggggagctgttctttgatattgactcagggagaaatgcccctctgcattcccctccatccgaacactataccattatttttaacaccttcgtgatgatgcagctcttcaatgaaattaatgcgaggaagatacacggtgaaagaaacgtgttcgacggaattttcagtaatcccattttttgtaccatcgtgcttgggacgtttggcatccagatcgtgatcgttcagttcggcggtaaacctttcagctgcagccctctgtctaccgagcaatggctctggtgtctctttgtgggagttggagagctggtgtggggtcaggtgatagcaaccatccctacaagccaactaaagtgtctaaaagaggctggccacggcccaggtaaagacgagatgactgacgaggaactcgccgagggagaggaggaaattgatcacgcagagagagaactacggaggggacagattctgtggttcaggggcctgaataggattcagacgcaaatggaagtggtctccaccttcaaaagatcgggcagcgtccagggggcagtgcgtagaagatctagcgtactgagccagttgcatgatgtgaccaacctgtctacgcccacccacgctatcctcagcgccgctaatcccacgagcgccgcaggaaatcccggaggcgaatccgtaccttag

SEQ ID NO: 285392 - DNA, 3480 bp, Artificial Sequence
  derived and/or modified sequence
atgggggatatggccaacagctcaatcgaatttcaccctaaacctcagcaacagagagatgtgcctcaagccggtggattcgggtgcacactcgctgaactgcgaactctgatggaactaaggggagctgaagctttgcagaaaatcgaagaagcatacggtgacgtgtctggtttgtgtcggagactgaagactagtccaaccgagggtctcgccgacaacacaaatgacttagaaaagagacggcaaatctacggtcagaactttattcctcccaagcaacctaaaactttcttgcaactcgtgtgggaggctctgcaggatgtgacgttgatcattctggaggtcgcagccattgtgagcctggggttaagtttctatgcccctcctggcgaagagtctgaagcttgcggtaacgtctccggtggcgctgaagacgagggcgaggcagaggctggatggattgagggcgctgccatcctgttatcagttatttgtgtggtactcgtcacagcatttaacgactggagcaaggagaagcagttccgtggattgcagagtcgcatcgagcaagagcagaagttcaccgtcataaggaacggacaactcctgcaggtgcccgtggcagcactggtggttggtgacattgcacaggttaagtacggtgacctgcttccggctgatggcgtcttaatccaagcaaacgatctgaagattgatgagtcgagtttgacaggagagagtgaccacgtgcgcaaaagcgccgataaagatcctatgctcctctctggaacccacgtgatggaaggctcaggcaggatggtcgttaccgctgttggcgtcaactcacagacaggaattattttcaccttactgggcgcagggggtgaggaggaggagaagaaggataaaaaggcaaagaagcaggacggtgctgtcgcaatggaaatgcagcctctgaaatcagccgaaggaggggaaatggaagagcgggagaagaaaaaagctaacgcacccaaaaaggaaaaatccgtccttcagggaaagcttactaagctggccgtacaaattggcaaggccggattggtcatgagtgcaattacagtgattatcctggtgctgtactttgtcatcgaaacatttgttgttgaagggaggacatggctcgctgaatgtacgccagtgtatgtgcagtacttcgtgaagttcttcattatcggggtcaccgtcctagtcgtggctgtgccagaagggctgcctctggctgtcactatctccttggcctattctgtgaaaaagatgatgaaagacaataacctggtaaggcatcttgacgcatgtgaaactatgggcaacgcgacagcaatctgttccgataagacaggcacactgactacgaacagaatgacagtcgtgcagtcatacctgggcgacacacactataaagagattccagccccatctgcccttacgcccaaaatcttggatctcctggtccacgccattagtataaatagcgcctacactaccaagatccttccgcctgaaaaggaaggcgcactaccccgtcaggttgggaacaaaaccgaatgtgccctgctggggtttgttttggacttgaaaagagactttcagcctgttcgagaacaaatcccagaagacaagctgtacaaagtgtataccttcaactctgtgcgcaagtccatgtcaaccgttatccgcatgccagacggcggattcagactgttcagcaagggggcatctgagattttgcttaagaagtgtacaaacatcttaaactcaaacggggagctgcgtggattcagaccccgagatagagatgacatggtaaggaaaattattgagccgatggcctgtgacgggttacgaacgatctgtatagcctaccgggatttttcagcgggacaggagcctgattgggacaatgaaaacgaggtggtcggggacctgacatgcattgcggtggtgggcatcgaagaccccgttcggcctgaggtaccggaggctatccggaaatgtcagagggcaggtattacggtcagaatggtaacaggagataatatcaacactgcacgcgctattgctgccaagtgtggtattatccagcctggcgaggactttctctgtctagagggcaaagagttcaaccgccgaatccgcaacgagaagggggaaattgagcaggaacgcttggacaaagtgtggcctaaactgagggtactggccaggagcagtcctactgacaagcataccctagtgaagggcataattgattctactacaggagaacaacgtcaagtggtggctgtgaccggggatgggaccaacgatggccctgctctgaagaaggctgatgtgggatttgccatgggcattgccggaactgatgtagcaaaggaagccagtgacattattctcacagatgacaacttcacttcaattgtgaaagctgtaatgtggggcaggaacgtgtatgactctattagtaaatttctccagtttcagctaactgtcaatgtggtagccgtgatcgtggccttcacaggcgcatgtatcacccaggattccccgcttaaggcggtgcagatgctgtgggtgaacctcatcatggacacctttgcctccctggcactcgcaacagagccgcctacggagtcgttactgcttaggaaaccatacggcagagacaagccattgatttctaggaccatgatgaagaatatcttgggacacgctgtttaccaattagcgattattttcacactcttgttcgtgggagaactgttcttcgacatagatagcggacgcaacgcccctctgcactctcctccatcagagcattatacaatcatcttcaacacatttgtgatgatgcaactgttcaacgaaatcaacgcgcgaaagattcatggtgaacggaatgtgttcgatggcattttttctaatcccatcttctgtaccatagtgctgggcacctttggcatccagattgtcattgtgcagttcggaggcaaacccttctcttgcagccctttgtctaccgaacagtggttgtggtgtctgtttgtgggggtgggcgaactggtatgggggcaagtgattgctactatcccaacctcgcagttaaagtgcctgaaggaagctggccacggtccgggaaaggatgagatgactgacgaggaactcgcagagggggaagaagagatcgaccatgcagagagggaattgcgcagagggcagatattgtggttccgcggactcaatcggatccaaacccagatggaggtagtgtcaacgtttaagaggtcagggagcgtacagggggctgtgcggagacggagcagtgtccttagtcaactgcacgatgtcactaacctgagtacccctacccacgcaattttatcagcggcaaaccctacttccgcagcagggaaccccggtggggaatccgtgccttag

SEQ ID NO: 285393 - DNA, 3480 bp, Artificial Sequence
  derived and/or modified sequence
atgggagacatggcaaattcctctatcgagtttcatccgaaacctcagcagcagcgcgatgtgccacaagctgggggatttggttgtaccctggccgagcttcggacattgatggaactgcgcggagccgaagcgcttcaaaaaattgaggaagcctacggagatgtttccggactatgccgtaggctaaaaactagtccgacagaggggttggctgataatacaaacgacctggaaaagcgacgacaaatttacggccaaaacttcatacctccgaaacagcccaagacctttctgcagctggtgtgggaagccctacaggacgtaacattaatcatccttgaagtggcagccattgtctcacttggactgtccttttatgccccacccggagaggagtctgaggcgtgcggcaatgtctctggaggagccgaagatgagggggaagctgaggccggttggatcgagggcgcagcaatcctgctgagcgtgatctgcgtagtgctagtgaccgctttcaacgactggtctaaagagaaacaatttcgaggcctgcagagccgcattgagcaggagcagaaattcaccgtgattcgcaacggacaactgctacaggtgccagtcgcagcattagttgtgggcgacatcgcacaggtgaaatacggcgacctgctgcccgcagacggggtgttaattcaggcgaacgatctcaagatcgacgaaagctctctcaccggcgagtctgatcacgtcagaaagtctgccgataaagaccctatgttgctctcgggaactcatgttatggaagggtcaggacggatggttgttactgcggtcggcgtcaactcacagactggaataatatttactctcttgggcgctggaggggaggaagaagaaaagaaggacaagaaggctaagaagcaagatggcgcagttgctatggaaatgcagccgctgaaaagtgcagaaggtggggagatggaagagagggagaagaagaaagctaacgctcctaagaaagaaaaaagcgttctgcaaggtaagttaaccaagctcgccgtgcagattggaaaagcgggtttagtcatgtcagccattaccgtgataatattagtcctctatttcgtcatcgagacatttgtggtggaagggcgtacttggctggctgaatgcacacccgtctacgttcagtatttcgtcaaattctttattatcggagtcactgtgctcgtagtggctgtgcccgagggtttgccactggcagtcaccatctccttggcatatagtgtgaagaagatgatgaaggacaacaacctggtgagacatctggacgcgtgtgagactatgggtaacgccactgcaatctgctcagacaaaacaggtactctgacgacaaataggatgaccgtggtgcagtcctaccttggcgacacccattataaagaaattccagctcccagtgcgctgacacctaagattttggacctgctggtgcacgccatcagcattaatagcgcctataccactaagatcttaccacctgagaaagaaggagccctgccgcgtcaggtcggaaacaaaaccgagtgtgctctgttaggcttcgtgttagacctgaagcgggatttccagccagttcgagaacaaattcccgaagataagctctataaagtctacacattcaatagtgttagaaaatcgatgtcgaccgtcattcgaatgcccgacggcggtttcagactcttcagcaagggcgctagtgaaatcttgttaaaaaagtgtaccaacattctcaactccaacggtgaactgcgcggattcaggcctagggacagggatgacatggtcaggaaaattattgaaccaatggcgtgtgatggcctgaggactatttgcattgcttatagagattttagtgctggacaggagccagactgggataacgagaatgaagtggtaggtgacttgacgtgcatagcagtggtcggaatcgaggatcccgtgagacccgaggtccccgaagccattcgaaagtgccagcgagctggcatcacagtgcgcatggttaccggcgataacataaacactgcaagggccatagccgctaagtgtggcattatccagcccggagaggatttcctgtgccttgaaggcaaagagttcaaccgaagaatcaggaacgaaaaaggagaaatcgagcaggagcggctggacaaggtgtggccgaaactcagggttttagcaaggtccagcccaaccgacaagcataccttagtcaaaggcatcatcgactccacaacgggagaacagcgccaggtggtggctgtgaccggcgatggcaccaacgacggaccagcattaaaaaaggcagatgtgggctttgccatgggaatagccggaaccgatgtggccaaggaggccagtgacattattttgacagacgacaacttcacatccatcgtgaaggcagtcatgtggggaagaaacgtgtacgactcaatttccaagttcttgcaatttcagcttactgtcaacgtcgtggcagtcattgtcgcatttacgggagcttgcatcacccaagattctcctttaaaggccgtccaaatgctttgggtaaatctcattatggatactttcgcaagtttggccctggcaacagagcctcctaccgagagtttgcttctcaggaaaccatacggacgcgataaaccgctgataagccgaaccatgatgaaaaatattctggggcatgccgtctaccagctcgccatcatcttcacccttctgtttgtgggcgagctcttctttgatatcgactcaggcaggaacgctccactgcactctccgcctagcgaacactacaccatcatatttaatacgtttgtgatgatgcagctatttaacgagattaatgccaggaagatacatggagagcggaatgtgttcgatggtatcttcagcaaccccattttttgcactatagtactgggcaccttcggtatacagatcgtgatcgtgcagtttggcggtaagccttttagttgctctccgttatccactgagcagtggctgtggtgcctgttcgtcggagttggtgagcttgtgtggggccaggtgatagctaccatacctacatcccaacttaagtgtctcaaggaagctggccacggtccaggcaaagatgagatgacggatgaggagttggcagagggtgaagaggaaatcgaccacgcggaacgggaattgagaagaggtcagatcttatggtttagaggtttgaacagaattcagacacagatggaagtagtctccacattcaagagaagcggtagcgttcagggagccgtccggagaaggtcctctgtgctctctcaattacacgatgtgacaaatctgtcgacccccacacacgccattctgagcgctgctaatccaacgagcgcagccggaaatcctgggggagagagcgtcccctag

SEQ ID NO: 285394 - DNA, 3465 bp, Artificial Sequence
  derived and/or modified sequence
atgggagatatggccaattcctccattgagtttcacccaaaaccgcagcagcagagagacgtgccccaggcgggaggcttcggatgtactctggccgagttacgcacactgatggaactgagaggcgcagaggcgctccagaagatcgaggaagcctacggagacgtgagcggcttgtgccggagactgaaaacctctccaactgaaggacttgccgacaataccaatgacctcgagaagaggaggcagatctatgggcagaactttataccacccaagcaacccaagaccttcctccagttggtgtgggaggcccttcaggacgttacactgatcatcctggaggtggccgctatcgtgtctctggggttatctttctacgcaccgcctggcgaggaatctgaagcttgtggcaacgtcagcggaggggctgaggacgagggggaggcagaagcaggctggatcgagggtgccgcaatcctcttgtcagtcatttgcgtggttctggtgaccgcatttaatgactggtcaaaggagaaacaatttcggggtttgcaatcacggatcgaacaagagcagaaatttactgtaattaggaatggccagctgctgcaagtccctgtggctgcactggtcgtcggtgacatcgcgcaagtgaaatacggagatctgctgcccgctgatggtgtgctgattcaggcaaatgacctaaaaatcgacgagtcaagcctgacaggagaaagcgaccacgtgagaaaatccgcagataaggacccaatgctgctctccggtacccatgtgatggagggcagtgggagaatggttgtcacagctgttggtgtgaattcccagaccgggatcatcttcaccctgctgggcgcaggtggggaggaagaggaaaagaaagacaagaaagctaaaaagcaggacggcgcagtggctatggagatgcaacctctaaaatccgccgaaggcggagaaatggaggagcgtgaaaaaaaaaaggcgaatgctccaaagaaagagaagtcggtacttcaggggaagttgaccaagctcgctgtccagataggtaaggccggacttgtgatgtctgctatcactgtgattattcttgtgctctacttcgtaatagagaccttcgtagtggaaggtaggacatggcttgcagagtgtacccccgtctacgtgcagtatttcgtgaaattcttcatcattggagtgacagtgctggtggtggccgtgccggaggggttgcctctggccgtgactatcagtctcgcttacagcgtgaaaaagatgatgaaagataataatttagtgagacatctagatgcctgtgaaactatgggtaatgccaccgctatatgctccgacaagactgggacgcttacaacaaacagaatgactgtagtccagagttacctgggggatacacactacaaagagattcccgcaccaagcgcccttactcctaagatcttggatttgcttgtccacgcgatctcaataaactcagcctacacaaccaagatactcccacccgagaaggagggagccctgccacgtcaggttggaaacaagaccgaatgtgcactactgggctttgtgctagacctgaagcgagatttccagccagttagagaacagatccctgaggacaagctatataaggtctatacttttaactcagtgaggaagtccatgtccacagtcatccggatgccagatgggggttttaggctgttcagcaagggagccagcgaaatactcctgaagaagtgcacaaatattctgaattccaatggtgaacttcggggattccgccctcgagaccgggatgacatggtgaggaaaatcattgagcccatggcgtgcgatggacttcgaacaatatgtatcgcctatcgagatttttccgctggccaagagccagactgggacaatgaaaacgaggtagtcggagacctcacgtgtattgcggttgtgggtatcgaagacccagtaagacccgaggtacccgaagcaatccgcaaatgtcagcgagctgggataacggtgcgaatggtgaccggtgacaatattaacacagcacgggcaatcgcggctaagtgtggaattattcagcctggagaagatttcctgtgcttggaaggcaaagagtttaatcgacgcatccgcaatgagaagggcgaaatcgaacaagagagactggacaaggtgtggcccaagcttcgcgtgctggcccgttcatccccgaccgataagcacacgctggtcaaaggcattattgacagtactacaggcgaacagcggcaggtcgtagccgtgacgggcgacgggaccaatgacgggccagctttgaagaaggccgacgttgggtttgccatgggcattgctgggacagatgtagcaaaggaagctagtgatattatactcacagatgataattttactagtattgtcaaggcagtgatgtggggtcgtaacgtgtacgactctatcagcaaatttctacagttccaactgacagtcaacgtcgtggccgtgattgtagctttcactggcgcttgcattacccaggatagccccctgaaagcagtccagatgttgtgggttaatctcatcatggatacattcgcttctcttgcactggctactgagcctcccaccgaatccctgttgcttcgcaaaccctatggacgcgacaagccacttatcagccgcacaatgatgaagaacattctaggtcatgctgtgtaccagctggcaattatattcactctgctcttcgtgggcgagttatttttcgacatcgatagcggcagaaatgccccactccactccccaccctctgagcactacacaataatcttcaacacgttcgtgatgatgcaactctttaacgagattaacgcacgcaaaatacatggtgagaggaacgtgttcgacggcatcttttctaaccccatcttttgtaccatcgtgctcggcacattcggaattcagattgtaatcgtgcaattcggtgggaaaccattcagttgttctccgcttagcactgagcagtggctgtggtgccttttcgttggtgtcggtgagctggtttggggccaggtgatagcaactattccaacctcccagctgaagtgcctcaaagaagcaggccacggcccagggaaggatgaaatgacggacgaagaactggcagaaggcgaggaggagatcgaccacgctgagagggagctgagaaggggtcaaatcttgtggttccgaggattaaatcgaatccagacacagatggaggtggtttctacttttaagcggagtgggtccgtccagggagcagtacggagacggagttccgtgctatcgcagttgcacgatgttacgaacctttctacacctactcacgccatcctgtctgctgccaatcccaccagcgccgctggcagcgagtcttag

SEQ ID NO: 285395 - DNA, 4234 bp, Artificial Sequence
  derived and/or modified sequence
gtgtccacgcttagcagctttctcaccgccgccaaaccttgcctgggcactgggaccgtgggtggccgcctgtccctagctgtggctgagccaagattgcacttgtgagaaggcctgacaggcagcatgggcgacatggccaatagttccatcgagttccaccccaagccccagcagcagcgggatgtcccccaggctggaggctttgggtgcacgctggcggagctgcgcaccctcatggagctgcgaggggccgaggcgctgcagaagatcgaggaggcctacggggatgtcagcgggctctgccggaggctgaagacctcacccacagagggcctggcggacaacaccaatgacctggagaagcgcaggcagatctacgggcagaacttcatccccccaaagcaacccaagaccttcctgcagctggtgtgggaggccctgcaggacgtgaccctcatcatcctggaggtggctgccatcgtctctctgggcctctcgttctatgcgccgccaggagaggagagtgaagcctgtgggaatgtgtcgggaggcgcagaagatgagggcgaggccgaagctggctggatcgagggggctgccatcctgctgtccgtcatctgtgtggtgctggtcacggccttcaatgactggagcaaggagaagcagttccgaggcctgcagagccgaattgagcaggagcagaagttcacggtcatccggaacgggcagctcctccaggtccccgtggctgcgctggtggtgggggacattgcccaggtcaagtacggcgacctgctgccagccgacggcgtgctcatccaggccaatgacctcaagatcgacgagagctccctgacgggcgagtctgaccacgtgcgcaagtcagctgacaaagatcccatgctgctctcaggcactcatgtcatggaaggttctggaagaatggtggtgaccgccgttggcgtgaattcccagacaggcatcatcttcacgctgcttggagctggcggagaggaggaagagaagaaagataagaaaggcaagcagcaggatggggccatggagagtagccagaccaaagctaagaagcaggatggtgcagtggccatggagatgcagcccctgaagagcgcggagggtggggagatggaggagcgggagaagaagaaagccaacgcacccaaaaaggagaagtctgtccttcaggggaagctcacaaagctagccgtgcagatcgggaaagcagggctggtgatgtctgccatcaccgtcatcatcctggtcctctactttgtgattgagacgtttgtcgtggaaggccggacatggctggcagagtgcacgccggtctatgtacaatacttcgtgaagttcttcatcattggtgtcactgtgctggtcgtggctgtcccagagggcctgcctcttgctgtcaccatctccttagcttactctgtcaagaaaatgatgaaagacaacaacctggtgcgccacctggatgcctgcgagaccatgggcaacgccacagccatctgctccgacaagacgggcacgctcaccaccaaccgtatgaccgtggtccagtcctacctaggagacacccactacaaagagattccggcccccagcgccctgacccctaagatcctcgacctcctggtccatgccatctccatcaacagtgcctataccaccaaaatactacctcctgagaaggaaggcgccctcccacgccaggtgggcaataagacggagtgcgccctgctgggcttcgtcttggacctgaagcgggacttccagcccgtgcgcgagcagatcccggaagacaagctttacaaagtgtacaccttcaactcggtccgcaagtccatgagcacagtcatccgcatgcccgacggtggcttccgcctcttcagcaagggggcctcagagatcctcttgaaaaagtgcaccaacatcttgaacagcaatggcgaactccggggctttcggcctcgggaccgggacgacatggtgaggaagatcatcgagccgatggcttgcgatggcctccgcaccatctgcatcgcctaccgggacttctctgcaggccaggagcccgactgggacaacgagaatgaggtcgtgggtgacctcacctgcatagctgtcgtgggcattgaggaccctgtgcggcccgaggtccctgaagctatccgaaaatgccagcgtgctggcatcacagtccgcatggtgactggggacaacatcaacacggcccgggccatcgcagccaaatgcggcatcatccagcccggggaggacttcctgtgcctagaagggaaggagttcaaccggcggatccgcaatgagaaaggcgagatagaacaggagcggctggacaaggtgtggcccaagctgagggtgctggcccggtcgtctcccaccgacaagcacacactggtcaaagggattatcgacagcaccactggtgagcagcggcaggtggtggctgtgacaggggatggcaccaacgatgggccggccctcaagaaggcggacgtgggcttcgccatgggcatcgcagggaccgacgtggccaaggaggcctccgacatcatcctgaccgatgacaacttcaccagcatcgtcaaggcagtcatgtggggccgtaacgtctatgacagcatctccaagttcctgcagtttcaactgacggtcaatgtggtggctgtgatcgtggccttcacaggtgcctgcattactcaggactctcctctcaaagccgtgcagatgttgtgggtgaacttgatcatggacacatttgcctctctggccctggcgacggagccacccacagagtcgctgctgctgcggaagccgtacggccgcgacaagcccctcatctcccgcaccatgatgaagaacattctgggccacgccgtgtaccagctcgccatcatcttcaccctgctgtttgtcggggagctcttcttcgacatcgacagcgggaggaatgcgcccctgcactcgccaccctcagagcactacaccatcatcttcaacacgttcgtcatgatgcagctctttaacgagatcaacgcccgcaagatccacggcgagaggaacgtgttcgacggcatcttcagcaaccccatcttctgcaccatcgttttgggcactttcgggattcagattgtcatcgtccagtttggcgggaagcccttcagctgctccccactatccacagaacagtggctctggtgcctgtttgttggtgttggggagctggtctggggacaggtcattgccaccatccccaccagccagctcaagtgcctgaaggaagccgggcacgggcccgggaaggacgagatgaccgacgaggagctggccgaaggcgaggaagagatcgaccatgccgagcgggagctccgcaggggccagatcctctggttccggggcctgaaccggattcagacgcagatggaggtagtgagtaccttcaagagaagcggttcagttcagggtgctgtgcgccggcggtcttcggtcctcagccagcttcatgacgtaaccaatctttctacccctactcacgcaattctctctgctgccaatcctaccagtgctgctgggaatccgggtggtgaaagcgttccgtagctcgctctatgaaggcctggagaaaccagaatccaagacctccattcacaacttcatggccacgcccgagtttctgatcaatgactacacccacaacatcccgctcattgacgacacggacgtggacgagaacgaggagcgcctccgggcccccccgcccccgtcccccaaccagaacaacaacgccatagacagcggcatctacctgaccacgcatgtcaccaagtcagctacctcttcagtgttttcctccagtcccgggagcccgctccacagcgtggagacgtccctctaacaagaacttgtctcagcacatgcgcacacgcacactcggactcacacgaagtcacacgcacacatgcacgcacacacacatatggggacctgcacacctgcaaaacgagggaacaactaaggtggctgaagacctttctggcagggcatttgcaaggacccaaatccattcaacaagggtgcagcctgccacaggctcctcatccggactgaggaagacgaggacagggaggaggaaaaggaggaagaggaggacaaaaagggggaggagaaggttcttcgtccaaaggag

SEQ ID NO: 285396 - DNA, 6532 bp, Artificial Sequence
  derived and/or modified sequence
gtgtccacgcttagcagctttctcaccgccgccaaaccttgcctgggcactgggaccgtgggtggccgcctgtccctagctgtggctgagccaagattgcacttgtgagaaggcctgacaggcagcatgggcgacatggccaatagttccatcgagttccaccccaagccccagcagcagcgggatgtcccccaggctggaggctttgggtgcacgctggcggagctgcgcaccctcatggagctgcgaggggccgaggcgctgcagaagatcgaggaggcctacggggatgtcagcgggctctgccggaggctgaagacctcacccacagagggcctggcggacaacaccaatgacctggagaagcgcaggcagatctacgggcagaacttcatccccccaaagcaacccaagaccttcctgcagctggtgtgggaggccctgcaggacgtgaccctcatcatcctggaggtggctgccatcgtctctctgggcctctcgttctatgcgccgccaggagaggagagtgaagcctgtgggaatgtgtcgggaggcgcagaagatgagggcgaggccgaagctggctggatcgagggggctgccatcctgctgtccgtcatctgtgtggtgctggtcacggccttcaatgactggagcaaggagaagcagttccgaggcctgcagagccgaattgagcaggagcagaagttcacggtcatccggaacgggcagctcctccaggtccccgtggctgcgctggtggtgggggacattgcccaggtcaagtacggcgacctgctgccagccgacggcgtgctcatccaggccaatgacctcaagatcgacgagagctccctgacgggcgagtctgaccacgtgcgcaagtcagctgacaaagatcccatgctgctctcaggcactcatgtcatggaaggttctggaagaatggtggtgaccgccgttggcgtgaattcccagacaggcatcatcttcacgctgcttggagctggcggagaggaggaagagaagaaagataagaaagctaagaagcaggatggtgcagtggccatggagatgcagcccctgaagagcgcggagggtggggagatggaggagcgggagaagaagaaagccaacgcacccaaaaaggagaagtctgtccttcaggggaagctcacaaagctagccgtgcagatcgggaaagcagggctggtgatgtctgccatcaccgtcatcatcctggtcctctactttgtgattgagacgtttgtcgtggaaggccggacatggctggcagagtgcacgccggtctatgtacaatacttcgtgaagttcttcatcattggtgtcactgtgctggtcgtggctgtcccagagggcctgcctcttgctgtcaccatctccttagcttactctgtcaagaaaatgatgaaagacaacaacctggtgcgccacctggatgcctgcgagaccatgggcaacgccacagccatctgctccgacaagacgggcacgctcaccaccaaccgtatgaccgtggtccagtcctacctaggagacacccactacaaagagattccggcccccagcgccctgacccctaagatcctcgacctcctggtccatgccatctccatcaacagtgcctataccaccaaaatactacctcctgagaaggaaggcgccctcccacgccaggtgggcaataagacggagtgcgccctgctgggcttcgtcttggacctgaagcgggacttccagcccgtgcgcgagcagatcccggaagacaagctttacaaagtgtacaccttcaactcggtccgcaagtccatgagcacagtcatccgcatgcccgacggtggcttccgcctcttcagcaagggggcctcagagatcctcttgaaaaagtgcaccaacatcttgaacagcaatggcgaactccggggctttcggcctcgggaccgggacgacatggtgaggaagatcatcgagccgatggcttgcgatggcctccgcaccatctgcatcgcctaccgggacttctctgcaggccaggagcccgactgggacaacgagaatgaggtcgtgggtgacctcacctgcatagctgtcgtgggcattgaggaccctgtgcggcccgaggtccctgaagctatccgaaaatgccagcgtgctggcatcacagtccgcatggtgactggggacaacatcaacacggcccgggccatcgcagccaaatgcggcatcatccagcccggggaggacttcctgtgcctagaagggaaggagttcaaccggcggatccgcaatgagaaaggcgagatagaacaggagcggctggacaaggtgtggcccaagctgagggtgctggcccggtcgtctcccaccgacaagcacacactggtcaaagggattatcgacagcaccactggtgagcagcggcaggtggtggctgtgacaggggatggcaccaacgatgggccggccctcaagaaggcggacgtgggcttcgccatgggcatcgcagggaccgacgtggccaaggaggcctccgacatcatcctgaccgatgacaacttcaccagcatcgtcaaggcagtcatgtggggccgtaacgtctatgacagcatctccaagttcctgcagtttcaactgacggtcaatgtggtggctgtgatcgtggccttcacaggtgcctgcattactcaggactctcctctcaaagccgtgcagatgttgtgggtgaacttgatcatggacacatttgcctctctggccctggcgacggagccacccacagagtcgctgctgctgcggaagccgtacggccgcgacaagcccctcatctcccgcaccatgatgaagaacattctgggccacgccgtgtaccagctcgccatcatcttcaccctgctgtttgtcggggagctcttcttcgacatcgacagcgggaggaatgcgcccctgcactcgccaccctcagagcactacaccatcatcttcaacacgttcgtcatgatgcagctctttaacgagatcaacgcccgcaagatccacggcgagaggaacgtgttcgacggcatcttcagcaaccccatcttctgcaccatcgttttgggcactttcgggattcagattgtcatcgtccagtttggcgggaagcccttcagctgctccccactatccacagaacagtggctctggtgcctgtttgttggtgttggggagctggtctggggacaggtcattgccaccatccccaccagccagctcaagtgcctgaaggaagccgggcacgggcccgggaaggacgagatgaccgacgaggagctggccgaaggcgaggaagagatcgaccatgccgagcgggagctccgcaggggccagatcctctggttccggggcctgaaccggattcagacgcagatggaggtagtgagtaccttcaagagaagcggttcagttcagggtgctgtgcgccggcggtcttcggtcctcagccagcttcatgacgtaaccaatctttctacccctactcacgcaattctctctgctgccaatcctaccagtgctgctgggaatccgggtggtgaaagcgttccgtagctcgctctatgaaggcctggagaaaccagaatccaagacctccattcacaacttcatggccacgcccgagtttctgatcaatgactacacccacaacatcccgctcattgacgacacggacgtggacgagaacgaggagcgcctccgggcccccccgcccccgtcccccaaccagaacaacaacgccatagacagcggcatctacctgaccacgcatgtcaccaagtcagctacctcttcagtgttttcctccagtcccgggagcccgctccacagcgtggagacgtccctctaacaagaacttgtctcagcacatgcgcacacgcacactcggactcacacgaagtcacacgcacacatgcacgcacacacacatatggggacctgcacacctgcaaaacgagggaacaactaaggtggctgaagacctttctggcagggcatttgcaaggacccaaatccattcaacaagggtgcagcctgccacaggctcctcatccggactgaggaagacgaggacagggaggaggaaaaggaggaagaggaggacaaaaagggggaggagaaggttcttcgtccaaaggaggaaggagaagaagtagaaagtgcgaagagctgagttccccacctttttttctattgatgcttcttttttaacaaactacagttttaccgtgtgtttgccatttgagctgtgtggtgggcagggggctggtttgggtttatggggagcttttgttgcacccatgcaggggcaatcagatcagcatcttcatgcaaaaaaaaaaaaaaagttgagtgctctgcaggcctgtgaagggtgccacctgagggagccgcctgcaagcggccctgcagccacaaagcaacccgccctctgcaaaaactaggcacatccgcagtgcgcatgtgtgtgcgtgcatgcacatatgtgtatgtgtgtggatctgtacacacacacgtatatatggccagatgcgtatttcaataaggaactatttactggcatgatatttgcattcctcttatcaggcattttcatttggaaatttcattattgaatgtagcaaggttgtagttgtttttttttttttttcagggaactagactgcaagaatatctttctggtcaacccatttttgtccctcatcaccccgcccccacctttcgctcctgccctctgcccggccctactgagattcccaaggagaaggccgagagggggcgctccaggtctggagcaggtataattggagcatttgcactgagacccctgccagagaggagaaaaccctttcaagggaaattttaatctaaaaggaaaaaaccaaaatattgatgagaaggagtcctccagttagtgaaaggggagtttcgttttcagctttctttggttcctactccaattccacatccttcatcctggccatgcccccaccttcaagagcatgaagcactcttggagttgtgggtcctgcccagagtccagagagcagcctcagctgagcacaggtccgagggggcgggggcagggccaagagttcaaaagaagccaatggagggagagggagcgtcagaagcccggaggagctggtggtgggagaatgacggcagggacgcagccacagttcagaccctgtcccctcagcacctggatggactcccactgtttgctttggcaaatgccgaggagtcctcggtagaccaccttgatgtctgctgtgacatcagaggtgccaccaccaaagcactcttcccaccctagtctttgtgtccagcggccaagcttaagccatgaagtcatggatttgtggctcagcaccaggtcctgaggggagcgtatcctggcagtgtgggcacctggtggccaagcctcagtttcccccaaatgagcaaaggggataaagaggggcccgacttttgccaccctcctgaggaagcccctaggtccacacagtgatgccatgggggacccttgccttccacacttgcaggtgtcacgttttgcagggaggtgtttgggccttgggctcagccactgggagacagttgggacctgagggacagaggatcggaatggaaaccaccaacgtgcactggcaccctcagaaggcttgtctcacctccaccggcatccacacaaaaccaaacaggagcaggcgtcatccccactattcccatgaatgccatgtcacccctgagcagaagcagtcaaatcttgggcaaaagaatttcggttagaaaagaaaatcccactttaaaatgccagctgcagataactcaaagccatcccttttttctaaagggcacattgagaatgtcacccatttgtaaactgttccctgatgtccttgtttaaacgataataagaaaaagggcaactccatttgttgagggtctttgtgttcttcaatgagaaatcaaatttgagacgttgaaattggagctgcgtgctgctgcactcaccggcttcttctcactctctgtcgtagacacaccgataggaccaatggccaatagatattaaaagcaaaccctcactgctgctgtataaagttgcctaatgtaaatgtctattgtttagtccctaggtcacctttgtgctgtgctgtggagttcagaaacggggtaccatgacctggaatcttttgctcttgtttttgcagtcttcaaggctgggggccctgtctcattgggaagcccctctttataaagcattatattacttggaatggcttggtcaactgtgttcagttcataaatatgttttacatttttatctgcctgttataaagatgaacaaaaaaacttaatgagaaagatcacagatacgtaataatttaaagtctgtagttgaatttcctaacttaaagaatagaccaaaatttctgtgtataaaaaaaaatgaaaggctccttacatcctg

SEQ ID NO: 285397 - DNA, 6742 bp, Artificial Sequence
  derived and/or modified sequence
ccgccgccggtgcagagcgtggggagcactcggccgcagccctcgcccgccgcagagggtcgcgtcccgcgccgccggccaggccgccccgtgcccaggcctttccatccttggagcggatcgttgcccgcctgacgcccgcccgcagcgacagcgcccgccggagccgaggccgcggcggcggccgtgcccatgcccgggtgtccacgcttagcagctttctcaccgccgccaaaccttgcctgggcactgggaccgtgggtggccgcctgtccctagctgtggctgagccaagattgcacttgtgagaaggcctgacaggcagcatgggcgacatggccaatagttccatcgagttccaccccaagccccagcagcagcgggatgtcccccaggctggaggctttgggtgcacgctggcggagctgcgcaccctcatggagctgcgaggggccgaggcgctgcagaagatcgaggaggcctacggggatgtcagcgggctctgccggaggctgaagacctcacccacagagggcctggcggacaacaccaatgacctggagaagcgcaggcagatctacgggcagaacttcatccccccaaagcaacccaagaccttcctgcagctggtgtgggaggccctgcaggacgtgaccctcatcatcctggaggtggctgccatcgtctctctgggcctctcgttctatgcgccgccaggagaggagagtgaagcctgtgggaatgtgtcgggaggcgcagaagatgagggcgaggccgaagctggctggatcgagggggctgccatcctgctgtccgtcatctgtgtggtgctggtcacggccttcaatgactggagcaaggagaagcagttccgaggcctgcagagccgaattgagcaggagcagaagttcacggtcatccggaacgggcagctcctccaggtccccgtggctgcgctggtggtgggggacattgcccaggtcaagtacggcgacctgctgccagccgacggcgtgctcatccaggccaatgacctcaagatcgacgagagctccctgacgggcgagtctgaccacgtgcgcaagtcagctgacaaagatcccatgctgctctcaggcactcatgtcatggaaggttctggaagaatggtggtgaccgccgttggcgtgaattcccagacaggcatcatcttcacgctgcttggagctggcggagaggaggaagagaagaaagataagaaagctaagaagcaggatggtgcagtggccatggagatgcagcccctgaagagcgcggagggtggggagatggaggagcgggagaagaagaaagccaacgcacccaaaaaggagaagtctgtccttcaggggaagctcacaaagctagccgtgcagatcgggaaagcagggctggtgatgtctgccatcaccgtcatcatcctggtcctctactttgtgattgagacgtttgtcgtggaaggccggacatggctggcagagtgcacgccggtctatgtacaatacttcgtgaagttcttcatcattggtgtcactgtgctggtcgtggctgtcccagagggcctgcctcttgctgtcaccatctccttagcttactctgtcaagaaaatgatgaaagacaacaacctggtgcgccacctggatgcctgcgagaccatgggcaacgccacagccatctgctccgacaagacgggcacgctcaccaccaaccgtatgaccgtggtccagtcctacctaggagacacccactacaaagagattccggcccccagcgccctgacccctaagatcctcgacctcctggtccatgccatctccatcaacagtgcctataccaccaaaatactacctcctgagaaggaaggcgccctcccacgccaggtgggcaataagacggagtgcgccctgctgggcttcgtcttggacctgaagcgggacttccagcccgtgcgcgagcagatcccggaagacaagctttacaaagtgtacaccttcaactcggtccgcaagtccatgagcacagtcatccgcatgcccgacggtggcttccgcctcttcagcaagggggcctcagagatcctcttgaaaaagtgcaccaacatcttgaacagcaatggcgaactccggggctttcggcctcgggaccgggacgacatggtgaggaagatcatcgagccgatggcttgcgatggcctccgcaccatctgcatcgcctaccgggacttctctgcaggccaggagcccgactgggacaacgagaatgaggtcgtgggtgacctcacctgcatagctgtcgtgggcattgaggaccctgtgcggcccgaggtccctgaagctatccgaaaatgccagcgtgctggcatcacagtccgcatggtgactggggacaacatcaacacggcccgggccatcgcagccaaatgcggcatcatccagcccggggaggacttcctgtgcctagaagggaaggagttcaaccggcggatccgcaatgagaaaggcgagatagaacaggagcggctggacaaggtgtggcccaagctgagggtgctggcccggtcgtctcccaccgacaagcacacactggtcaaagggattatcgacagcaccactggtgagcagcggcaggtggtggctgtgacaggggatggcaccaacgatgggccggccctcaagaaggcggacgtgggcttcgccatgggcatcgcagggaccgacgtggccaaggaggcctccgacatcatcctgaccgatgacaacttcaccagcatcgtcaaggcagtcatgtggggccgtaacgtctatgacagcatctccaagttcctgcagtttcaactgacggtcaatgtggtggctgtgatcgtggccttcacaggtgcctgcattactcaggactctcctctcaaagccgtgcagatgttgtgggtgaacttgatcatggacacatttgcctctctggccctggcgacggagccacccacagagtcgctgctgctgcggaagccgtacggccgcgacaagcccctcatctcccgcaccatgatgaagaacattctgggccacgccgtgtaccagctcgccatcatcttcaccctgctgtttgtcggggagctcttcttcgacatcgacagcgggaggaatgcgcccctgcactcgccaccctcagagcactacaccatcatcttcaacacgttcgtcatgatgcagctctttaacgagatcaacgcccgcaagatccacggcgagaggaacgtgttcgacggcatcttcagcaaccccatcttctgcaccatcgttttgggcactttcgggattcagattgtcatcgtccagtttggcgggaagcccttcagctgctccccactatccacagaacagtggctctggtgcctgtttgttggtgttggggagctggtctggggacaggtcattgccaccatccccaccagccagctcaagtgcctgaaggaagccgggcacgggcccgggaaggacgagatgaccgacgaggagctggccgaaggcgaggaagagatcgaccatgccgagcgggagctccgcaggggccagatcctctggttccggggcctgaaccggattcagacgcagatggaggtagtgagtaccttcaagagaagcggttcagttcagggtgctgtgcgccggcggtcttcggtcctcagccagcttcatgacgtaaccaatctttctacccctactcacgcaattctctctgctgccaatcctaccagtgctgctgggaatccgggtggtgaaagcgttccgtagctcgctctatgaaggcctggagaaaccagaatccaagacctccattcacaacttcatggccacgcccgagtttctgatcaatgactacacccacaacatcccgctcattgacgacacggacgtggacgagaacgaggagcgcctccgggcccccccgcccccgtcccccaaccagaacaacaacgccatagacagcggcatctacctgaccacgcatgtcaccaagtcagctacctcttcagtgttttcctccagtcccgggagcccgctccacagcgtggagacgtccctctaacaagaacttgtctcagcacatgcgcacacgcacactcggactcacacgaagtcacacgcacacatgcacgcacacacacatatggggacctgcacacctgcaaaacgagggaacaactaaggtggctgaagacctttctggcagggcatttgcaaggacccaaatccattcaacaagggtgcagcctgccacaggctcctcatccggactgaggaagacgaggacagggaggaggaaaaggaggaagaggaggacaaaaagggggaggagaaggttcttcgtccaaaggaggaaggagaagaagtagaaagtgcgaagagctgagttccccacctttttttctattgatgcttcttttttaacaaactacagttttaccgtgtgtttgccatttgagctgtgtggtgggcagggggctggtttgggtttatggggagcttttgttgcacccatgcaggggcaatcagatcagcatcttcatgcaaaaaaaaaaaaaaagttgagtgctctgcaggcctgtgaagggtgccacctgagggagccgcctgcaagcggccctgcagccacaaagcaacccgccctctgcaaaaactaggcacatccgcagtgcgcatgtgtgtgcgtgcatgcacatatgtgtatgtgtgtggatctgtacacacacacgtatatatggccagatgcgtatttcaataaggaactatttactggcatgatatttgcattcctcttatcaggcattttcatttggaaatttcattattgaatgtagcaaggttgtagttgtttttttttttttttcagggaactagactgcaagaatatctttctggtcaacccatttttgtccctcatcaccccgcccccacctttcgctcctgccctctgcccggccctactgagattcccaaggagaaggccgagagggggcgctccaggtctggagcaggtataattggagcatttgcactgagacccctgccagagaggagaaaaccctttcaagggaaattttaatctaaaaggaaaaaaccaaaatattgatgagaaggagtcctccagttagtgaaaggggagtttcgttttcagctttctttggttcctactccaattccacatccttcatcctggccatgcccccaccttcaagagcatgaagcactcttggagttgtgggtcctgcccagagtccagagagcagcctcagctgagcacaggtccgagggggcgggggcagggccaagagttcaaaagaagccaatggagggagagggagcgtcagaagcccggaggagctggtggtgggagaatgacggcagggacgcagccacagttcagaccctgtcccctcagcacctggatggactcccactgtttgctttggcaaatgccgaggagtcctcggtagaccaccttgatgtctgctgtgacatcagaggtgccaccaccaaagcactcttcccaccctagtctttgtgtccagcggccaagcttaagccatgaagtcatggatttgtggctcagcaccaggtcctgaggggagcgtatcctggcagtgtgggcacctggtggccaagcctcagtttcccccaaatgagcaaaggggataaagaggggcccgacttttgccaccctcctgaggaagcccctaggtccacacagtgatgccatgggggacccttgccttccacacttgcaggtgtcacgttttgcagggaggtgtttgggccttgggctcagccactgggagacagttgggacctgagggacagaggatcggaatggaaaccaccaacgtgcactggcaccctcagaaggcttgtctcacctccaccggcatccacacaaaaccaaacaggagcaggcgtcatccccactattcccatgaatgccatgtcacccctgagcagaagcagtcaaatcttgggcaaaagaatttcggttagaaaagaaaatcccactttaaaatgccagctgcagataactcaaagccatcccttttttctaaagggcacattgagaatgtcacccatttgtaaactgttccctgatgtccttgtttaaacgataataagaaaaagggcaactccatttgttgagggtctttgtgttcttcaatgagaaatcaaatttgagacgttgaaattggagctgcgtgctgctgcactcaccggcttcttctcactctctgtcgtagacacaccgataggaccaatggccaatagatattaaaagcaaaccctcactgctgctgtataaagttgcctaatgtaaatgtctattgtttagtccctaggtcacctttgtgctgtgctgtggagttcagaaacggggtaccatgacctggaatcttttgctcttgtttttgcagtcttcaaggctgggggccctgtctcattgggaagcccctctttataaagcattatattacttggaatggcttggtcaactgtgttcagttcataaatatgttttacatttttatctgcctgttataaagatgaacaaaaaaacttaatgagaaagatcacagatacgtaataatttaaagtctgtagttgaatttcctaacttaaagaatagaccaaaatttctgtgtataaaaaaaaatgaaaggctccttacatcctggtctgggtaa

SEQ ID NO: 285398 - DNA, 4064 bp, Artificial Sequence
  derived and/or modified sequence
cagccaacagtcgctctaaatgggccttactctaactgatggatcctgtctgccctatagcctgttgcattcatgaagacagtgagggttagcagagcaccccgaccccaccctgtcctccaggatggagactccacctcccaggactccaagttcctcccctgtgggccaggcccccattcactcattcctccaggcccccggccacatgcgggactgaccacgcggtagacttcctgccgactccataccacgtgtctcaaagagcttagggcccagtgtccacgcttagcagctttctcaccgccgccaaaccttgcctgggcactgggaccgtgggtggccgcctgtccctagctgtggctgagccaagattgcacttgtgagaaggcctgacaggcagcatgggcgacatggccaatagttccatcgagttccaccccaagccccagcagcagcgggatgtcccccaggctggaggctttgggtgcacgctggcggagctgcgcaccctcatggagctgcgaggggccgaggcgctgcagaagatcgaggaggcctacggggatgtcagcgggctctgccggaggctgaagacctcacccacagagggcctggcggacaacaccaatgacctggagaagcgcaggcagatctacgggcagaacttcatccccccaaagcaacccaagaccttcctgcagctggtgtgggaggccctgcaggacgtgaccctcatcatcctggaggtggctgccatcgtctctctgggcctctcgttctatgcgccgccaggagaggagagtgaagcctgtgggaatgtgtcgggaggcgcagaagatgagggcgaggccgaagctggctggatcgagggggctgccatcctgctgtccgtcatctgtgtggtgctggtcacggccttcaatgactggagcaaggagaagcagttccgaggcctgcagagccgaattgagcaggagcagaagttcacggtcatccggaacgggcagctcctccaggtccccgtggctgcgctggtggtgggggacattgcccaggtcaagtacggcgacctgctgccagccgacggcgtgctcatccaggccaatgacctcaagatcgacgagagctccctgacgggcgagtctgaccacgtgcgcaagtcagctgacaaagatcccatgctgctctcaggcactcatgtcatggaaggttctggaagaatggtggtgaccgccgttggcgtgaattcccagacaggcatcatcttcacgctgcttggagctggcggagaggaggaagagaagaaagataagaaagctaagaagcaggatggtgcagtggccatggagatgcagcccctgaagagcgcggagggtggggagatggaggagcgggagaagaagaaagccaacgcacccaaaaaggagaagtctgtccttcaggggaagctcacaaagctagccgtgcagatcgggaaagcagggctggtgatgtctgccatcaccgtcatcatcctggtcctctactttgtgattgagacgtttgtcgtggaaggccggacatggctggcagagtgcacgccggtctatgtacaatacttcgtgaagttcttcatcattggtgtcactgtgctggtcgtggctgtcccagagggcctgcctcttgctgtcaccatctccttagcttactctgtcaagaaaatgatgaaagacaacaacctggtgcgccacctggatgcctgcgagaccatgggcaacgccacagccatctgctccgacaagacgggcacgctcaccaccaaccgtatgaccgtggtccagtcctacctaggagacacccactacaaagagattccggcccccagcgccctgacccctaagatcctcgacctcctggtccatgccatctccatcaacagtgcctataccaccaaaatactacctcctgagaaggaaggcgccctcccacgccaggtgggcaataagacggagtgcgccctgctgggcttcgtcttggacctgaagcgggacttccagcccgtgcgcgagcagatcccggaagacaagctttacaaagtgtacaccttcaactcggtccgcaagtccatgagcacagtcatccgcatgcccgacggtggcttccgcctcttcagcaagggggcctcagagatcctcttgaaaaagtgcaccaacatcttgaacagcaatggcgaactccggggctttcggcctcgggaccgggacgacatggtgaggaagatcatcgagccgatggcttgcgatggcctccgcaccatctgcatcgcctaccgggacttctctgcaggccaggagcccgactgggacaacgagaatgaggtcgtgggtgacctcacctgcatagctgtcgtgggcattgaggaccctgtgcggcccgaggtccctgaagctatccgaaaatgccagcgtgctggcatcacagtccgcatggtgactggggacaacatcaacacggcccgggccatcgcagccaaatgcggcatcatccagcccggggaggacttcctgtgcctagaagggaaggagttcaaccggcggatccgcaatgagaaaggcgagatagaacaggagcggctggacaaggtgtggcccaagctgagggtgctggcccggtcgtctcccaccgacaagcacacactggtcaaagggattatcgacagcaccactggtgagcagcggcaggtggtggctgtgacaggggatggcaccaacgatgggccggccctcaagaaggcggacgtgggcttcgccatgggcatcgcagggaccgacgtggccaaggaggcctccgacatcatcctgaccgatgacaacttcaccagcatcgtcaaggcagtcatgtggggccgtaacgtctatgacagcatctccaagttcctgcagtttcaactgacggtcaatgtggtggctgtgatcgtggccttcacaggtgcctgcattactcaggactctcctctcaaagccgtgcagatgttgtgggtgaacttgatcatggacacatttgcctctctggccctggcgacggagccacccacagagtcgctgctgctgcggaagccgtacggccgcgacaagcccctcatctcccgcaccatgatgaagaacattctgggccacgccgtgtaccagctcgccatcatcttcaccctgctgtttgtcggggagctcttcttcgacatcgacagcgggaggaatgcgcccctgcactcgccaccctcagagcactacaccatcatcttcaacacgttcgtcatgatgcagctctttaacgagatcaacgcccgcaagatccacggcgagaggaacgtgttcgacggcatcttcagcaaccccatcttctgcaccatcgttttgggcactttcgggattcagattgtcatcgtccagtttggcgggaagcccttcagctgctccccactatccacagaacagtggctctggtgcctgtttgttggtgttggggagctggtctggggacaggtcattgccaccatccccaccagccagctcaagtgcctgaaggaagccgggcacgggcccgggaaggacgagatgaccgacgaggagctggccgaaggcgaggaagagatcgaccatgccgagcgggagctccgcaggggccagatcctctggttccggggcctgaaccggattcagacgcagatggaggtagtgagtaccttcaagagaagcggttcagttcagggtgctgtgcgccggcggtcttcggtcctcagccagcttcatgacgtaaccaatctttctacccctactcacgcaattctctctgctgccaatcctaccagtgctgctgggagtgagtcttgacttcccttttctctcataaatggcatctctggggaagaataagcctccccagctcggccttctctcttttgcagtcttgcattccgctcaccgtggcttttctgttctttctttaccgccctgtccagtccttcccgcccagacggtgtctctcgaaagccatattcttttatgaaacgtattcaacccatggca

SEQ ID NO: 285399 - DNA, 3522 bp, Artificial Sequence
  derived and/or modified sequence
atgggcgacatggccaacagcagcatcgagttccaccccaagccccagcagcagagagacgtgccccaggccggcggcttcggctgcaccctggccgagctgagaaccctgatggagctgagaggcgccgaggccctgcagaagatcgaggaggcctacggcgacgtgagcggcctgtgcagaagactgaagaccagccccaccgagggcctggccgacaacaccaacgacctggagaagagaagacagatctacggccagaacttcatcccccccaagcagcccaagaccttcctgcagctggtgtgggaggccctgcaggacgtgaccctgatcatcctggaggtggccgccatcgtgagcctgggcctgagcttctacgccccccccggcgaggagagcgaggcctgcggcaacgtgagcggcggcgccgaggacgagggcgaggccgaggccggctggatcgagggcgccgccatcctgctgagcgtgatctgcgtggtgctggtgaccgccttcaacgactggagcaaggagaagcagttcagaggcctgcagagcagaatcgagcaggagcagaagttcaccgtgatcagaaacggccagctgctgcaggtgcccgtggccgccctggtggtgggcgacatcgcccaggtgaagtacggcgacctgctgcccgccgacggcgtgctgatccaggccaacgacctgaagatcgacgagagcagcctgaccggcgagagcgaccacgtgagaaagagcgccgacaaggaccccatgctgctgagcggcacccacgtgatggagggcagcggcagaatggtggtgaccgccgtgggcgtgaacagccagaccggcatcatcttcaccctgctgggcgccggcggcgaggaggaggagaagaaggacaagaagggcaagcagcaggacggcgccatggagagcagccagaccaaggccaagaagcaggacggcgccgtggccatggagatgcagcccctgaagagcgccgagggcggcgagatggaggagagagagaagaagaaggccaacgcccccaagaaggagaagagcgtgctgcagggcaagctgaccaagctggccgtgcagatcggcaaggccggcctggtgatgagcgccatcaccgtgatcatcctggtgctgtacttcgtgatcgagaccttcgtggtggagggcagaacctggctggccgagtgcacccccgtgtacgtgcagtacttcgtgaagttcttcatcatcggcgtgaccgtgctggtggtggccgtgcccgagggcctgcccctggccgtgaccatcagcctggcctacagcgtgaagaagatgatgaaggacaacaacctggtgagacacctggacgcctgcgagaccatgggcaacgccaccgccatctgcagcgacaagaccggcaccctgaccaccaacagaatgaccgtggtgcagagctacctgggcgacacccactacaaggagatccccgcccccagcgccctgacccccaagatcctggacctgctggtgcacgccatcagcatcaacagcgcctacaccaccaagatcctgccccccgagaaggagggcgccctgcccagacaggtgggcaacaagaccgagtgcgccctgctgggcttcgtgctggacctgaagagagacttccagcccgtgagagagcagatccccgaggacaagctgtacaaggtgtacaccttcaacagcgtgagaaagagcatgagcaccgtgatcagaatgcccgacggcggcttcagactgttcagcaagggcgccagcgagatcctgctgaagaagtgcaccaacatcctgaacagcaacggcgagctgagaggcttcagacccagagacagagacgacatggtgagaaagatcatcgagcccatggcctgcgacggcctgagaaccatctgcatcgcctacagagacttcagcgccggccaggagcccgactgggacaacgagaacgaggtggtgggcgacctgacctgcatcgccgtggtgggcatcgaggaccccgtgagacccgaggtgcccgaggccatcagaaagtgccagagagccggcatcaccgtgagaatggtgaccggcgacaacatcaacaccgccagagccatcgccgccaagtgcggcatcatccagcccggcgaggacttcctgtgcctggagggcaaggagttcaacagaagaatcagaaacgagaagggcgagatcgagcaggagagactggacaaggtgtggcccaagctgagagtgctggccagaagcagccccaccgacaagcacaccctggtgaagggcatcatcgacagcaccaccggcgagcagagacaggtggtggccgtgaccggcgacggcaccaacgacggccccgccctgaagaaggccgacgtgggcttcgccatgggcatcgccggcaccgacgtggccaaggaggccagcgacatcatcctgaccgacgacaacttcaccagcatcgtgaaggccgtgatgtggggcagaaacgtgtacgacagcatcagcaagttcctgcagttccagctgaccgtgaacgtggtggccgtgatcgtggccttcaccggcgcctgcatcacccaggacagccccctgaaggccgtgcagatgctgtgggtgaacctgatcatggacaccttcgccagcctggccctggccaccgagccccccaccgagagcctgctgctgagaaagccctacggcagagacaagcccctgatcagcagaaccatgatgaagaacatcctgggccacgccgtgtaccagctggccatcatcttcaccctgctgttcgtgggcgagctgttcttcgacatcgacagcggcagaaacgcccccctgcacagcccccccagcgagcactacaccatcatcttcaacaccttcgtgatgatgcagctgttcaacgagatcaacgccagaaagatccacggcgagagaaacgtgttcgacggcatcttcagcaaccccatcttctgcaccatcgtgctgggcaccttcggcatccagatcgtgatcgtgcagttcggcggcaagcccttcagctgcagccccctgagcaccgagcagtggctgtggtgcctgttcgtgggcgtgggcgagctggtgtggggccaggtgatcgccaccatccccaccagccagctgaagtgcctgaaggaggccggccacggccccggcaaggacgagatgaccgacgaggagctggccgagggcgaggaggagatcgaccacgccgagagagagctgagaagaggccagatcctgtggttcagaggcctgaacagaatccagacccagatggaggtggtgagcaccttcaagagaagcggcagcgtgcagggcgccgtgagaagaagaagcagcgtgctgagccagctgcacgacgtgaccaacctgagcacccccacccacgccatcctgagcgccgccaaccccaccagcgccgccggcaaccccggcggcgagagcgtgccctag

SEQ ID NO: 285400 - DNA, 3480 bp, Artificial Sequence
  derived and/or modified sequence
atgggcgacatggccaacagcagcatcgagttccaccccaagccccagcagcagagagacgtgccccaggccggcggcttcggctgcaccctggccgagctgagaaccctgatggagctgagaggcgccgaggccctgcagaagatcgaggaggcctacggcgacgtgagcggcctgtgcagaagactgaagaccagccccaccgagggcctggccgacaacaccaacgacctggagaagagaagacagatctacggccagaacttcatcccccccaagcagcccaagaccttcctgcagctggtgtgggaggccctgcaggacgtgaccctgatcatcctggaggtggccgccatcgtgagcctgggcctgagcttctacgccccccccggcgaggagagcgaggcctgcggcaacgtgagcggcggcgccgaggacgagggcgaggccgaggccggctggatcgagggcgccgccatcctgctgagcgtgatctgcgtggtgctggtgaccgccttcaacgactggagcaaggagaagcagttcagaggcctgcagagcagaatcgagcaggagcagaagttcaccgtgatcagaaacggccagctgctgcaggtgcccgtggccgccctggtggtgggcgacatcgcccaggtgaagtacggcgacctgctgcccgccgacggcgtgctgatccaggccaacgacctgaagatcgacgagagcagcctgaccggcgagagcgaccacgtgagaaagagcgccgacaaggaccccatgctgctgagcggcacccacgtgatggagggcagcggcagaatggtggtgaccgccgtgggcgtgaacagccagaccggcatcatcttcaccctgctgggcgccggcggcgaggaggaggagaagaaggacaagaaggccaagaagcaggacggcgccgtggccatggagatgcagcccctgaagagcgccgagggcggcgagatggaggagagagagaagaagaaggccaacgcccccaagaaggagaagagcgtgctgcagggcaagctgaccaagctggccgtgcagatcggcaaggccggcctggtgatgagcgccatcaccgtgatcatcctggtgctgtacttcgtgatcgagaccttcgtggtggagggcagaacctggctggccgagtgcacccccgtgtacgtgcagtacttcgtgaagttcttcatcatcggcgtgaccgtgctggtggtggccgtgcccgagggcctgcccctggccgtgaccatcagcctggcctacagcgtgaagaagatgatgaaggacaacaacctggtgagacacctggacgcctgcgagaccatgggcaacgccaccgccatctgcagcgacaagaccggcaccctgaccaccaacagaatgaccgtggtgcagagctacctgggcgacacccactacaaggagatccccgcccccagcgccctgacccccaagatcctggacctgctggtgcacgccatcagcatcaacagcgcctacaccaccaagatcctgccccccgagaaggagggcgccctgcccagacaggtgggcaacaagaccgagtgcgccctgctgggcttcgtgctggacctgaagagagacttccagcccgtgagagagcagatccccgaggacaagctgtacaaggtgtacaccttcaacagcgtgagaaagagcatgagcaccgtgatcagaatgcccgacggcggcttcagactgttcagcaagggcgccagcgagatcctgctgaagaagtgcaccaacatcctgaacagcaacggcgagctgagaggcttcagacccagagacagagacgacatggtgagaaagatcatcgagcccatggcctgcgacggcctgagaaccatctgcatcgcctacagagacttcagcgccggccaggagcccgactgggacaacgagaacgaggtggtgggcgacctgacctgcatcgccgtggtgggcatcgaggaccccgtgagacccgaggtgcccgaggccatcagaaagtgccagagagccggcatcaccgtgagaatggtgaccggcgacaacatcaacaccgccagagccatcgccgccaagtgcggcatcatccagcccggcgaggacttcctgtgcctggagggcaaggagttcaacagaagaatcagaaacgagaagggcgagatcgagcaggagagactggacaaggtgtggcccaagctgagagtgctggccagaagcagccccaccgacaagcacaccctggtgaagggcatcatcgacagcaccaccggcgagcagagacaggtggtggccgtgaccggcgacggcaccaacgacggccccgccctgaagaaggccgacgtgggcttcgccatgggcatcgccggcaccgacgtggccaaggaggccagcgacatcatcctgaccgacgacaacttcaccagcatcgtgaaggccgtgatgtggggcagaaacgtgtacgacagcatcagcaagttcctgcagttccagctgaccgtgaacgtggtggccgtgatcgtggccttcaccggcgcctgcatcacccaggacagccccctgaaggccgtgcagatgctgtgggtgaacctgatcatggacaccttcgccagcctggccctggccaccgagccccccaccgagagcctgctgctgagaaagccctacggcagagacaagcccctgatcagcagaaccatgatgaagaacatcctgggccacgccgtgtaccagctggccatcatcttcaccctgctgttcgtgggcgagctgttcttcgacatcgacagcggcagaaacgcccccctgcacagcccccccagcgagcactacaccatcatcttcaacaccttcgtgatgatgcagctgttcaacgagatcaacgccagaaagatccacggcgagagaaacgtgttcgacggcatcttcagcaaccccatcttctgcaccatcgtgctgggcaccttcggcatccagatcgtgatcgtgcagttcggcggcaagcccttcagctgcagccccctgagcaccgagcagtggctgtggtgcctgttcgtgggcgtgggcgagctggtgtggggccaggtgatcgccaccatccccaccagccagctgaagtgcctgaaggaggccggccacggccccggcaaggacgagatgaccgacgaggagctggccgagggcgaggaggagatcgaccacgccgagagagagctgagaagaggccagatcctgtggttcagaggcctgaacagaatccagacccagatggaggtggtgagcaccttcaagagaagcggcagcgtgcagggcgccgtgagaagaagaagcagcgtgctgagccagctgcacgacgtgaccaacctgagcacccccacccacgccatcctgagcgccgccaaccccaccagcgccgccggcaaccccggcggcgagagcgtgccctag

SEQ ID NO: 285401 - DNA, 3465 bp, Artificial Sequence
  derived and/or modified sequence
atgggcgacatggccaacagcagcatcgagttccaccccaagccccagcagcagagagacgtgccccaggccggcggcttcggctgcaccctggccgagctgagaaccctgatggagctgagaggcgccgaggccctgcagaagatcgaggaggcctacggcgacgtgagcggcctgtgcagaagactgaagaccagccccaccgagggcctggccgacaacaccaacgacctggagaagagaagacagatctacggccagaacttcatcccccccaagcagcccaagaccttcctgcagctggtgtgggaggccctgcaggacgtgaccctgatcatcctggaggtggccgccatcgtgagcctgggcctgagcttctacgccccccccggcgaggagagcgaggcctgcggcaacgtgagcggcggcgccgaggacgagggcgaggccgaggccggctggatcgagggcgccgccatcctgctgagcgtgatctgcgtggtgctggtgaccgccttcaacgactggagcaaggagaagcagttcagaggcctgcagagcagaatcgagcaggagcagaagttcaccgtgatcagaaacggccagctgctgcaggtgcccgtggccgccctggtggtgggcgacatcgcccaggtgaagtacggcgacctgctgcccgccgacggcgtgctgatccaggccaacgacctgaagatcgacgagagcagcctgaccggcgagagcgaccacgtgagaaagagcgccgacaaggaccccatgctgctgagcggcacccacgtgatggagggcagcggcagaatggtggtgaccgccgtgggcgtgaacagccagaccggcatcatcttcaccctgctgggcgccggcggcgaggaggaggagaagaaggacaagaaggccaagaagcaggacggcgccgtggccatggagatgcagcccctgaagagcgccgagggcggcgagatggaggagagagagaagaagaaggccaacgcccccaagaaggagaagagcgtgctgcagggcaagctgaccaagctggccgtgcagatcggcaaggccggcctggtgatgagcgccatcaccgtgatcatcctggtgctgtacttcgtgatcgagaccttcgtggtggagggcagaacctggctggccgagtgcacccccgtgtacgtgcagtacttcgtgaagttcttcatcatcggcgtgaccgtgctggtggtggccgtgcccgagggcctgcccctggccgtgaccatcagcctggcctacagcgtgaagaagatgatgaaggacaacaacctggtgagacacctggacgcctgcgagaccatgggcaacgccaccgccatctgcagcgacaagaccggcaccctgaccaccaacagaatgaccgtggtgcagagctacctgggcgacacccactacaaggagatccccgcccccagcgccctgacccccaagatcctggacctgctggtgcacgccatcagcatcaacagcgcctacaccaccaagatcctgccccccgagaaggagggcgccctgcccagacaggtgggcaacaagaccgagtgcgccctgctgggcttcgtgctggacctgaagagagacttccagcccgtgagagagcagatccccgaggacaagctgtacaaggtgtacaccttcaacagcgtgagaaagagcatgagcaccgtgatcagaatgcccgacggcggcttcagactgttcagcaagggcgccagcgagatcctgctgaagaagtgcaccaacatcctgaacagcaacggcgagctgagaggcttcagacccagagacagagacgacatggtgagaaagatcatcgagcccatggcctgcgacggcctgagaaccatctgcatcgcctacagagacttcagcgccggccaggagcccgactgggacaacgagaacgaggtggtgggcgacctgacctgcatcgccgtggtgggcatcgaggaccccgtgagacccgaggtgcccgaggccatcagaaagtgccagagagccggcatcaccgtgagaatggtgaccggcgacaacatcaacaccgccagagccatcgccgccaagtgcggcatcatccagcccggcgaggacttcctgtgcctggagggcaaggagttcaacagaagaatcagaaacgagaagggcgagatcgagcaggagagactggacaaggtgtggcccaagctgagagtgctggccagaagcagccccaccgacaagcacaccctggtgaagggcatcatcgacagcaccaccggcgagcagagacaggtggtggccgtgaccggcgacggcaccaacgacggccccgccctgaagaaggccgacgtgggcttcgccatgggcatcgccggcaccgacgtggccaaggaggccagcgacatcatcctgaccgacgacaacttcaccagcatcgtgaaggccgtgatgtggggcagaaacgtgtacgacagcatcagcaagttcctgcagttccagctgaccgtgaacgtggtggccgtgatcgtggccttcaccggcgcctgcatcacccaggacagccccctgaaggccgtgcagatgctgtgggtgaacctgatcatggacaccttcgccagcctggccctggccaccgagccccccaccgagagcctgctgctgagaaagccctacggcagagacaagcccctgatcagcagaaccatgatgaagaacatcctgggccacgccgtgtaccagctggccatcatcttcaccctgctgttcgtgggcgagctgttcttcgacatcgacagcggcagaaacgcccccctgcacagcccccccagcgagcactacaccatcatcttcaacaccttcgtgatgatgcagctgttcaacgagatcaacgccagaaagatccacggcgagagaaacgtgttcgacggcatcttcagcaaccccatcttctgcaccatcgtgctgggcaccttcggcatccagatcgtgatcgtgcagttcggcggcaagcccttcagctgcagccccctgagcaccgagcagtggctgtggtgcctgttcgtgggcgtgggcgagctggtgtggggccaggtgatcgccaccatccccaccagccagctgaagtgcctgaaggaggccggccacggccccggcaaggacgagatgaccgacgaggagctggccgagggcgaggaggagatcgaccacgccgagagagagctgagaagaggccagatcctgtggttcagaggcctgaacagaatccagacccagatggaggtggtgagcaccttcaagagaagcggcagcgtgcagggcgccgtgagaagaagaagcagcgtgctgagccagctgcacgacgtgaccaacctgagcacccccacccacgccatcctgagcgccgccaaccccaccagcgccgccggcagcgagagctag

SEQ ID NO: 285402 - protein, 721 aa, Artificial Sequence
  derived and/or modified sequence
MSISALGGRTKGKPLPPGEEERNNVLKQMKVRTTLKGDKSWITKQDESEGRTIELPSGRSRATSFSSAGEVPKPRPPSTRAPTGYIIRGVFTKPIDSSSQPQQQFPKANGTPKSAASLVRTANAGPPRPSSSGYKMTTEDYKKLAPYNIRRSSTSGDTEEEEEEEVVPFSSDEQKRRSEAASGVLRRTAPREHSYVLSAAKKSTGPTQETQAPFIAKRVEVVEEDGPSEKSQDPPALARSTPGSNSADGGRTKASRAIWIECLPSMPSPAGSQELSSRGEEIVRLQILTPRAGLRLVAPDVEGMRSSPGNKDKEAPCSRELQRDLAGEEAFRAPNTDAARSSAQLSDGNVGSGATGSRPEGLAAVDIGSERGRLCAAASFASFLEDQDGHSANSQSCKPRPAAISSSATSVSAVPADRKSNSTAAQEDAKADPKGALADYEGKDVATRVGEAWQERPGAPRGGQGDPAVPAQQPADPSTPERQSSPSGSEQLVRRESCGSSVLTDFEGKDVATKVGEAWQDRPGAPRGGQGDPAVPTQQPADPSTPEQQNSPSGSEQFVRRESCTSRVRSPSSCMVTVTVTATSEQPHIYIPAPASELDSSSTTKGILFVKEYVNASEVSSGKPVSARYSNVSSIEDSFAMEKKPPCGSTPYSERTTGGICTYCNREIRDCPKITLEHLGICCHEYCFKCGICSKPMGDLLDQIFIHRDTIHCGKCYEKLF

SEQ ID NO: 285403 - DNA, 2166 bp, Artificial Sequence
  derived and/or modified sequence
atgagcatcagcgccctgggcggcagaaccaagggcaagcccctgccccccggcgaggaggagagaaacaacgtgctgaagcagatgaaggtgagaaccaccctgaagggcgacaagagctggatcaccaagcaggacgagagcgagggcagaaccatcgagctgcccagcggcagaagcagagccaccagcttcagcagcgccggcgaggtgcccaagcccagaccccccagcaccagagcccccaccggctacatcatcagaggcgtgttcaccaagcccatcgacagcagcagccagccccagcagcagttccccaaggccaacggcacccccaagagcgccgccagcctggtgagaaccgccaacgccggcccccccagacccagcagcagcggctacaagatgaccaccgaggactacaagaagctggccccctacaacatcagaagaagcagcaccagcggcgacaccgaggaggaggaggaggaggaggtggtgcccttcagcagcgacgagcagaagagaagaagcgaggccgccagcggcgtgctgagaagaaccgcccccagagagcacagctacgtgctgagcgccgccaagaagagcaccggccccacccaggagacccaggcccccttcatcgccaagagagtggaggtggtggaggaggacggccccagcgagaagagccaggacccccccgccctggccagaagcacccccggcagcaacagcgccgacggcggcagaaccaaggccagcagagccatctggatcgagtgcctgcccagcatgcccagccccgccggcagccaggagctgagcagcagaggcgaggagatcgtgagactgcagatcctgacccccagagccggcctgagactggtggcccccgacgtggagggcatgagaagcagccccggcaacaaggacaaggaggccccctgcagcagagagctgcagagagacctggccggcgaggaggccttcagagcccccaacaccgacgccgccagaagcagcgcccagctgagcgacggcaacgtgggcagcggcgccaccggcagcagacccgagggcctggccgccgtggacatcggcagcgagagaggcagactgtgcgccgccgccagcttcgccagcttcctggaggaccaggacggccacagcgccaacagccagagctgcaagcccagacccgccgccatcagcagcagcgccaccagcgtgagcgccgtgcccgccgacagaaagagcaacagcaccgccgcccaggaggacgccaaggccgaccccaagggcgccctggccgactacgagggcaaggacgtggccaccagagtgggcgaggcctggcaggagagacccggcgcccccagaggcggccagggcgaccccgccgtgcccgcccagcagcccgccgaccccagcacccccgagagacagagcagccccagcggcagcgagcagctggtgagaagagagagctgcggcagcagcgtgctgaccgacttcgagggcaaggacgtggccaccaaggtgggcgaggcctggcaggacagacccggcgcccccagaggcggccagggcgaccccgccgtgcccacccagcagcccgccgaccccagcacccccgagcagcagaacagccccagcggcagcgagcagttcgtgagaagagagagctgcaccagcagagtgagaagccccagcagctgcatggtgaccgtgaccgtgaccgccaccagcgagcagccccacatctacatccccgcccccgccagcgagctggacagcagcagcaccaccaagggcatcctgttcgtgaaggagtacgtgaacgccagcgaggtgagcagcggcaagcccgtgagcgccagatacagcaacgtgagcagcatcgaggacagcttcgccatggagaagaagcccccctgcggcagcaccccctacagcgagagaaccaccggcggcatctgcacctactgcaacagagagatcagagactgccccaagatcaccctggagcacctgggcatctgctgccacgagtactgcttcaagtgcggcatctgcagcaagcccatgggcgacctgctggaccagatcttcatccacagagacaccatccactgcggcaagtgctacgagaagctgttctag

SEQ ID NO: 285404 - DNA, 2166 bp, Artificial Sequence
  derived and/or modified sequence
atgagcatcagcgccctcggggggcggacaaaaggaaaacccctgccccccggtgaagaggaacggaacaatgttcttaaacagatgaaggtgcgcacaaccctgaagggagacaagagctggattaccaaacaggatgaaagcgaaggtaggacaattgaactcccttccggacgcagcagagctacgtcctttagttccgctggagaggtgcccaaaccacggcccccctcgacgagggcgccaacaggatacattataaggggagtgtttacgaaacccatcgattcatccagccagccccagcaacagttcccgaaagcaaatggaacccccaaaagcgcagccagcctggtccgaactgcgaatgctggaccaccaagacccagctctagtggatataagatgaccaccgaggactacaaaaaacttgccccctacaacatcagaaggagctccacctccggggacactgaagaggaggaggaagaggaggtcgtcccattcagttcggatgaacagaaacgcagaagtgaggccgctagcggcgtcctgagacgaacagccccacgagaacatagttacgtactaagcgctgctaagaagtctactggccctacgcaggagacacaggccccattcatagccaaaagagtcgaggtggttgaggaagatggcccaagcgagaagagtcaggatccacctgctcttgctcgcagcacccccggctcaaattccgcagatggcggccgaaccaaagcaagcagagcgatttggatcgaatgtctgccatcaatgccttctccggccgggagccaggagttatcctcacgtggtgaagagattgttaggctgcagatcctgaccccgcgagccggactccgcctggttgcccccgatgtggaaggcatgaggtcctcgccggggaacaaagacaaggaggctccctgtagcagagaactgcagagagacctggctggtgaagaagcttttcgcgctcctaacacggacgccgcgaggtcttccgctcagctgagcgatggtaacgtggggtctggagcaacagggagccgccctgaggggctggctgccgtcgacattggatccgaacgtggtaggctttgtgccgccgcctctttcgccagttttcttgaagaccaagacggccacagcgcaaattcacagagttgtaaacccagacctgccgccatctcgagttctgcaacctccgtaagcgccgtcccagccgaccgcaagagtaattctacggccgcccaggaagatgctaaggctgatcctaagggcgcattggcggactacgagggcaaagatgtcgctacccgagtgggggaagcctggcaggagcgaccaggcgccccaagggggggacagggggatccagcggtacccgcacagcagcccgctgatccgtcgacccccgagcggcagtcctccccttccggttcagaacagctggtgcggagggaatcatgtggatcatctgtactgacagattttgagggtaaggatgtggctaccaaggtgggggaggcatggcaagatagaccgggtgcccctagaggtggccaaggcgacccagctgtccctacacaacaaccagcagacccatccacgccagagcagcagaacagcccgtctggctctgaacagttcgtgcggcgtgagagttgcacctcaagggtgagaagtcccagcagttgtatggtgacggtaaccgtgacagccacttcagaacagccgcatatttatatccctgccccagcaagtgaactcgattcttcatctactacgaaagggattcttttcgtgaaggagtacgtcaatgccagtgaagtgtctagcggcaagcccgtgtctgcacggtattcaaatgtctcctctattgaggacagctttgctatggagaaaaagccaccctgtggttcaaccccatattccgagcggaccaccggcggcatatgtacgtattgcaatcgggagatccgagactgccccaagattacattggagcacctgggcatttgttgtcacgagtattgcttcaaatgtggcatttgctccaaaccgatgggcgacctgcttgatcaaattttcatacaccgtgataccatccactgtggaaagtgctacgagaagctgttttag

SEQ ID NO: 285405 - DNA, 2166 bp, Artificial Sequence
  derived and/or modified sequence
atgagcatcagcgccctgggcggccgcaccaagggcaagcccctgcccccaggagaggaggagaggaacaacgtgctgaagcagatgaaggtgaggaccaccctgaagggggacaagtcctggatcaccaagcaggatgagagcgagggccgcaccatcgagctgcccagcggccgcagccgggccaccagcttcagcagcgctggggaggtgcccaagccccggccccccagcacccgggcccccaccggctacatcatccggggcgtcttcaccaagcccatcgacagcagcagccagccccagcagcagttccccaaggccaacggcacccccaagtctgctgccagcctggtgaggacagccaatgccggccccccccggcccagcagcagcggctacaagatgaccacagaggactacaagaagctggccccctacaacatccgccgcagcagcaccagcggggacacagaggaggaggaggaggaggaggtggtgcccttcagcagtgatgagcagaagagaagaagtgaggccgccagcggcgtgctgcggaggacagccccccgggagcacagctatgtgctgtctgctgccaagaagagcacaggccccacccaggagacccaggcccccttcatcgccaagagggtggaggtggtggaggaggatggccccagcgagaagagccaggaccccccagccctggcccggagcaccccaggcagcaacagcgcagatggcggccgcaccaaggccagccgggccatctggattgaatgtctgcccagcatgcccagccctgctggcagccaggagctgagcagcagaggagaggagatcgtgcggctgcagatcctgaccccccgggccggcctgcggctggtggccccagatgtggagggcatgaggagcagccctggcaacaaggacaaggaggccccctgcagccgggagctgcagagggacctggccggggaggaggccttccgggcccccaacacagatgctgcccggagcagcgcccagctgagtgatggaaatgtgggcagcggggccaccggcagcaggcctgagggcctggccgctgtggacatcggcagcgagcggggccgcctgtgtgccgccgccagctttgccagcttcctggaggaccaggacggccacagcgccaacagccagagctgcaagcccaggcctgctgccatcagcagcagcgccacctctgtgtctgctgtgcctgctgacaggaagagcaacagcacagctgcccaggaggatgccaaggctgaccccaagggggccctggccgactatgagggcaaggatgtggccaccagggtgggggaggcctggcaggagaggcctggggccccccggggcggccagggcgaccctgctgtgcctgcccagcagcctgctgaccccagcaccccagagcggcagagcagccccagcggcagcgagcagctggtgcggcgggagagctgtggcagctctgtgctgacagactttgagggcaaggatgtggccaccaaggtgggggaggcctggcaggacaggcctggggccccccggggcggccagggcgaccctgctgtgcccacccagcagcctgctgaccccagcaccccagagcagcagaacagccccagcggcagcgagcagtttgtgcggcgggagagctgcaccagccgggtgcgcagccccagcagctgcatggtgacagtgacagtgacagccaccagcgagcagccccacatctacatcccagccccagccagcgagctggacagcagcagcaccaccaagggcatcctgtttgtgaaggagtatgtgaatgccagcgaggtgtcctctgggaagcctgtgtctgcccgctacagcaatgtgagcagcattgaggacagctttgccatggagaagaagccaccctgtggcagcaccccctacagcgagaggaccactggaggcatctgcacctactgcaaccgggagatccgggactgccccaagatcaccctggagcacctgggcatctgctgccacgagtactgcttcaagtgtggcatctgcagcaagcccatgggagacctgctggaccagatcttcatccaccgggacaccatccactgtgggaaatgttatgagaagctgttctag

SEQ ID NO: 285406 - DNA, 2166 bp, Artificial Sequence
  derived and/or modified sequence
atgagcatcagcgccctgggcggccggaccaagggcaagcccctgcctcctggcgaggaagagaggaacaatgtcttgaagcagatgaaagtccggaccaccctaaagggggacaaatcgtggatcacaaagcaggacgagtcagaaggacggacaattgagctgccctccgggagaagcagggcaacaagcttctcctccgctggcgaggtgccaaaaccaaggcctccctccactagagccccaactggctatatcattcggggagttttcaccaagcccattgatagcagctcccagcctcaacaacagttcccgaaagctaatggaacccccaagagtgctgctagtctggttcgaaccgccaacgcaggtcctccaagaccatccagttccggctacaagatgaccaccgaagactacaaaaaattagcaccctataatatccggcgcagcagtacgagtggtgacaccgaggaagaggaagaagaggaggtagtacctttttcctcagatgaacagaagcgacgtagtgaagcagcctcaggagtgttaaggcgcaccgctcccagggagcattcctacgtgctcagtgccgctaaaaagagtactgggcccacccaagagacgcaagcgccgttcatagcaaagagagttgaagtggtggaagaagacggtccaagtgaaaagagccaggacccgcccgccttggctcgttccacccctggatctaattcagcagacgggggtcgcaccaaagcgtcgcgagccatttggattgaatgcctcccatctatgcccagccccgcaggctcgcaggagctgagctcacgaggagaagaaattgtgaggctccaaatcttaacgccgcgtgccggcctgagactggtagcgcctgacgttgaggggatgagatcatcccctggaaataaagataaggaagctccctgttctcgggagctgcaacgggaccttgctggtgaggaggcattccgagcccctaatacggatgccgcccgctccagtgcccagctgtccgacggcaatgtcgggagcggagcgactggctcccgacctgagggtctcgcagcagtggacattggttccgagcggggacggctttgcgccgccgcgagttttgcatcctttcttgaggatcaggacggtcactcagccaatagtcagagttgtaaaccgcggccagccgccattagttcctccgcaacaagcgtctctgctgtccctgctgatcggaaatcaaacagcactgcggcacaggaggacgcaaaagccgaccctaagggggccctcgcggactacgaaggaaaggatgtggccaccagagtgggcgaggcctggcaagaacgtccaggcgccccccgcgggggtcaaggggatcccgccgtgcctgctcagcaacctgctgatccctctacccccgagcgccagagtagcccctccggatctgaacagctggtccgccgggaatcatgcgggagctccgtgttgacagacttcgaaggcaaagatgtggctacaaaagtgggagaagcctggcaggatcgccctggagcgcctcggggggggcagggggacccagcagtgcctactcagcagccagcggacccatcaacaccagagcagcagaacagcccttccggtagcgagcagttcgtccgccgggaatcatgcacatctcgtgttcgtagcccctccagttgcatggtgactgtcactgtaactgctacaagtgaacagcctcatatttacattcccgctccagcgagtgaactcgactcaagtagcaccactaagggcatcctgttcgtgaaggaatacgtgaatgcttcagaggtgtccagtgggaaaccagtgtcagctcggtactcgaacgtcagtagtatcgaagattcttttgccatggagaagaagcccccatgcggctccaccccttactcagagcggacaaccggtggcatctgcacatattgcaaccgtgagatacgggactgtcctaaaataactctggagcacctggggatttgctgtcatgaatactgctttaagtgcggcatctgctcaaagccgatgggcgacctcctcgaccagatattcatacatagagacaccatacattgcggtaagtgctatgaaaagctcttctag

SEQ ID NO: 285407 - DNA, 2166 bp, Artificial Sequence
  derived and/or modified sequence
atgagcataagcgcgctggggggacgcactaaggggaagcctctgccaccgggagaagaggaaagaaataacgtcctgaagcagatgaaggttagaaccactctgaagggggataagagttggattacaaaacaggacgagagcgaaggtcgcacaatagagctcccaagcggccgaagccgggcaacaagtttctcaagtgccggagaagtgccaaaacctagacccccatcgacacgggctcctacaggttacatcattcggggtgtgtttaccaagccaatcgactcctcctcacagccgcagcaacagttccctaaggccaacgggacaccgaagagtgcagcctccctcgtccgaacggctaacgctgggccacctcgcccatcatctagcggatataagatgaccactgaagactataaaaagctcgccccatacaacattcggaggtccagcacctcaggcgacacggaggaagaggaggaggaagaggtggtacctttcagttccgacgaacagaagcgaagatccgaagcggcttccggggtgctcagacgaacggctccacgcgaacatagctatgtcttgagcgccgcaaagaagagtactggacctacgcaggaaacccaggcaccgtttattgctaagcgtgtcgaggtcgtcgaggaggatggaccaagcgaaaaatcccaggatcccccagcactggcgaggtccaccccaggatcaaactccgcagacgggggtcgaaccaaagccagtagggcgatctggattgaatgtctcccaagcatgcctagtccggctggatcccaggaattgtctagccgtggggaagaaattgtccgattacagattttgaccccacgggcaggattgcgcctagtggcaccagacgtggaaggtatgagatctagccctggaaacaaggacaaagaagcgccttgttcccgggagcttcagagagatctggccggtgaagaggcatttcgcgctcccaacacagacgctgctcggagcagcgctcaattgtctgacggcaatgtcgggagcggggcaaccggcagtcgccctgaaggactcgctgccgtcgatatcgggagtgaaaggggcagattgtgtgctgccgcaagcttcgcttcattcctggaagaccaagatggacatagcgctaattctcagtcatgcaagcctcgtccagcggctatttcttcaagcgccacgtccgtttcagctgtgcctgccgatcggaaaagcaactccaccgcagcccaagaggacgctaaggccgatcccaaaggggctctggccgattacgaggggaaagatgtggctactcgcgtcggagaggcttggcaagagcggcctggtgcaccgagaggcggacagggcgatccagcagtacccgctcaacagccagctgatccctccaccccagagagacaaagcagcccgagtggaagtgaacaactagtccgcagggagagttgtggctctagtgtcctcacagactttgaaggtaaagatgtcgccaccaaggttggcgaggcttggcaggaccggcctggagcgcctagaggagggcagggcgaccctgcagtgcccacccagcagccagccgacccttcgactccagagcagcagaatagcccatctggatccgagcaatttgtgcgccgtgaaagctgcactagccgggttcggagcccgtccagctgtatggtcactgttactgtgacagccacgtccgagcagcctcatatctacatccctgcgccagctagcgagctcgattccagctcgacgacaaaagggatcctgttcgtgaaagagtatgtcaacgcgtccgaggtgagtagcggtaagccggtaagcgctcgctatagcaatgtgtcctcaattgaggactctttcgccatggaaaagaaaccaccatgcggttcgaccccgtatagcgagcgcactaccggcggaatatgcacttattgtaatcgcgaaatacgcgattgccctaagattacgctggagcaccttggcatctgttgccatgagtattgcttcaagtgcgggatttgttccaagccaatgggggacctactagatcagatttttattcatcgagataccatccactgtggcaagtgttacgagaaactgttttag

SEQ ID NO: 285408 - DNA, 4421 bp, Artificial Sequence
  derived and/or modified sequence
cagaagccctgctgaatcaagtgagaggagagctgcggagcaatcaccatgagtatctcagctcttggaggccgcaccaaagggaagcctctgccaccaggcgaggaggagcgcaataacgttctcaagcagatgaaagtgcgaaccacgctgaagggggacaagagctggattaccaagcaggatgaatcggagggtcgcaccatagagctgccctcaggccggagtcgcgccacatccttttcatcagctggggaggttccgaagcctaggcctccgagcacaagggctcccactggctacatcatccggggagtgttcaccaagcccatagacagctcttcccagccccagcagcagttccccaaggccaacgggactccaaaaagtgctgccagtctggtgagaacagctaacgctggtcctccccgcccctcctcctctggctacaagatgaccactgaggattacaagaagctggcaccctacaatatcaggcgcagctctacatcaggggacaccgaggaggaggaggaggaggaggtggtgccattctcctcagatgaacagaaacggaggtcagaggctgcaagcggtgttctgaggaggacagctccccgggagcactcctacgtcctgtcagcggccaagaagagcactggtcctacccaggagacacaggcaccgtttatcgcgaagagggtggaggtggtggaagaggacgggccttctgagaagagccaggacccacctgctctggcaagatccactcctggctcaaacagtgcggatggaggcaggaccaaagcgtctcgggcaatttggatcgagtgcctgccaagtatgcctagccccgctgggagccaggagctcagctcaagaggtgaggaaattgtccgcctgcagatcctgacacccagggcaggactccgcctggtggccccagacgtggaaggcatgaggtcttccccaggcaacaaagacaaggaggccccctgctccagagagctccagagggacttggctggtgaggaggctttcagggcccccaacacagatgctgcaaggtcaagtgcacagttgagtgatggcaatgtgggatccggagccacgggctcccggcctgaaggcttggctgcagtagacatcggctccgagagaggaaggctgtgtgcagctgctagctttgcctctttcctggaagaccaggatgggcacagtgccaactctcagtcctgcaagcctagaccagcagccatcagctccagtgccacttcagtctctgctgtccctgctgataggaagagcaacagcacagcagcccaggaggatgcaaaggcagacccaaagggggccttggctgattatgaggggaaggatgtggccaccagggtcggagaggcctggcaggagaggcctggagctccaagaggtggccaaggagacccagctgtacccgctcagcaacctgcagatcccagcaccccagagcggcagagcagccccagcggatctgagcaacttgtcagacgagagagttgtggcagcagcgtgttgactgattttgaggggaaggatgtggccaccaaggtcggagaggcctggcaggacaggcctggagccccaagaggtggccaaggagacccagctgtacccactcagcaacctgcagatcccagtaccccagaacagcagaacagccccagcggatctgagcaattcgtcagacgagagagctgcaccagcagggtgaggagcccctcgagctgcatggtcactgttactgtcactgccacatctgagcagcctcacatttatattccagcccccgcaagtgaattggactccagctctaccaccaaagggattctcttcgtgaaggagtacgtgaatgctagtgaagtgtcttctgggaagccagtatctgcacgctatagcaacgtcagcagcattgaggactcattcgccatggagaagaagcctccatgtggcagcactccatactctgagaggacaactggagggatctgtacttactgcaaccgtgagatccgagactgtccaaagattaccctagaacatcttggtatctgctgccatgaatattgctttaagtgtgggatttgcagtaaaccgatgggcgatctcctggatcagatcttcattcaccgtgacaccattcactgtgggaaatgctatgagaagctcttctagcgaccccccaccgccaggctgatcagaagctgatgactcgtggacaaatttggctgtccccagttttgccccaagttgctgtctccccttccctcacctcctccctccctgtttgatttcttcatgcttttgcccttctcaagttgaagttgcatacatccaatatcgtatcttaatgatgctatgataattgcttgtgtgtgtagcttcttgtagcttagaaagcgctttatgcccatgatgtcatttcaggctcaaccaaagaggatcaaacaggaattccatcttggcttccctaagacagattggctttctaatgagtttaagtgggcagaagtgtagggttcagtgtgtcctgactcccttgaggcttataatgggccaagttgaagactgttgatgatccctggtgggtaaattgcagacatcaaatgctagggattggcataggctagtgtttagcttgtctatttgccatatctattttttttaaatttccatacacttgtaaaagtagttagttgcttttgattgagttatatagcagtttttcatttggtcttccactcacctttcactatatttgagtgttcccttacaggtatgttggcatgtgttggaaaatttacacaattaggtttaaattcagtaggatgtgattttaggatgctactgatcaaagtgatatctgtgtctgttggaatcttgatagctgattaatttgccctcaattctgctccctgaacttcacacataaatcttcccaagtgggttttagggtgtatagatcccagcaggattaaggaggtggaaaagcagctaacatttcttgaggctctaccacatagcaggcactgtcacagagtaatggcattaatccccataataatcctgtgaaggtgatattctcatcccatcttagacatgaggatattggaactcagagaggtggctattgcattgcgcagaacgctacagagcccatgctcttcccagagcagcacccacaaaagcaagcattgattttgtgctcagtgtgtgccaagcactgtgcagagggtacacagttcctgccaggttaacaccctcccttcaggcctcccaaaggcataggcttgcaaagagcagaaggtgtgaaatcacactcttcctctgggcatcctggatccctgaattatccccccccccatgaagtacttcaagggccaagctgcccctttccctcctctccgcccatgaaaatgcctccaaactgagatgctttcagctgagaacagatttgactcacagacattaccaaagaggagcttgtgaatccaggaaaagctccagggggctagctgatctgagcagagagctttcagtgacccattttcctgtctagactctgccttaagctagtggcaactgctggggccccaggtacttgggacatggaaactcgttggatggctgggcagatgtaagcctgtccatgcagtcagccgatcctctgctcaggttcagctggactctgccatctgtgggcccagcatcactctgtaagttccttgaaaggaagaacaaccttagagtatttctgatacaaaatgagggcctctgctcttgatttaattataaaatgtctacgtctttctccagtttctgagccctatgcacattggcttgtgggcttgttcttcctgccaaatgatcagagaggaacattccatttatttgtagtggatttcctctggagggcatgtacccacactaaataccaactgctcttcctcagctgtagtccccaacatcagacttggcacgtggtggacactaacacacaggcactcaatgaatgagtgaaggaaataaaagtcaccccgttggtgagaggtgctatccctgagtctcagtgcaggaccagtggatgaaaggcaaggtaaagaggcccaagataggctggcttcccccgttcaaggtatagtctgcctttaagggagttttagaaccaacatgcaagacattgaaagaaatcttgcaagagccattattgacttagatccaaaacagcctctctcatgtctaaaaaggcacagaattttgcagatctgaggaagagggatgcattacctttttgcttcttttcaattgcttagtgtttctaatcatacttaatccacactaatgtgcgcaattataataaatggtaagatatcacatgtgtc

SEQ ID NO: 285409 - DNA, 414 bp, Artificial Sequence
  derived and/or modified sequence
taggtgctcccacgcaggcatcgacataggctgtcacgacgcggctggagatggtggaaacggactggactgctgcgtagagcaagaacacacttactgtggcaggaccctctgcttgcacagactgtgaggatggaagccggtcctaagaggttgggacaatttggtagtagtgcctgtcaagtgtgtctggctcccttaggcgcccggtcatccgggctcccacaggcaaccaagaccaggcggcccccagccccggagtcatctaggggtacatggcttgtcagacgtctgagcgggccccccactcagatgcttcaggctcccgtcccattacagtctttgctgagcttgttgattggcagagccaccgcgcaacaaccaagacgcatgcagagacagacgcagcgttag

SEQ ID NO: 285410 - protein, 692 aa, Artificial Sequence
  derived and/or modified sequence
MSISALGGRTKGKPLPPGEEERNNVLKQMKVRTTLKGDKSWITKQDESEGRTIELPSGRSRATSFSSAGEVPKPRPPSTRAPTGYIIRGVFTKPIDSSSQPQQQFPKANGTPKSAASLVRTANAGPPRPSSSGYKMTTEDYKKLAPYNIRRSSTSGDTEEEEEEEVVPFSSDEQKRRSEAASGVLRRTAPREHSYVLSAAKKSTGPTQETQAPFIAKRVEVVEEDGPSEKSQDPPALARSTPGSNSADGGRTKASRAIWIECLPSMPSPAGSQELRSSPGNKDKEAPCSRELQRDLAGEEAFRAPNTDAARSSAQLSDGNVGSGATGSRPEGLAAVDIGSERGRLCAAASFASFLEDQDGHSANSQSCKPRPAAISSSATSVSAVPADRKSNSTAAQEDAKADPKGALADYEGKDVATRVGEAWQERPGAPRGGQGDPAVPAQQPADPSTPERQSSPSGSEQLVRRESCGSSVLTDFEGKDVATKVGEAWQDRPGAPRGGQGDPAVPTQQPADPSTPEQQNSPSGSEQFVRRESCTSRVRSPSSCMVTVTVTATSEQPHIYIPAPASELDSSSTTKGILFVKEYVNASEVSSGKPVSARYSNVSSIEDSFAMEKKPPCGSTPYSERTTGGICTYCNREIRDCPKITLEHLGICCHEYCFKCGICSKPMGDLLDQIFIHRDTIHCGKCYEKLF

SEQ ID NO: 285411 - DNA, 2079 bp, Artificial Sequence
  derived and/or modified sequence
atgagcatcagcgccctgggcggcagaaccaagggcaagcccctgccccccggcgaggaggagagaaacaacgtgctgaagcagatgaaggtgagaaccaccctgaagggcgacaagagctggatcaccaagcaggacgagagcgagggcagaaccatcgagctgcccagcggcagaagcagagccaccagcttcagcagcgccggcgaggtgcccaagcccagaccccccagcaccagagcccccaccggctacatcatcagaggcgtgttcaccaagcccatcgacagcagcagccagccccagcagcagttccccaaggccaacggcacccccaagagcgccgccagcctggtgagaaccgccaacgccggcccccccagacccagcagcagcggctacaagatgaccaccgaggactacaagaagctggccccctacaacatcagaagaagcagcaccagcggcgacaccgaggaggaggaggaggaggaggtggtgcccttcagcagcgacgagcagaagagaagaagcgaggccgccagcggcgtgctgagaagaaccgcccccagagagcacagctacgtgctgagcgccgccaagaagagcaccggccccacccaggagacccaggcccccttcatcgccaagagagtggaggtggtggaggaggacggccccagcgagaagagccaggacccccccgccctggccagaagcacccccggcagcaacagcgccgacggcggcagaaccaaggccagcagagccatctggatcgagtgcctgcccagcatgcccagccccgccggcagccaggagctgagaagcagccccggcaacaaggacaaggaggccccctgcagcagagagctgcagagagacctggccggcgaggaggccttcagagcccccaacaccgacgccgccagaagcagcgcccagctgagcgacggcaacgtgggcagcggcgccaccggcagcagacccgagggcctggccgccgtggacatcggcagcgagagaggcagactgtgcgccgccgccagcttcgccagcttcctggaggaccaggacggccacagcgccaacagccagagctgcaagcccagacccgccgccatcagcagcagcgccaccagcgtgagcgccgtgcccgccgacagaaagagcaacagcaccgccgcccaggaggacgccaaggccgaccccaagggcgccctggccgactacgagggcaaggacgtggccaccagagtgggcgaggcctggcaggagagacccggcgcccccagaggcggccagggcgaccccgccgtgcccgcccagcagcccgccgaccccagcacccccgagagacagagcagccccagcggcagcgagcagctggtgagaagagagagctgcggcagcagcgtgctgaccgacttcgagggcaaggacgtggccaccaaggtgggcgaggcctggcaggacagacccggcgcccccagaggcggccagggcgaccccgccgtgcccacccagcagcccgccgaccccagcacccccgagcagcagaacagccccagcggcagcgagcagttcgtgagaagagagagctgcaccagcagagtgagaagccccagcagctgcatggtgaccgtgaccgtgaccgccaccagcgagcagccccacatctacatccccgcccccgccagcgagctggacagcagcagcaccaccaagggcatcctgttcgtgaaggagtacgtgaacgccagcgaggtgagcagcggcaagcccgtgagcgccagatacagcaacgtgagcagcatcgaggacagcttcgccatggagaagaagcccccctgcggcagcaccccctacagcgagagaaccaccggcggcatctgcacctactgcaacagagagatcagagactgccccaagatcaccctggagcacctgggcatctgctgccacgagtactgcttcaagtgcggcatctgcagcaagcccatgggcgacctgctggaccagatcttcatccacagagacaccatccactgcggcaagtgctacgagaagctgttctag

SEQ ID NO: 285412 - DNA, 2079 bp, Artificial Sequence
  derived and/or modified sequence
atgtcaatatccgcactgggcggacgcacaaagggcaaaccattaccgccaggtgaagaggagaggaataacgtactcaaacagatgaaagtaaggacaaccctaaagggcgataagtcatggattacgaaacaagatgagtccgaaggacgtactattgaactgccatcgggacgcagtcgcgcaacatcatttagctctgccggcgaagtccccaaaccccgccctcccagcacgcgcgcacccactggctacataattcgaggtgtttttaccaagcctatagatagtagttcgcaacctcagcagcagttccctaaggccaacggcactccaaagagcgctgcaagtctagtaagaacagccaatgccgggccgccacgaccttcctcctctggctacaagatgaccaccgaggattacaaaaagctagcaccatacaacataagaagatccagtaccagcggagacaccgaagaagaggaagaagaggaggtggtgcccttttcatctgatgagcagaagcgcaggagcgaggccgccagcggcgtcttgagacgaaccgccccaagggagcattcttatgtcctttcagctgcaaagaaatcgaccgggcctacccaggaaactcaggcccccttcatagcaaagcgcgttgaggtggtggaggaagacggaccctccgagaaaagtcaggatcccccggccctcgcaaggagtaccccaggatctaatagtgcagacggcggtcgcaccaaagcctcccgggccatttggattgagtgtctccccagtatgcctagcccggccggttcccaggaactgaggagctcccccgggaacaaggataaagaggcaccctgtagtcgtgagctgcagcgtgatctggccggcgaagaggctttcagagcccctaatactgacgctgcccgcagctccgcccaacttagcgacgggaatgtcggatcaggagcaactggatcacggcctgaagggttggctgcagtggacatcggatcggagcggggcaggctctgtgccgccgcatcttttgctagttttcttgaagaccaagacggacactccgcaaacagccagagctgtaaaccccgaccggccgccatctcaagttccgcaaccagcgtatccgctgttccagccgaccgaaagagtaactccacagccgcacaggaggacgctaaagctgatcctaagggagcattagccgattacgaaggaaaggacgtggccacgagagtgggggaggcctggcaggaacggcctggagcccctcgcggggggcagggagatcctgccgtccccgctcagcagccagctgaccccagtaccccggagcgccagtcatctcctagcgggagtgagcaactggtgagacgggaaagttgcggatccagcgtgctcacagattttgagggcaaggatgttgccactaaagtcggcgaggcttggcaagacaggccaggtgcaccgcgaggaggccagggcgacccagccgtccctactcagcagcctgcggacccctccacgcctgagcagcaaaatagcccctcgggatctgagcaattcgttaggagagaaagctgtacctctcgggtccggtccccttcctcctgcatggttactgtgaccgtgaccgccacaagtgaacagccacatatctatataccagcccctgcctccgaactcgacagctcatcgacaaccaaaggaattctatttgttaaggagtacgtgaatgccagtgaggtgagcagtggcaagccagtttctgctagatacagtaacgtttctagcattgaggattcatttgcgatggagaaaaagcccccctgtggtagcaccccttattcagagcgcaccaccggtggcatatgtacctactgcaatagagagattcgggactgcccaaagattacgctggaacatttggggatatgttgtcacgagtattgtttcaaatgtggaatttgctccaaacccatgggggacttgctagaccagattttcattcacagagataccatccattgtgggaagtgttacgagaaactcttctag

SEQ ID NO: 285413 - DNA, 2079 bp, Artificial Sequence
  derived and/or modified sequence
atgagcatcagcgccctgggcggccgcaccaagggcaagcccctgcccccaggagaggaggagaggaacaacgtgctgaagcagatgaaggtgaggaccaccctgaagggggacaagtcctggatcaccaagcaggatgagagcgagggccgcaccatcgagctgcccagcggccgcagccgggccaccagcttcagcagcgctggggaggtgcccaagccccggccccccagcacccgggcccccaccggctacatcatccggggcgtcttcaccaagcccatcgacagcagcagccagccccagcagcagttccccaaggccaacggcacccccaagtctgctgccagcctggtgaggacagccaatgccggccccccccggcccagcagcagcggctacaagatgaccacagaggactacaagaagctggccccctacaacatccgccgcagcagcaccagcggggacacagaggaggaggaggaggaggaggtggtgcccttcagcagtgatgagcagaagagaagaagtgaggccgccagcggcgtgctgcggaggacagccccccgggagcacagctatgtgctgtctgctgccaagaagagcacaggccccacccaggagacccaggcccccttcatcgccaagagggtggaggtggtggaggaggatggccccagcgagaagagccaggaccccccagccctggcccggagcaccccaggcagcaacagcgcagatggcggccgcaccaaggccagccgggccatctggattgaatgtctgcccagcatgcccagccctgctggcagccaggagctgcggagcagccctggcaacaaggacaaggaggccccctgcagccgggagctgcagagggacctggccggggaggaggccttccgggcccccaacacagatgctgcccggagcagcgcccagctgagtgatggaaatgtgggcagcggggccaccggcagcaggcctgagggcctggccgctgtggacatcggcagcgagcggggccgcctgtgtgccgccgccagctttgccagcttcctggaggaccaggacggccacagcgccaacagccagagctgcaagcccaggcctgctgccatcagcagcagcgccacctctgtgtctgctgtgcctgctgacaggaagagcaacagcacagctgcccaggaggatgccaaggctgaccccaagggggccctggccgactatgagggcaaggatgtggccaccagggtgggggaggcctggcaggagaggcctggggccccccggggcggccagggcgaccctgctgtgcctgcccagcagcctgctgaccccagcaccccagagcggcagagcagccccagcggcagcgagcagctggtgagaagagagagctgtggcagctctgtgctgacagactttgagggcaaggatgtggccaccaaggtgggggaggcctggcaggacaggcctggggccccccggggcggccagggcgaccctgctgtgcccacccagcagcctgctgaccccagcaccccagagcagcagaacagccccagcggcagcgagcagtttgtgagaagagagagctgcaccagccgggtgcgcagccccagcagctgcatggtgacagtgacagtgacagccaccagcgagcagccccacatctacatcccagccccagccagcgagctggacagcagcagcaccaccaagggcatcctgtttgtgaaggagtatgtgaatgccagcgaggtgagcagcggcaagcctgtgtctgcccgctacagcaatgtgagcagcattgaagattcttttgccatggagaagaagccaccctgtggcagcaccccctacagcgagaggaccaccggcggcatctgcacctactgcaaccgggagatccgggactgccccaagatcaccctggagcacctgggcatctgctgccacgagtactgcttcaagtgtggcatctgcagcaagcccatgggagacctgctggaccagatcttcatccaccgggacaccatccactgtgggaagtgctatgagaagctgttctag

SEQ ID NO: 285414 - DNA, 2079 bp, Artificial Sequence
  derived and/or modified sequence
atgagcatcagcgccctgggcggccggaccaagggcaagcccctgccccctggggaagaagagagaaataatgtcctcaaacagatgaaggtccgcacaactctaaagggagacaagagctggatcaccaagcaggatgaaagcgagggaaggacaatagaactgcccagtgggcgcagccgtgctactagttttagctcagcaggcgaggtcccaaagccccggcccccatccacaagagcaccgactgggtacatcatacggggcgtgttcactaagccaatcgattcatctagccagccgcagcagcagttccccaaagctaacggaacgcccaaatcggccgccagcttggttaggaccgcaaacgcaggccccccgcggcctagctcaagcgggtacaagatgaccactgaggattataagaaattggccccctacaatattcgcaggtcgtctacaagtggggacaccgaggaagaggaggaggaggaggtagtaccttttagttctgacgaacagaaacggagatccgaggccgcttcaggggtactccgaagaaccgctccccgagaacatagttacgtgctctcagccgcaaagaagtccaccgggccaacacaggagactcaggcaccctttatagctaaaagggtcgaagtcgtggaggaggacgggccatccgagaagtctcaagatccgcccgcactggctagatctactcccgggtctaattccgctgacggtggacggacaaaggcctccagggccatttggatcgagtgcctgccctctatgccctcacccgcaggatctcaggaactgcgctctagcccgggcaataaagataaagaggctccttgttcaagagagctgcaaagggatctagcaggagaagaagcgtttagagccccaaataccgatgccgctcggtctagcgcccaactgtcggatggaaatgtgggtagtggcgcaactggatctagacctgaggggctagccgctgtggacataggcagcgagcggggcagactgtgtgctgctgcctcttttgctagtttccttgaagatcaagacggccacagtgcaaacagccaaagctgcaaaccacggccagccgccatttcatcctcggcaacctccgtttcagctgtgcccgccgaccggaaatcaaattctactgctgctcaagaggatgccaaggctgaccccaagggtgctctggcagactacgaaggcaaagacgtcgcgactagggtaggagaagcatggcaagaacggccaggagcaccaaggggcggccagggcgacccggccgtgcctgctcagcagcctgctgacccaagtacacccgaaagacagtcctctccctctggatccgagcaactggtgaggcgcgaatcctgtgggtcttccgtgcttactgattttgaaggaaaggacgtggccactaaggtgggagaggcttggcaggatcgcccaggcgcaccccgtggcgggcaaggagatccagccgtgcccacgcagcaaccagctgatcccagcacccctgaacagcagaattctccatcagggagtgagcagtttgttcgacgtgagagttgcacatcccgggtccgctccccttccagttgcatggtaacagtcacagttacggccacctccgagcaacctcacatctatatccctgcgcccgcatccgagctggattctagcagtactacgaagggcatactctttgtcaaggagtacgtcaatgcctccgaggtatcatcaggaaaacctgtttctgcgcgctattctaacgtatcttccatcgaggactcttttgccatggagaagaagccgccttgcggctccacgccgtacagtgagaggaccactggcggcatctgtacgtattgcaatcgggagatcagagattgtcctaagattactcttgaacatctcgggatttgctgccatgagtactgtttcaaatgtggcatttgtagcaagcctatgggcgatttattggatcaaatctttatacaccgagacaccatccattgtggcaagtgctacgaaaagctgttctag

SEQ ID NO: 285415 - DNA, 2079 bp, Artificial Sequence
  derived and/or modified sequence
atgtcaattagcgccctcggtggcaggacgaaaggcaaacccctacccccaggcgaggaggaaagaaataacgtgctgaaacagatgaaggtgcgcactacattgaagggggataaaagttggatcaccaagcaggatgagtcggaggggagaaccattgaactgccgtccggcagaagccgggcaacatcctttagttcagccggtgaggtgcccaagcccagacctccatccactcgggctccaactggatacattattcggggagtgttcactaagcccatcgactctagctcccagccccaacagcagttcccgaaggccaatggtacaccaaagagcgccgcatcgctcgtgagaactgcaaatgccggacccccaagacctagctcctctggctataagatgactacggaggattacaaaaaattggccccttataatataaggcgctcgtccaccagcggtgacactgaagaggaagaggaggaggaggtggttccctttagctccgacgagcagaaacgcaggtccgaagcggcatcaggcgtgctacggcgaactgccccacgtgagcactcctatgtcctgagcgccgctaaaaagtccaccgggcctacacaggaaactcaggctccctttattgcaaagagggtggaagtggtagaagaggatggtccctccgaaaagagtcaggaccccccagcccttgccaggtccacacccggatcaaattccgcagatgggggaagaaccaaggcttcccgggctatttggatcgagtgtctgcccagtatgccgtcccccgcagggtctcaagagcttcgctcgagccccggaaacaaggacaaggaggctccctgttcaagagagttgcagagagacctagcgggtgaagaggcatttcgtgctccaaacaccgatgctgctagatcgagcgcccagctctccgatggcaatgtaggatccggggcaactggctcacgacccgaggggctggccgcagtggatatagggagcgagagaggcaggctgtgtgccgctgcctcgtttgcatccttcctggaagaccaggatggccatagcgctaatagccagagctgtaaacccagacccgctgcaatctcttcctctgctactagtgtttctgccgtcccagccgacaggaaaagtaattcgactgcggctcaagaagacgctaaagcagatccgaaaggggcactcgctgactacgaggggaaggatgtggctacaagggttggggaggcatggcaagaaagacctggcgctcccagagggggacagggtgacccagcggttcctgcccagcaacccgctgatcctagcacgcccgagcgccagagttcgccgagtggctctgagcaactggtccggcgtgaatcgtgtgggagcagcgtactgacagatttcgagggcaaggatgtcgctaccaaagtcggcgaagcctggcaagataggcccggtgcccctagagggggacagggcgatccagccgtgcccacccaacagcccgctgatccttcgacccccgaacaacagaatagcccgagcggttcggaacagtttgtgaggcgcgaaagctgtacgagccgagttcggtctccatcctcttgtatggtcaccgtgacagtgacggccacttccgagcagccacacatctacattcccgcaccggcatcggagcttgattcctcatcgaccaccaaagggattcttttcgtcaaagaatacgtgaatgcaagtgaggtcagtagcggtaaaccagttagcgccaggtactcaaacgtgtcctcaattgaagactcattcgccatggagaagaaaccaccatgcggctctacgccctactctgaaaggacgacaggtgggatttgtacatattgtaacagggagattagggattgcccaaagataaccctagaacacctcgggatctgctgccacgaatattgtttcaagtgtggtatttgctcgaagccaatgggtgatcttcttgatcagatattcatacacagggacactatccattgcggcaaatgttatgagaaactgttctag

SEQ ID NO: 285416 - DNA, 4334 bp, Artificial Sequence
  derived and/or modified sequence
cagaagccctgctgaatcaagtgagaggagagctgcggagcaatcaccatgagtatctcagctcttggaggccgcaccaaagggaagcctctgccaccaggcgaggaggagcgcaataacgttctcaagcagatgaaagtgcgaaccacgctgaagggggacaagagctggattaccaagcaggatgaatcggagggtcgcaccatagagctgccctcaggccggagtcgcgccacatccttttcatcagctggggaggttccgaagcctaggcctccgagcacaagggctcccactggctacatcatccggggagtgttcaccaagcccatagacagctcttcccagccccagcagcagttccccaaggccaacgggactccaaaaagtgctgccagtctggtgagaacagctaacgctggtcctccccgcccctcctcctctggctacaagatgaccactgaggattacaagaagctggcaccctacaatatcaggcgcagctctacatcaggggacaccgaggaggaggaggaggaggaggtggtgccattctcctcagatgaacagaaacggaggtcagaggctgcaagcggtgttctgaggaggacagctccccgggagcactcctacgtcctgtcagcggccaagaagagcactggtcctacccaggagacacaggcaccgtttatcgcgaagagggtggaggtggtggaagaggacgggccttctgagaagagccaggacccacctgctctggcaagatccactcctggctcaaacagtgcggatggaggcaggaccaaagcgtctcgggcaatttggatcgagtgcctgccaagtatgcctagccccgctgggagccaggagctcaggtcttccccaggcaacaaagacaaggaggccccctgctccagagagctccagagggacttggctggtgaggaggctttcagggcccccaacacagatgctgcaaggtcaagtgcacagttgagtgatggcaatgtgggatccggagccacgggctcccggcctgaaggcttggctgcagtagacatcggctccgagagaggaaggctgtgtgcagctgctagctttgcctctttcctggaagaccaggatgggcacagtgccaactctcagtcctgcaagcctagaccagcagccatcagctccagtgccacttcagtctctgctgtccctgctgataggaagagcaacagcacagcagcccaggaggatgcaaaggcagacccaaagggggccttggctgattatgaggggaaggatgtggccaccagggtcggagaggcctggcaggagaggcctggagctccaagaggtggccaaggagacccagctgtacccgctcagcaacctgcagatcccagcaccccagagcggcagagcagccccagcggatctgagcaacttgtcagacgagagagttgtggcagcagcgtgttgactgattttgaggggaaggatgtggccaccaaggtcggagaggcctggcaggacaggcctggagccccaagaggtggccaaggagacccagctgtacccactcagcaacctgcagatcccagtaccccagaacagcagaacagccccagcggatctgagcaattcgtcagacgagagagctgcaccagcagggtgaggagcccctcgagctgcatggtcactgttactgtcactgccacatctgagcagcctcacatttatattccagcccccgcaagtgaattggactccagctctaccaccaaagggattctcttcgtgaaggagtacgtgaatgctagtgaagtgtcttctgggaagccagtatctgcacgctatagcaacgtcagcagcattgaggactcattcgccatggagaagaagcctccatgtggcagcactccatactctgagaggacaactggagggatctgtacttactgcaaccgtgagatccgagactgtccaaagattaccctagaacatcttggtatctgctgccatgaatattgctttaagtgtgggatttgcagtaaaccgatgggcgatctcctggatcagatcttcattcaccgtgacaccattcactgtgggaaatgctatgagaagctcttctagcgaccccccaccgccaggctgatcagaagctgatgactcgtggacaaatttggctgtccccagttttgccccaagttgctgtctccccttccctcacctcctccctccctgtttgatttcttcatgcttttgcccttctcaagttgaagttgcatacatccaatatcgtatcttaatgatgctatgataattgcttgtgtgtgtagcttcttgtagcttagaaagcgctttatgcccatgatgtcatttcaggctcaaccaaagaggatcaaacaggaattccatcttggcttccctaagacagattggctttctaatgagtttaagtgggcagaagtgtagggttcagtgtgtcctgactcccttgaggcttataatgggccaagttgaagactgttgatgatccctggtgggtaaattgcagacatcaaatgctagggattggcataggctagtgtttagcttgtctatttgccatatctattttttttaaatttccatacacttgtaaaagtagttagttgcttttgattgagttatatagcagtttttcatttggtcttccactcacctttcactatatttgagtgttcccttacaggtatgttggcatgtgttggaaaatttacacaattaggtttaaattcagtaggatgtgattttaggatgctactgatcaaagtgatatctgtgtctgttggaatcttgatagctgattaatttgccctcaattctgctccctgaacttcacacataaatcttcccaagtgggttttagggtgtatagatcccagcaggattaaggaggtggaaaagcagctaacatttcttgaggctctaccacatagcaggcactgtcacagagtaatggcattaatccccataataatcctgtgaaggtgatattctcatcccatcttagacatgaggatattggaactcagagaggtggctattgcattgcgcagaacgctacagagcccatgctcttcccagagcagcacccacaaaagcaagcattgattttgtgctcagtgtgtgccaagcactgtgcagagggtacacagttcctgccaggttaacaccctcccttcaggcctcccaaaggcataggcttgcaaagagcagaaggtgtgaaatcacactcttcctctgggcatcctggatccctgaattatccccccccccatgaagtacttcaagggccaagctgcccctttccctcctctccgcccatgaaaatgcctccaaactgagatgctttcagctgagaacagatttgactcacagacattaccaaagaggagcttgtgaatccaggaaaagctccagggggctagctgatctgagcagagagctttcagtgacccattttcctgtctagactctgccttaagctagtggcaactgctggggccccaggtacttgggacatggaaactcgttggatggctgggcagatgtaagcctgtccatgcagtcagccgatcctctgctcaggttcagctggactctgccatctgtgggcccagcatcactctgtaagttccttgaaaggaagaacaaccttagagtatttctgatacaaaatgagggcctctgctcttgatttaattataaaatgtctacgtctttctccagtttctgagccctatgcacattggcttgtgggcttgttcttcctgccaaatgatcagagaggaacattccatttatttgtagtggatttcctctggagggcatgtacccacactaaataccaactgctcttcctcagctgtagtccccaacatcagacttggcacgtggtggacactaacacacaggcactcaatgaatgagtgaaggaaataaaagtcaccccgttggtgagaggtgctatccctgagtctcagtgcaggaccagtggatgaaaggcaaggtaaagaggcccaagataggctggcttcccccgttcaaggtatagtctgcctttaagggagttttagaaccaacatgcaagacattgaaagaaatcttgcaagagccattattgacttagatccaaaacagcctctctcatgtctaaaaaggcacagaattttgcagatctgaggaagagggatgcattacctttttgcttcttttcaattgcttagtgtttctaatcatacttaatccacactaatgtgcgcaattataataaatggtaagatatcacatgtgtc

SEQ ID NO: 285417 - protein, 381 aa, Artificial Sequence
  derived and/or modified sequence
MTTEDYKKLAPYNIRRSSTSGDTEEEEEEEVVPFSSDEQKRRSEAASGVLRRTAPREHSYVLSAAKKSTGSPTQETQAPFIAKRVEVVEEDGPSEKSQDPPALARSTPGSNSADGGRTKASRAIWIECLPSMPSPAGSQELSSRGEEIVRLQILTPRAGLRLVAPDVEGMRSSPGNKDKEAPCSRELQRDLAGEEAFRAPNTDAARSSAQLSDGNVGSGATGSRPEGLAAVDIGSERGSSSATSVSAVPADRKSNSTAAQEDAKADPKGALADYEGKDVATRVGEAWQERPGAPRGGQGDPAVPAQQPADPSTPERQSSPSGSEQLVRRESCGSSVLTDFEGKDVATKVGEAWQDRPGPSCTHSATCRSQYPRTAEQPQRI

SEQ ID NO: 285418 - protein, 221 aa, Artificial Sequence
  derived and/or modified sequence
  misc_feature (1)..(1): Xaa can be any naturally occurring amino acid
XLRRTAPREHSYVLSAAKKSTGSPTQETQAPFIAKRVEVVEEDGPSEKSQDPPALARSTPGSNSADGGRTKASRAIWIECLPSMPSPAGSQELSSRGEEIVRLQILTPRAGLRLVAPDVEGMRSSPGNKDKEAPCSRELQRDLAGEEAFRAPNTDAARSSAQLSDGNVGSGATGSRPEGLAAVDIGSERGSSSATSVSAVPADRKSNSTAAQEDAKADPKG

SEQ ID NO: 285419 - protein, 690 aa, Artificial Sequence
  derived and/or modified sequence
MSISALGGRTKGKPLPPGEEERNNVLKQMKVRTTLKGDKSWITKQDESEGRTIELPSGRSRATSFSSAGEVPKPRPPSTRAPTGYIIRGVFTKPIDSSSQPQQQFPKANGTPKSAASLVRTANAGPPRPSSSGYKMTTEDYKKLAPYNIRRSSTSGDTEEEEEEEVVPFSSDEQKRRSEAASGVLRRTAPREHSYVLSAAKKSTGSPTQETQAPFIAKRVEVVEEDGPSEKSQDPPALARSTPGSNSADGGRTKASRAIWIECLPSMPSPAGSQELSSRGEEIVRLQILTPRAGLRLVAPDVEGMRSSPGNKDKEAPCSRELQRDLAGEEAFRAPNTDAARSSAQLSDGNVGSGATGSRPEGLAAVDIGSERGSSSATSVSAVPADRKSNSTAAQEDAKADPKGALADYEGKDVATRVGEAWQERPGAPRGGQGDPAVPAQQPADPSTPERQSSPSGSEQLVRRESCGSSVLTDFEGKDVATKVGEAWQDRPGAPRGGQGDPAVPTQQPADPSTPEQQNSPSGSEQFVRRESCTSRVRSPSSCMVTVTVTATSEQPHIYIPAPASELDSSSTTKGILFVKEYVNASEVSSGKPVSARYSNVSSIEDSFAMEKKPPCGSTPYSERTTGGICTYCNREIRDCPKITLEHLGICCHEYCFKCGICSKPMGDLLDQIFIHRDTIHCGKCYEKLF

SEQ ID NO: 285420 - DNA, 1146 bp, Artificial Sequence
  derived and/or modified sequence
atgaccaccgaggactacaagaagctggccccctacaacatcagaagaagcagcaccagcggcgacaccgaggaggaggaggaggaggaggtggtgcccttcagcagcgacgagcagaagagaagaagcgaggccgccagcggcgtgctgagaagaaccgcccccagagagcacagctacgtgctgagcgccgccaagaagagcaccggcagccccacccaggagacccaggcccccttcatcgccaagagagtggaggtggtggaggaggacggccccagcgagaagagccaggacccccccgccctggccagaagcacccccggcagcaacagcgccgacggcggcagaaccaaggccagcagagccatctggatcgagtgcctgcccagcatgcccagccccgccggcagccaggagctgagcagcagaggcgaggagatcgtgagactgcagatcctgacccccagagccggcctgagactggtggcccccgacgtggagggcatgagaagcagccccggcaacaaggacaaggaggccccctgcagcagagagctgcagagagacctggccggcgaggaggccttcagagcccccaacaccgacgccgccagaagcagcgcccagctgagcgacggcaacgtgggcagcggcgccaccggcagcagacccgagggcctggccgccgtggacatcggcagcgagagaggcagcagcagcgccaccagcgtgagcgccgtgcccgccgacagaaagagcaacagcaccgccgcccaggaggacgccaaggccgaccccaagggcgccctggccgactacgagggcaaggacgtggccaccagagtgggcgaggcctggcaggagagacccggcgcccccagaggcggccagggcgaccccgccgtgcccgcccagcagcccgccgaccccagcacccccgagagacagagcagccccagcggcagcgagcagctggtgagaagagagagctgcggcagcagcgtgctgaccgacttcgagggcaaggacgtggccaccaaggtgggcgaggcctggcaggacagacccggccccagctgcacccacagcgccacctgcagaagccagtaccccagaaccgccgagcagccccagagaatctag

SEQ ID NO: 285421 - DNA, 666 bp, Artificial Sequence
  derived and/or modified sequence
tgactgagaagaaccgcccccagagagcacagctacgtgctgagcgccgccaagaagagcaccggcagccccacccaggagacccaggcccccttcatcgccaagagagtggaggtggtggaggaggacggccccagcgagaagagccaggacccccccgccctggccagaagcacccccggcagcaacagcgccgacggcggcagaaccaaggccagcagagccatctggatcgagtgcctgcccagcatgcccagccccgccggcagccaggagctgagcagcagaggcgaggagatcgtgagactgcagatcctgacccccagagccggcctgagactggtggcccccgacgtggagggcatgagaagcagccccggcaacaaggacaaggaggccccctgcagcagagagctgcagagagacctggccggcgaggaggccttcagagcccccaacaccgacgccgccagaagcagcgcccagctgagcgacggcaacgtgggcagcggcgccaccggcagcagacccgagggcctggccgccgtggacatcggcagcgagagaggcagcagcagcgccaccagcgtgagcgccgtgcccgccgacagaaagagcaacagcaccgccgcccaggaggacgccaaggccgaccccaagggctag

SEQ ID NO: 285422 - DNA, 2073 bp, Artificial Sequence
  derived and/or modified sequence
atgagcatcagcgccctgggcggcagaaccaagggcaagcccctgccccccggcgaggaggagagaaacaacgtgctgaagcagatgaaggtgagaaccaccctgaagggcgacaagagctggatcaccaagcaggacgagagcgagggcagaaccatcgagctgcccagcggcagaagcagagccaccagcttcagcagcgccggcgaggtgcccaagcccagaccccccagcaccagagcccccaccggctacatcatcagaggcgtgttcaccaagcccatcgacagcagcagccagccccagcagcagttccccaaggccaacggcacccccaagagcgccgccagcctggtgagaaccgccaacgccggcccccccagacccagcagcagcggctacaagatgaccaccgaggactacaagaagctggccccctacaacatcagaagaagcagcaccagcggcgacaccgaggaggaggaggaggaggaggtggtgcccttcagcagcgacgagcagaagagaagaagcgaggccgccagcggcgtgctgagaagaaccgcccccagagagcacagctacgtgctgagcgccgccaagaagagcaccggcagccccacccaggagacccaggcccccttcatcgccaagagagtggaggtggtggaggaggacggccccagcgagaagagccaggacccccccgccctggccagaagcacccccggcagcaacagcgccgacggcggcagaaccaaggccagcagagccatctggatcgagtgcctgcccagcatgcccagccccgccggcagccaggagctgagcagcagaggcgaggagatcgtgagactgcagatcctgacccccagagccggcctgagactggtggcccccgacgtggagggcatgagaagcagccccggcaacaaggacaaggaggccccctgcagcagagagctgcagagagacctggccggcgaggaggccttcagagcccccaacaccgacgccgccagaagcagcgcccagctgagcgacggcaacgtgggcagcggcgccaccggcagcagacccgagggcctggccgccgtggacatcggcagcgagagaggcagcagcagcgccaccagcgtgagcgccgtgcccgccgacagaaagagcaacagcaccgccgcccaggaggacgccaaggccgaccccaagggcgccctggccgactacgagggcaaggacgtggccaccagagtgggcgaggcctggcaggagagacccggcgcccccagaggcggccagggcgaccccgccgtgcccgcccagcagcccgccgaccccagcacccccgagagacagagcagccccagcggcagcgagcagctggtgagaagagagagctgcggcagcagcgtgctgaccgacttcgagggcaaggacgtggccaccaaggtgggcgaggcctggcaggacagacccggcgcccccagaggcggccagggcgaccccgccgtgcccacccagcagcccgccgaccccagcacccccgagcagcagaacagccccagcggcagcgagcagttcgtgagaagagagagctgcaccagcagagtgagaagccccagcagctgcatggtgaccgtgaccgtgaccgccaccagcgagcagccccacatctacatccccgcccccgccagcgagctggacagcagcagcaccaccaagggcatcctgttcgtgaaggagtacgtgaacgccagcgaggtgagcagcggcaagcccgtgagcgccagatacagcaacgtgagcagcatcgaggacagcttcgccatggagaagaagcccccctgcggcagcaccccctacagcgagagaaccaccggcggcatctgcacctactgcaacagagagatcagagactgccccaagatcaccctggagcacctgggcatctgctgccacgagtactgcttcaagtgcggcatctgcagcaagcccatgggcgacctgctggaccagatcttcatccacagagacaccatccactgcggcaagtgctacgagaagctgttctag

SEQ ID NO: 285423 - DNA, 1146 bp, Artificial Sequence
  derived and/or modified sequence
atgacaacagaggattacaaaaagttggccccctataacattaggcgcagctctaccagtggggacaccgaagaagaagaggaggaagaggtggtacccttctcttctgatgagcagaaacgccgtagtgaggccgcctccggcgtgctgcggcgcaccgccccccgcgaacacagctacgttctcagcgcggctaaaaagtccactggatcacctacccaagagacgcaagctcccttcattgccaagagagtggaggtggtggaagaagacggcccctctgagaagtcacaggatccaccagccttggcccgctctacaccaggatctaactctgcagatggaggtcgtacaaaggcctcgagagcaatatggattgagtgtctgcccagtatgcctagtcctgctggcagtcaggagctgtcgtcccggggcgaagaaattgtccgactgcagatcctcacaccccgcgccggtctgcggctggtggcaccagacgtggagggcatgcgtagctcaccaggtaacaaagataaggaggcaccctgcagcagagaacttcagcgggatctggcaggcgaagaagcctttcgagccccgaatacagatgcagcgaggtccagtgcccagctttcagacggtaacgtggggtccggcgcgacaggatccagaccggaaggccttgctgccgtcgacattggatcagagcgcggctcctcttcagctacgtctgtgtcagcggtgcccgccgaccgcaagagcaatagtaccgcagctcaggaggacgccaaagctgaccctaagggggccttagccgattatgagggcaaggatgtcgcaacgcgcgtcggggaagcctggcaggagcgcccaggtgcccctaggggcggccagggggatcctgccgtgccagcacaacagccagccgatccttccactcctgagagacagtcttctccctcagggtctgagcagctggtgcgccgagagagttgtgggtcgtctgtgctgactgactttgagggcaaggacgtggccaccaaagtgggtgaagcttggcaagatagacctgggcccagctgcacacactctgcaacttgcagatcccagtatccaaggacagctgagcagccccagcgaatatag

SEQ ID NO: 285424 - DNA, 666 bp, Artificial Sequence
  derived and/or modified sequence
tgacttaggaggacggcgcctcgcgaacacagctatgtcctctccgccgctaaaaagtccaccggatccccgacccaggagacacaagccccattcatcgccaagagagtggaagtggtggaggaggacggaccctcagagaaatcccaagatcctcccgcacttgcacgttcgaccccaggctctaactcagccgatggcggtcggaccaaagcaagcagagccatatggattgagtgtttaccttccatgccttctcccgctgggagccaggagctgtcttccaggggcgaagaaatcgtaagactgcagatcttgaccccacgcgctggcctgagactggtcgccccagacgttgaaggcatgcgaagtagccctggcaataaggacaaggaggccccctgttctagggaactgcaaagggatttagccggggaagaagccttcagagcccccaacacagatgcagcccgaagtagcgcgcaactctcagacggcaacgtcggatctggagccactggctcaagaccggagggtctggctgcggttgacatcggttcagagagaggttcttcaagcgccacatcagttagtgccgtgccagctgatagaaagtctaactcaacggctgctcaggaagatgccaaagcagatcccaagggctag

SEQ ID NO: 285425 - DNA, 2073 bp, Artificial Sequence
  derived and/or modified sequence
atgtcaatcagtgccctgggcggacggaccaaggggaaaccacttcccccaggagaagaggaacgaaataacgtgcttaagcaaatgaaggttaggaccaccctgaagggggataaaagctggattacaaagcaggacgagtccgagggccgcactatagaacttccgtctggcaggtcaagggcgacgtcatttagcagcgccggcgaagtgccgaagccgcgccctcccagtacacgagcccccaccggctacattattcgcggagtgtttacgaaacctatcgactcctcatcccagcctcaacagcagttccccaaggccaatggcactccgaaatctgcggccagtctggtgcggaccgcaaatgccggtcccccccggccaagtagctccggttataagatgaccaccgaagactacaaaaagctagcaccatacaatatccgcaggagctccacgtcaggcgacactgaggaggaggaagaagaggaagttgtgcctttctcctccgacgagcagaagcgcaggagtgaagcggccagcggcgttctgcggaggactgccccccgtgaacacagttacgtgttgtcagccgcgaagaagagtaccggttcccccacacaggagacccaggccccttttatcgccaagcgggtggaggtggtcgaagaggacggccctagcgagaagtcccaggatcccccagcactggcaagatcaactcctgggtccaattccgccgatggaggccgtaccaaagcctcaagggcaatctggattgaatgcttgccctcgatgccctcacccgctgggagtcaggaactgagtagccgaggcgaagagatcgtgaggctgcagattcttaccccgagggcaggcctccggcttgttgctcctgatgtggagggcatgcggagttccccaggcaacaaagacaaggaggccccgtgctctcgcgagcttcaacgggacctggctggtgaggaagcgtttagagctcctaatacagacgccgctaggagcagcgctcaacttagtgatggtaatgtagggtctggagcaacaggctcaagaccagaagggctggcagctgtggacataggatccgagcgggggtcgtcaagtgccacctcagtgtccgccgttccagcagaccggaagagcaacagcaccgccgcacaggaggatgcaaaagccgatcctaagggagccttagcagactatgaaggcaaggatgtggcgacacgggtcggtgaagcttggcaggaacgacccggagcaccccgtgggggccagggggacccagccgtgccggcccagcagcccgccgacccatcgacaccagaacgacagagcagtccttctggctctgagcagctagtgaggcgagagtcatgcggctcttccgtgctgacagatttcgaggggaaagacgtggccaccaaggtgggtgaagcttggcaggaccgccctggcgcacctagagggggacaaggcgatccagcagtccctacccagcagccagcagacccctctacgcccgagcagcagaatagtcccagcggcagcgagcagtttgtgcgtcgggagtcctgcactagccgtgtgcgctccccctcgtcctgtatggtaaccgtgacggtgacagccaccagcgagcagcctcacatttatattcccgcacccgccagcgagctcgatagctccagcaccacaaagggcatcctgtttgtgaaagagtacgtgaacgccagcgaggtgtcttcaggcaagccagtctcagctcgctattccaatgtctcctcaattgaagacagctttgctatggagaaaaagcctccatgtggtagtacgccttactccgaaagaaccacagggggaatatgtacttactgtaatcgtgagattagggactgccccaaaatcaccctcgaacatctcggaatctgctgtcacgaatactgctttaaatgcggcatctgctctaagcctatgggagatctcctggatcagattttcattcatagagacaccattcattgcggtaaatgctacgagaaactgttttag

SEQ ID NO: 285426 - DNA, 1146 bp, Artificial Sequence
  derived and/or modified sequence
atgaccacagaggactacaagaagctggccccctacaacatcagaagaagcagcaccagcggggacacagaggaggaggaggaggaggaggtggtgcccttcagcagtgatgagcagaagagaagaagtgaagctgccagcggcgtgctgcggaggacagccccccgggagcacagctatgtgctgtctgctgccaagaagagcacaggcagccccacccaggagacccaggcccccttcatcgccaagagggtggaggtggtggaggaggatggccccagcgagaagagccaggaccccccagccctggcccggagcaccccaggcagcaacagcgcagatggcggccgcaccaaggccagccgggccatctggattgaatgtctgcccagcatgcccagccctgctggcagccaggagctgagcagcagaggagaggagatcgtgcggctgcagatcctgaccccccgggccggcctgcggctggtggccccagatgtggagggcatgaggagcagccctggcaacaaggacaaggaggccccctgcagccgggagctgcagagggacctggccggggaggaggccttccgggcccccaacacagatgctgcccggagcagcgcccagctgagtgatggaaatgtgggcagcggggccaccggcagcaggcctgagggcctggccgctgtggacatcggcagcgagcggggcagcagcagcgccacctctgtgtctgctgtgcctgctgacaggaagagcaacagcacagctgcccaggaggatgccaaggctgaccccaagggggccctggccgactatgagggcaaggatgtggccaccagggtgggggaggcctggcaggagaggcctggggccccccggggcggccagggcgaccctgctgtgcctgcccagcagcctgctgaccccagcaccccagagcggcagagcagccccagcggcagcgagcagctggtgcggcgggagagctgtggcagctctgtgctgacagactttgagggcaaggatgtggccaccaaggtgggggaggcctggcaggacaggcctggccccagctgcacccacagcgccacctgccgcagccagtaccccaggacagctgagcagccccagaggatctag

SEQ ID NO: 285427 - DNA, 666 bp, Artificial Sequence
  derived and/or modified sequence
tgactgcggaggacagccccccgggagcacagctatgtgctgtctgctgccaagaagagcacaggcagccccacccaggagacccaggcccccttcatcgccaagagggtggaggtggtggaggaggatggccccagcgagaagagccaggaccccccagccctggcccggagcaccccaggcagcaacagcgcagatggcggccgcaccaaggccagccgggccatctggattgaatgtctgcccagcatgcccagccctgctggcagccaggagctgagcagcagaggagaggagatcgtgcggctgcagatcctgaccccccgggccggcctgcggctggtggccccagatgtggagggcatgaggagcagccctggcaacaaggacaaggaggccccctgcagccgggagctgcagagggacctggccggggaggaggccttccgggcccccaacacagatgctgcccggagcagcgcccagctgagtgatggaaatgtgggcagcggggccaccggcagcaggcctgagggcctggccgctgtggacatcggcagcgagcggggcagcagcagcgccacctctgtgtctgctgtgcctgctgacaggaagagcaacagcacagctgcccaggaggatgccaaggctgaccccaagggctag

SEQ ID NO: 285428 - DNA, 2073 bp, Artificial Sequence
  derived and/or modified sequence
atgagcatcagcgccctgggcggccgcaccaagggcaagcccctgcccccaggagaggaggagaggaacaacgtgctgaagcagatgaaggtgaggaccaccctgaagggggacaagtcctggatcaccaagcaggatgagagcgagggccgcaccatcgagctgcccagcggccgcagccgggccaccagcttcagcagcgctggggaggtgcccaagccccggccccccagcacccgggcccccaccggctacatcatccggggcgtcttcaccaagcccatcgacagcagcagccagccccagcagcagttccccaaggccaacggcacccccaagtctgctgccagcctggtgaggacagccaatgccggccccccccggcccagcagcagcggctacaagatgaccacagaggactacaagaagctggccccctacaacatccgccgcagcagcaccagcggggacacagaggaggaggaggaggaggaggtggtgcccttcagcagtgatgagcagaagagaagaagtgaggccgccagcggcgtgctgcggaggacagccccccgggagcacagctatgtgctgtctgctgccaagaagagcacaggcagccccacccaggagacccaggcccccttcatcgccaagagggtggaggtggtggaggaggatggccccagcgagaagagccaggaccccccagccctggcccggagcaccccaggcagcaacagcgcagatggcggccgcaccaaggccagccgggccatctggattgagtgcctgcccagcatgcccagccctgctggcagccaggagctgagcagcagaggagaggagatcgtgcggctgcagatcctgacccccagggctggcctgcggctggtggccccagatgtggagggcatgaggagcagccctggcaacaaggacaaggaggccccctgcagccgggagctgcagagggacctggccggggaggaggccttccgggcccccaacacagatgctgcccggagcagcgcccagctgagtgatggaaatgtgggcagcggggccaccggcagcaggcctgagggcctggccgctgtggacatcggcagcgagcggggcagcagcagcgccacctctgtgtctgctgtgcctgctgacaggaagagcaacagcacagctgcccaggaggatgccaaggctgaccccaagggggccctggccgactatgagggcaaggatgtggccaccagggtgggggaggcctggcaggagaggcctggggccccccggggcggccagggcgaccctgctgtgcctgcccagcagcctgctgaccccagcaccccagagcggcagagcagccccagcggcagcgagcagctggtgagaagagagagctgtggcagctctgtgctgacagactttgagggcaaggatgtggccaccaaggtgggggaggcctggcaggacaggcctggggccccccggggcggccagggcgaccctgctgtgcccacccagcagcctgctgaccccagcaccccagagcagcagaacagccccagcggcagcgagcagtttgtgagaagagagagctgcaccagccgggtgcgcagccccagcagctgcatggtgacagtgacagtgacagccaccagcgagcagccccacatctacatcccagccccagccagcgagctggacagcagcagcaccaccaagggcatcctgtttgtgaaggagtatgtgaatgccagcgaggtgagcagcggcaagcctgtgtctgcccgctacagcaatgtgagcagcattgaagattcttttgccatggagaagaagccaccctgtggcagcaccccctacagcgagaggaccaccggcggcatctgcacctactgcaaccgggagatccgggactgccccaagatcaccctggagcacctgggcatctgctgccacgagtactgcttcaagtgtggcatctgcagcaagcccatgggagacctgctggaccagatcttcatccaccgggacaccatccactgtgggaagtgctatgagaagctgttctag

SEQ ID NO: 285429 - DNA, 1146 bp, Artificial Sequence
  derived and/or modified sequence
atgaccaccgaggactacaagaagctggccccctacaacatccggcggtcatccacctcaggggacacggaggaggaagaagaagaagaagtcgtacctttcagctccgacgaacagaaacgacgttcagaagccgccagcggtgtccttagaaggacagccccccgcgagcattcttatgtactcagcgcggcaaaaaagagcacaggcagcccgacccaagaaacccaggccccttttatcgccaagcgcgtagaggttgtcgaagaggacggcccgtctgagaaatcgcaggatcctccggccttggcccgaagcactccagggtcaaatagcgcagatggggggaggacaaaggccagcagggcaatctggattgaatgtctgccctcaatgccttcccccgctggatcccaagaactgagtagccgtggcgaggagattgtccgtctccagatcctgacccccagagcaggcttacggttagttgcgccggacgtggagggtatgaggagttcacctggtaacaaagacaaagaagcgccatgcagccgggaactgcagcgagacctcgccggagaggaagcctttagggcacctaacactgacgccgccagatcctcagcccagctttctgacgggaacgtcggaagcggcgctacgggctctcgacccgagggactcgcggctgttgacatcggttccgagcgaggctcctcatccgctacatccgttagcgccgtgcccgccgatcgcaagtcaaattcaacggcggcacaggaagacgcgaaggctgacccgaagggggccctggcagactacgagggcaaggatgtggcgactagggttggcgaggcctggcaagaaaggcccggggccccaagagggggccagggcgaccccgccgtgcccgcccagcagccagctgatccctctacacctgaacggcagagctcgccaagtggaagtgagcagttggtgcggcgggaaagttgcggcagtagcgtcttaaccgacttcgagggaaaagacgtggccaccaaggtgggtgaggcttggcaggatcggcccggccctagctgcacacattctgcgacctgcagaagccagtacccccgcactgccgaacagccacaacggatctag

SEQ ID NO: 285430 - DNA, 666 bp, Artificial Sequence
  derived and/or modified sequence
tgactgcggcggaccgccccccgggagcacagctacgtgctgagcgccgccaagaaatctaccggcagtcccacccaggaaacgcaggccccttttatcgccaagagagtggaggtcgtggaagaggacgggccctctgagaagtcacaggacccccccgcgttagccaggagcactccaggctccaactcagctgatggaggcaggacaaaggcttctcgggccatctggattgagtgcctcccctccatgccttcccctgccggatcccaagagctctcctctagaggtgaggaaatcgtgaggcttcaaatcctgaccccaagagctgggttgagactcgttgctccagatgtcgaaggaatgcggtcatcacctggcaacaaggacaaagaagcaccttgctccagagaactgcagagggatttagccggagaggaggcctttcgggcaccaaatacagatgcagcccggtctagtgcacagctctccgacggaaacgtaggctctggggctaccggttcccgccctgagggactggctgccgttgatattggaagcgagcgggggtcctcatcggccacctctgttagcgctgtgcccgcagacaggaagtcgaattccacagcagcgcaggaagatgccaaggctgatcccaagggctag

SEQ ID NO: 285431 - DNA, 2073 bp, Artificial Sequence
  derived and/or modified sequence
atgagcatcagcgccctgggcggccggaccaagggcaagcccctgccgcctggggaagaggagcggaacaacgtgctgaaacagatgaaagtaagaactactctgaaaggcgataaatcttggattacaaagcaggacgaaagtgaggggcggaccatcgaattgcccagcggtcgaagcagggcgacgtctttctctagcgctggagaggtgcctaaacctcggcctccctcaacgagagcacctacaggatacatcatccgaggggtatttactaagccaatcgactctagctcccagccccagcaacaattcccgaaggccaacggaaccccaaaatctgccgcctctctggtgcgtaccgcaaatgccgggccgccccgaccatcatcctctggatataagatgacaactgaggactacaagaaactcgcgccctataatatccggaggtcctcaacgagcggcgacacggaggaagaggaggaggaggaggttgtacccttttcatctgatgagcaaaagagacggagcgaagccgcgtctggcgtgctccgaaggactgcgcctcgagagcactcttacgtgctgagcgctgctaagaagagcacggggtcccccacacaggaaacgcaggctccgttcatcgccaagcgcgtggaggtggtggaggaggacggaccctcagagaagtcacaggatccgccagcccttgcgcggtctacacctggctctaatagtgccgacggaggcagaacaaaagcatcacgcgcaatctggattgaatgcctgccctcaatgccatctccggctgggagtcaggagctgtcctctaggggtgaggagatcgtacgtctacagatactgacccctcgcgcaggtctgcggctagtagcccctgacgtggaggggatgaggagttctccagggaataaggacaaagaagcaccctgttctagggagctacagagagatttagccggcgaggaggcttttcgagcccccaacaccgacgccgccaggagctctgcgcagctctctgatggcaacgtgggttctggagccaccggctccagaccagagggactggcagctgttgatatcgggtccgaaaggggatcatcctctgcaaccagcgtgagcgccgtccctgctgacagaaaatccaacagcacggccgctcaggaagacgccaaggctgatccgaaaggggcccttgctgactacgaagggaaagatgtggccacacgggtgggcgaggcatggcaggagaggcccggagcaccccgaggaggacagggggatcccgccgtgcccgcccagcagcctgctgaccctagcactcccgaacggcaaagctcaccctccggaagcgagcagctggtgcgccgagaaagttgcggctccagtgtgcttaccgactttgagggcaaagacgtcgcaaccaaggtgggcgaagcttggcaggatcggccaggcgcaccaagaggtggacagggggaccccgccgtgcccacccagcagccagctgatccttcaacccctgaacagcagaactcgccttccgggtccgagcagttcgtgcgccgagagagttgtacctctcgcgttagatccccttcctcctgtatggtcactgtgactgtcactgcaacaagtgagcagcctcatatctacatccccgcccctgcatccgagctggacagttcgtccacgacaaagggtatcttatttgtgaaagagtatgtcaacgcttcagaggtcagctccggcaagcccgtgagcgccagatatagcaacgtcagttccatagaagactccttcgccatggagaaaaagccaccctgcgggtcaacaccttacagcgagcgaaccacaggcggtatctgtacttactgcaaccgagaaattcgggactgcccaaagatcaccctggaacatttgggcatttgctgccatgagtattgcttcaagtgtgggatctgttctaagccgatgggagacctgttggaccaaatttttattcacagagacaccatccactgtggcaaatgttacgagaagctgttctag

SEQ ID NO: 285432 - DNA, 1146 bp, Artificial Sequence
  derived and/or modified sequence
atgactacagaagactataagaagttggctccttacaatataagacgttcgtcgacatcaggggacaccgaggaggaggaagaggaagaagtggtaccttttagtagtgatgagcagaaacggaggtccgaggcggcatctggcgtgcttcgcaggaccgctcctcgagagcattcttacgtgctaagtgccgctaaaaaaagtaccgggtcacccactcaagaaacgcaggctccctttattgccaagcgggtagaggtggtggaagaggacggcccaagtgagaagtctcaggatcctcctgccctcgccaggagtacacctggatctaactctgctgacgggggtcgaaccaaggcctccagagcaatctggatcgagtgtctgccctctatgccctcaccagccggttcacaggaactttcaagcagaggcgaggaaatcgtgaggttgcaaattctgacaccaagggctggtcttcgactcgtggcacccgacgtcgaaggcatgcgctcctcccctggcaacaaagacaaagaggcgccttgttcacgggagctgcagagggacctggcaggtgaagaagctttccgagctccaaacactgatgcagcacggtccagcgcacaactgagcgacggaaacgtggggtccggcgctactggatcgaggccagagggcctggctgctgtggatatcggttctgagcgaggttcaagcagtgcaactagtgtgtctgccgttcccgctgataggaaaagcaattcgacagctgcccaggaggacgcgaaagccgaccccaagggtgcattggccgattatgagggaaaggacgtggccacccgcgtgggggaggcatggcaggagagacctggagcacctcgaggtggtcagggcgaccccgctgtgcctgcccagcagccggcagatccgtccaccccagagcgccaatcctcaccctccggcagcgagcagctggtgcggagggaatcatgtggctcttcagtgctgaccgacttcgaagggaaagatgtcgccaccaaagtgggcgaggcatggcaggaccgtccgggtcctagttgcacgcactcagccacctgcagatcccagtatcccagaaccgctgagcagccgcagcgtatctag

SEQ ID NO: 285433 - DNA, 666 bp, Artificial Sequence
  derived and/or modified sequence
tgattgcgccgaacagcacccagagaacactcttacgtgttatccgctgcaaagaagtccactggatcccccacgcaggaaacgcaggccccttttatagctaaacgcgtggaagtagtggaggaggatgggccaagcgagaagagtcaggacccaccggcactggctcggtcaacccccggttcaaatagcgccgatggagggcgaaccaaagcctcaagagccatctggattgaatgcctgcccagcatgccgtctcctgccggaagtcaggagttgtcctcgcgaggagaggaaatcgtgcggctgcagatccttactccgcgagccggactaaggctggtcgcacccgacgtggagggcatgaggagttccccaggcaataaggacaaagaggccccttgcagtcgtgaactgcagcgagacttagctggcgaggaggcctttcgggcacccaacaccgacgccgctagaagtagcgcccagctgagcgatgggaatgtaggaagcggcgcaaccggcagccggcctgagggactggcagccgtggatatcggctcagagcgagggtcttctagtgccacctcagtgtcggccgttcccgctgatcggaaatccaactctaccgccgcacaggaggacgccaaagctgacccaaaaggctag

SEQ ID NO: 285434 - DNA, 2073 bp, Artificial Sequence
  derived and/or modified sequence
atgtccatcagcgcactaggcggtcgtactaagggcaagcctctgcctcccggagaggaagaaaggaacaacgttttaaaacagatgaaggtgaggacaaccttgaagggtgacaaatcatggattactaagcaagacgagtcggaaggacgtacgatagaactgccatcgggcagaagtagagctaccagtttcagcagcgcaggcgaggttcccaagcctcgacctccctcgacaagagccccaacgggctacataattcgcggagtttttacaaagcccattgatagtagctcccagccccagcaacaattccctaaggccaacggtacccctaagtcagccgcttcgttggtgcgaacagcgaatgcgggtcctcccaggccatccagctccggctataagatgaccaccgaagattataagaagcttgcaccttacaatatccgaaggtcttcaacaagcggggacaccgaggaggaggaagaggaggaggtcgtgccattttcaagtgatgagcaaaagagaagaagcgaggcagcatccggggtgctgcgcagaactgcccctcgggagcacagttatgtattatcagccgctaaaaagagtacggggtcaccaacacaggagacacaggctccgtttatcgctaaacgggttgaggtggtggaagaggatggccctagtgagaagtcacaggatccacccgcactggcacgctctacacccggaagcaactctgctgatgggggaaggaccaaagcaagtcgcgctatttggattgagtgtctaccttcaatgccctcccctgcgggatcgcaagaactgagtagccgaggcgaagaaatcgtccgcctgcagatcctaactcctagagcaggcttacgccttgtggcccctgacgttgagggaatgaggtcatcaccaggcaataaggataaagaggccccttgttctagggaactacaacgcgatttggctggggaggaagctttccgggctccaaacacggatgccgctcggtcttccgcacagctctcagacgggaacgtcggctcgggggcaaccggctctagacccgaggggctggcggctgtcgacattggaagtgaacgaggtagcagcagcgctacttctgtttctgcagtgcctgccgaccgcaagtctaactctacagcggcacaggaggacgcgaaggcggacccaaagggcgctctcgcggactacgagggtaaagacgttgctacgagggtcggcgaggcctggcaggaaagacctggggcacctcgcggtggtcagggcgatcccgcagtccccgctcagcagcctgccgacccatccacacccgagagacaatcttccccaagcgggagcgagcagctagtgcgacgcgagtcatgcggctcatctgtgcttaccgacttcgaaggcaaggatgttgctaccaaggtgggcgaggcatggcaggatagaccaggtgccccaagaggcggacagggggatcccgcagtgccaactcaacagcctgcagaccccagcacccccgaacagcaaaattcgccttctggttccgagcagttcgtgcggagggagagctgcaccagccgcgtccgctccccgtcatcatgcatggtgacggtaactgtaacggcaacaagcgaacagccccatatatatatccccgctccagcctccgagcttgactcatcctcaactaccaaaggtattctattcgtcaaggagtacgtgaatgctagcgaggtgagctccgggaaacccgtctctgcaagatatagcaatgtttcgtctattgaggattccttcgcaatggagaagaaacctccctgtgggtcaactccctacagtgaacgaacgaccggcggaatatgcacttattgtaatcgtgagattagggattgccctaagatcactctcgagcacttggggatctgctgccatgaatactgtttcaaatgtggaatatgcagtaaacccatgggagacctactggatcagatattcatccatcgggacacgatccactgtgggaagtgctatgagaaattgttctag

SEQ ID NO: 285435 - DNA, 1599 bp, Artificial Sequence
  derived and/or modified sequence
cagaagccctgctgaatcaagtgagaggagagctgcggagcaatcaccatgagtatctcagctcttggaggccgcaccaaagggaagcctctgccaccaggcgaggaggagcgcaataacgttctcaagcagatgaaagtgcgaaccacgctgaagggggacaagagctggattaccaagcaggatgaatcggagggtcgcaccatagagctgccctcaggccggagtcgcgccacatccttttcatcagctggggaggttccgaagcctaggcctccgagcacaagggctcccactggctacatcatccggggagtgttcaccaagcccatagacagctcttcccagccccagcagcagttccccaaggccaacgggactccaaaaagtgctgccagtctggtgagaacagctaacgctggtcctccccgcccctcctcctctggctacaagatgaccactgaggattacaagaagctggcaccctacaatatcaggcgcagctctacatcaggggacaccgaggaggaggaggaggaggaggtggtgccattctcctcagatgaacagaaacggaggtcagaggctgcaagcggtgttctgaggaggacagctccccgggagcactcctacgtcctgtcagcggccaagaagagcactggcagtcctacccaggagacacaggcaccgtttatcgcgaagagggtggaggtggtggaagaggacgggccttctgagaagagccaggacccacctgctctggcaagatccactcctggctcaaacagtgcggatggaggcaggaccaaagcgtctcgggcaatttggatcgagtgcctgccaagtatgcctagccccgctgggagccaggagctcagctcaagaggtgaggaaattgtccgcctgcagatcctgacacccagggcaggactccgcctggtggccccagacgtggaaggcatgaggtcttccccaggcaacaaagacaaggaggccccctgctccagagagctccagagggacttggctggtgaggaggctttcagggcccccaacacagatgctgcaaggtcaagtgcacagttgagtgatggcaatgtgggatccggagccacgggctcccggcctgaaggcttggctgcagtagacatcggctccgagagaggaagctccagtgccacttcagtctctgctgtccctgctgataggaagagcaacagcacagcagcccaggaggatgcaaaggcagacccaaagggggccttggctgattatgaggggaaggatgtggccaccagggtcggagaggcctggcaggagaggcctggagctccaagaggtggccaaggagacccagctgtacccgctcagcaacctgcagatcccagcaccccagagcggcagagcagccccagcggatctgagcaacttgtcagacgagagagttgtggcagcagcgtgttgactgattttgaggggaaggatgtggccaccaaggtcggagaggcctggcaggacaggcctggacccagctgtacccactcagcaacctgcagatcccagtaccccagaacagcagaacagccccagcggatctga

SEQ ID NO: 285436 - DNA, 660 bp, Artificial Sequence
  derived and/or modified sequence
tctgaggaggacagctccccgggagcactcctacgtcctgtcagcggccaagaagagcactggcagtcctacccaggagacacaggcaccgtttatcgcgaagagggtggaggtggtggaagaggacgggccttctgagaagagccaggacccacctgctctggcaagatccactcctggctcaaacagtgcggatggaggcaggaccaaagcgtctcgggcaatttggatcgagtgcctgccaagtatgcctagccccgctgggagccaggagctcagctcaagaggtgaggaaattgtccgcctgcagatcctgacacccagggcaggactccgcctggtggccccagacgtggaaggcatgaggtcttccccaggcaacaaagacaaggaggccccctgctccagagagctccagagggacttggctggtgaggaggctttcagggcccccaacacagatgctgcaaggtcaagtgcacagttgagtgatggcaatgtgggatccggagccacgggctcccggcctgaaggcttggctgcagtagacatcggctccgagagaggaagctccagtgccacttcagtctctgctgtccctgctgataggaagagcaacagcacagcagcccaggaggatgcaaaggcagacccaaaggg

SEQ ID NO: 285437 - DNA, 4328 bp, Artificial Sequence
  derived and/or modified sequence
cagaagccctgctgaatcaagtgagaggagagctgcggagcaatcaccatgagtatctcagctcttggaggccgcaccaaagggaagcctctgccaccaggcgaggaggagcgcaataacgttctcaagcagatgaaagtgcgaaccacgctgaagggggacaagagctggattaccaagcaggatgaatcggagggtcgcaccatagagctgccctcaggccggagtcgcgccacatccttttcatcagctggggaggttccgaagcctaggcctccgagcacaagggctcccactggctacatcatccggggagtgttcaccaagcccatagacagctcttcccagccccagcagcagttccccaaggccaacgggactccaaaaagtgctgccagtctggtgagaacagctaacgctggtcctccccgcccctcctcctctggctacaagatgaccactgaggattacaagaagctggcaccctacaatatcaggcgcagctctacatcaggggacaccgaggaggaggaggaggaggaggtggtgccattctcctcagatgaacagaaacggaggtcagaggctgcaagcggtgttctgaggaggacagctccccgggagcactcctacgtcctgtcagcggccaagaagagcactggcagtcctacccaggagacacaggcaccgtttatcgcgaagagggtggaggtggtggaagaggacgggccttctgagaagagccaggacccacctgctctggcaagatccactcctggctcaaacagtgcggatggaggcaggaccaaagcgtctcgggcaatttggatcgagtgcctgccaagtatgcctagccccgctgggagccaggagctcagctcaagaggtgaggaaattgtccgcctgcagatcctgacacccagggcaggactccgcctggtggccccagacgtggaaggcatgaggtcttccccaggcaacaaagacaaggaggccccctgctccagagagctccagagggacttggctggtgaggaggctttcagggcccccaacacagatgctgcaaggtcaagtgcacagttgagtgatggcaatgtgggatccggagccacgggctcccggcctgaaggcttggctgcagtagacatcggctccgagagaggaagctccagtgccacttcagtctctgctgtccctgctgataggaagagcaacagcacagcagcccaggaggatgcaaaggcagacccaaagggggccttggctgattatgaggggaaggatgtggccaccagggtcggagaggcctggcaggagaggcctggagctccaagaggtggccaaggagacccagctgtacccgctcagcaacctgcagatcccagcaccccagagcggcagagcagccccagcggatctgagcaacttgtcagacgagagagttgtggcagcagcgtgttgactgattttgaggggaaggatgtggccaccaaggtcggagaggcctggcaggacaggcctggagccccaagaggtggccaaggagacccagctgtacccactcagcaacctgcagatcccagtaccccagaacagcagaacagccccagcggatctgagcaattcgtcagacgagagagctgcaccagcagggtgaggagcccctcgagctgcatggtcactgttactgtcactgccacatctgagcagcctcacatttatattccagcccccgcaagtgaattggactccagctctaccaccaaagggattctcttcgtgaaggagtacgtgaatgctagtgaagtgtcttctgggaagccagtatctgcacgctatagcaacgtcagcagcattgaggactcattcgccatggagaagaagcctccatgtggcagcactccatactctgagaggacaactggagggatctgtacttactgcaaccgtgagatccgagactgtccaaagattaccctagaacatcttggtatctgctgccatgaatattgctttaagtgtgggatttgcagtaaaccgatgggcgatctcctggatcagatcttcattcaccgtgacaccattcactgtgggaaatgctatgagaagctcttctagcgaccccccaccgccaggctgatcagaagctgatgactcgtggacaaatttggctgtccccagttttgccccaagttgctgtctccccttccctcacctcctccctccctgtttgatttcttcatgcttttgcccttctcaagttgaagttgcatacatccaatatcgtatcttaatgatgctatgataattgcttgtgtgtgtagcttcttgtagcttagaaagcgctttatgcccatgatgtcatttcaggctcaaccaaagaggatcaaacaggaattccatcttggcttccctaagacagattggctttctaatgagtttaagtgggcagaagtgtagggttcagtgtgtcctgactcccttgaggcttataatgggccaagttgaagactgttgatgatccctggtgggtaaattgcagacatcaaatgctagggattggcataggctagtgtttagcttgtctatttgccatatctattttttttaaatttccatacacttgtaaaagtagttagttgcttttgattgagttatatagcagtttttcatttggtcttccactcacctttcactatatttgagtgttcccttacaggtatgttggcatgtgttggaaaatttacacaattaggtttaaattcagtaggatgtgattttaggatgctactgatcaaagtgatatctgtgtctgttggaatcttgatagctgattaatttgccctcaattctgctccctgaacttcacacataaatcttcccaagtgggttttagggtgtatagatcccagcaggattaaggaggtggaaaagcagctaacatttcttgaggctctaccacatagcaggcactgtcacagagtaatggcattaatccccataataatcctgtgaaggtgatattctcatcccatcttagacatgaggatattggaactcagagaggtggctattgcattgcgcagaacgctacagagcccatgctcttcccagagcagcacccacaaaagcaagcattgattttgtgctcagtgtgtgccaagcactgtgcagagggtacacagttcctgccaggttaacaccctcccttcaggcctcccaaaggcataggcttgcaaagagcagaaggtgtgaaatcacactcttcctctgggcatcctggatccctgaattatccccccccccatgaagtacttcaagggccaagctgcccctttccctcctctccgcccatgaaaatgcctccaaactgagatgctttcagctgagaacagatttgactcacagacattaccaaagaggagcttgtgaatccaggaaaagctccagggggctagctgatctgagcagagagctttcagtgacccattttcctgtctagactctgccttaagctagtggcaactgctggggccccaggtacttgggacatggaaactcgttggatggctgggcagatgtaagcctgtccatgcagtcagccgatcctctgctcaggttcagctggactctgccatctgtgggcccagcatcactctgtaagttccttgaaaggaagaacaaccttagagtatttctgatacaaaatgagggcctctgctcttgatttaattataaaatgtctacgtctttctccagtttctgagccctatgcacattggcttgtgggcttgttcttcctgccaaatgatcagagaggaacattccatttatttgtagtggatttcctctggagggcatgtacccacactaaataccaactgctcttcctcagctgtagtccccaacatcagacttggcacgtggtggacactaacacacaggcactcaatgaatgagtgaaggaaataaaagtcaccccgttggtgagaggtgctatccctgagtctcagtgcaggaccagtggatgaaaggcaaggtaaagaggcccaagataggctggcttcccccgttcaaggtatagtctgcctttaagggagttttagaaccaacatgcaagacattgaaagaaatcttgcaagagccattattgacttagatccaaaacagcctctctcatgtctaaaaaggcacagaattttgcagatctgaggaagagggatgcattacctttttgcttcttttcaattgcttagtgtttctaatcatacttaatccacactaatgtgcgcaattataataaatggtaagatatcacatgtgtc

SEQ ID NO: 285438 - protein, 689 aa, Artificial Sequence
  derived and/or modified sequence
MSISALGGRTKGKPLPPGEEERNNVLKQMKVRTTLKGDKSWITKQDESEGRTIELPSGRSRATSFSSAGEVPKPRPPSTRAPTGYIIRGVFTKPIDSSSQPQQQFPKANGTPKSAASLVRTANAGPPRPSSSGYKMTTEDYKKLAPYNIRRSSTSGDTEEEEEEEVVPFSSDEQKRRSEAASGVLRRTAPREHSYVLSAAKKSTGPTQETQAPFIAKRVEVVEEDGPSEKSQDPPALARSTPGSNSADGGRTKASRAIWIECLPSMPSPAGSQELSSRGEEIVRLQILTPRAGLRLVAPDVEGMRSSPGNKDKEAPCSRELQRDLAGEEAFRAPNTDAARSSAQLSDGNVGSGATGSRPEGLAAVDIGSERGSSSATSVSAVPADRKSNSTAAQEDAKADPKGALADYEGKDVATRVGEAWQERPGAPRGGQGDPAVPAQQPADPSTPERQSSPSGSEQLVRRESCGSSVLTDFEGKDVATKVGEAWQDRPGAPRGGQGDPAVPTQQPADPSTPEQQNSPSGSEQFVRRESCTSRVRSPSSCMVTVTVTATSEQPHIYIPAPASELDSSSTTKGILFVKEYVNASEVSSGKPVSARYSNVSSIEDSFAMEKKPPCGSTPYSERTTGGICTYCNREIRDCPKITLEHLGICCHEYCFKCGICSKPMGDLLDQIFIHRDTIHCGKCYEKLF

SEQ ID NO: 285439 - DNA, 4312 bp, Artificial Sequence
  derived and/or modified sequence
ctgaatcaagtgagaggagagctgcggagcaatcaccatgagtatctcagctcttggaggccgcaccaaagggaagcctctgccaccaggcgaggaggagcgcaataacgttctcaagcagatgaaagtgcgaaccacgctgaagggggacaagagctggattaccaagcaggatgaatcggagggtcgcaccatagagctgccctcaggccggagtcgcgccacatccttttcatcagctggggaggttccgaagcctaggcctccgagcacaagggctcccactggctacatcatccggggagtgttcaccaagcccatagacagctcttcccagccccagcagcagttccccaaggccaacgggactccaaaaagtgctgccagtctggtgagaacagctaacgctggtcctccccgcccctcctcctctggctacaagatgaccactgaggattacaagaagctggcaccctacaatatcaggcgcagctctacatcaggggacaccgaggaggaggaggaggaggaggtggtgccattctcctcagatgaacagaaacggaggtcagaggctgcaagcggtgttctgaggaggacagctccccgggagcactcctacgtcctgtcagcggccaagaagagcactggtcctacccaggagacacaggcaccgtttatcgcgaagagggtggaggtggtggaagaggacgggccttctgagaagagccaggacccacctgctctggcaagatccactcctggctcaaacagtgcggatggaggcaggaccaaagcgtctcgggcaatttggatcgagtgcctgccaagtatgcctagccccgctgggagccaggagctcagctcaagaggtgaggaaattgtccgcctgcagatcctgacacccagggcaggactccgcctggtggccccagacgtggaaggcatgaggtcttccccaggcaacaaagacaaggaggccccctgctccagagagctccagagggacttggctggtgaggaggctttcagggcccccaacacagatgctgcaaggtcaagtgcacagttgagtgatggcaatgtgggatccggagccacgggctcccggcctgaaggcttggctgcagtagacatcggctccgagagaggaagctccagtgccacttcagtctctgctgtccctgctgataggaagagcaacagcacagcagcccaggaggatgcaaaggcagacccaaagggggccttggctgattatgaggggaaggatgtggccaccagggtcggagaggcctggcaggagaggcctggagctccaagaggtggccaaggagacccagctgtacccgctcagcaacctgcagatcccagcaccccagagcggcagagcagccccagcggatctgagcaacttgtcagacgagagagttgtggcagcagcgtgttgactgattttgaggggaaggatgtggccaccaaggtcggagaggcctggcaggacaggcctggagccccaagaggtggccaaggagacccagctgtacccactcagcaacctgcagatcccagtaccccagaacagcagaacagccccagcggatctgagcaattcgtcagacgagagagctgcaccagcagggtgaggagcccctcgagctgcatggtcactgttactgtcactgccacatctgagcagcctcacatttatattccagcccccgcaagtgaattggactccagctctaccaccaaagggattctcttcgtgaaggagtacgtgaatgctagtgaagtgtcttctgggaagccagtatctgcacgctatagcaacgtcagcagcattgaggactcattcgccatggagaagaagcctccatgtggcagcactccatactctgagaggacaactggagggatctgtacttactgcaaccgtgagatccgagactgtccaaagattaccctagaacatcttggtatctgctgccatgaatattgctttaagtgtgggatttgcagtaaaccgatgggcgatctcctggatcagatcttcattcaccgtgacaccattcactgtgggaaatgctatgagaagctcttctagcgaccccccaccgccaggctgatcagaagctgatgactcgtggacaaatttggctgtccccagttttgccccaagttgctgtctccccttccctcacctcctccctccctgtttgatttcttcatgcttttgcccttctcaagttgaagttgcatacatccaatatcgtatcttaatgatgctatgataattgcttgtgtgtgtagcttcttgtagcttagaaagcgctttatgcccatgatgtcatttcaggctcaaccaaagaggatcaaacaggaattccatcttggcttccctaagacagattggctttctaatgagtttaagtgggcagaagtgtagggttcagtgtgtcctgactcccttgaggcttataatgggccaagttgaagactgttgatgatccctggtgggtaaattgcagacatcaaatgctagggattggcataggctagtgtttagcttgtctatttgccatatctattttttttaaatttccatacacttgtaaaagtagttagttgcttttgattgagttatatagcagtttttcatttggtcttccactcacctttcactatatttgagtgttcccttacaggtatgttggcatgtgttggaaaatttacacaattaggtttaaattcagtaggatgtgattttaggatgctactgatcaaagtgatatctgtgtctgttggaatcttgatagctgattaatttgccctcaattctgctccctgaacttcacacataaatcttcccaagtgggttttagggtgtatagatcccagcaggattaaggaggtggaaaagcagctaacatttcttgaggctctaccacatagcaggcactgtcacagagtaatggcattaatccccataataatcctgtgaaggtgatattctcatcccatcttagacatgaggatattggaactcagagaggtggctattgcattgcgcagaacgctacagagcccatgctcttcccagagcagcacccacaaaagcaagcattgattttgtgctcagtgtgtgccaagcactgtgcagagggtacacagttcctgccaggttaacaccctcccttcaggcctcccaaaggcataggcttgcaaagagcagaaggtgtgaaatcacactcttcctctgggcatcctggatccctgaattatccccccccccatgaagtacttcaagggccaagctgcccctttccctcctctccgcccatgaaaatgcctccaaactgagatgctttcagctgagaacagatttgactcacagacattaccaaagaggagcttgtgaatccaggaaaagctccagggggctagctgatctgagcagagagctttcagtgacccattttcctgtctagactctgccttaagctagtggcaactgctggggccccaggtacttgggacatggaaactcgttggatggctgggcagatgtaagcctgtccatgcagtcagccgatcctctgctcaggttcagctggactctgccatctgtgggcccagcatcactctgtaagttccttgaaaggaagaacaaccttagagtatttctgatacaaaatgagggcctctgctcttgatttaattataaaatgtctacgtctttctccagtttctgagccctatgcacattggcttgtgggcttgttcttcctgccaaatgatcagagaggaacattccatttatttgtagtggatttcctctggagggcatgtacccacactaaataccaactgctcttcctcagctgtagtccccaacatcagacttggcacgtggtggacactaacacacaggcactcaatgaatgagtgaaggaaataaaagtcaccccgttggtgagaggtgctatccctgagtctcagtgcaggaccagtggatgaaaggcaaggtaaagaggcccaagataggctggcttcccccgttcaaggtatagtctgcctttaagggagttttagaaccaacatgcaagacattgaaagaaatcttgcaagagccattattgacttagatccaaaacagcctctctcatgtctaaaaaggcacagaattttgcagatctgaggaagagggatgcattacctttttgcttcttttcaattgcttagtgtttctaatcatacttaatccacactaatgtgcgcaattataataaatggtaagatatcacatgtg

SEQ ID NO: 285440 - DNA, 2070 bp, Artificial Sequence
  derived and/or modified sequence
atgagcatcagcgccctgggcggcagaaccaagggcaagcccctgccccccggcgaggaggagagaaacaacgtgctgaagcagatgaaggtgagaaccaccctgaagggcgacaagagctggatcaccaagcaggacgagagcgagggcagaaccatcgagctgcccagcggcagaagcagagccaccagcttcagcagcgccggcgaggtgcccaagcccagaccccccagcaccagagcccccaccggctacatcatcagaggcgtgttcaccaagcccatcgacagcagcagccagccccagcagcagttccccaaggccaacggcacccccaagagcgccgccagcctggtgagaaccgccaacgccggcccccccagacccagcagcagcggctacaagatgaccaccgaggactacaagaagctggccccctacaacatcagaagaagcagcaccagcggcgacaccgaggaggaggaggaggaggaggtggtgcccttcagcagcgacgagcagaagagaagaagcgaggccgccagcggcgtgctgagaagaaccgcccccagagagcacagctacgtgctgagcgccgccaagaagagcaccggccccacccaggagacccaggcccccttcatcgccaagagagtggaggtggtggaggaggacggccccagcgagaagagccaggacccccccgccctggccagaagcacccccggcagcaacagcgccgacggcggcagaaccaaggccagcagagccatctggatcgagtgcctgcccagcatgcccagccccgccggcagccaggagctgagcagcagaggcgaggagatcgtgagactgcagatcctgacccccagagccggcctgagactggtggcccccgacgtggagggcatgagaagcagccccggcaacaaggacaaggaggccccctgcagcagagagctgcagagagacctggccggcgaggaggccttcagagcccccaacaccgacgccgccagaagcagcgcccagctgagcgacggcaacgtgggcagcggcgccaccggcagcagacccgagggcctggccgccgtggacatcggcagcgagagaggcagcagcagcgccaccagcgtgagcgccgtgcccgccgacagaaagagcaacagcaccgccgcccaggaggacgccaaggccgaccccaagggcgccctggccgactacgagggcaaggacgtggccaccagagtgggcgaggcctggcaggagagacccggcgcccccagaggcggccagggcgaccccgccgtgcccgcccagcagcccgccgaccccagcacccccgagagacagagcagccccagcggcagcgagcagctggtgagaagagagagctgcggcagcagcgtgctgaccgacttcgagggcaaggacgtggccaccaaggtgggcgaggcctggcaggacagacccggcgcccccagaggcggccagggcgaccccgccgtgcccacccagcagcccgccgaccccagcacccccgagcagcagaacagccccagcggcagcgagcagttcgtgagaagagagagctgcaccagcagagtgagaagccccagcagctgcatggtgaccgtgaccgtgaccgccaccagcgagcagccccacatctacatccccgcccccgccagcgagctggacagcagcagcaccaccaagggcatcctgttcgtgaaggagtacgtgaacgccagcgaggtgagcagcggcaagcccgtgagcgccagatacagcaacgtgagcagcatcgaggacagcttcgccatggagaagaagcccccctgcggcagcaccccctacagcgagagaaccaccggcggcatctgcacctactgcaacagagagatcagagactgccccaagatcaccctggagcacctgggcatctgctgccacgagtactgcttcaagtgcggcatctgcagcaagcccatgggcgacctgctggaccagatcttcatccacagagacaccatccactgcggcaagtgctacgagaagctgttctag

SEQ ID NO: 285441 - DNA, 2070 bp, Artificial Sequence
  derived and/or modified sequence
atgagcatctcggcactcggcggccgtaccaagggtaagcccctgccccccggcgaagaagagcgaaataacgtgctgaagcagatgaaggtgcgcactacactcaaaggagacaagagttggatcacgaagcaggatgaaagcgaaggccgaaccatcgagctaccgagtggaagaagccgcgcaacaagcttctcatcggcgggcgaagtgcctaagcctcgccctccaagtacccgcgcccctaccggctatatcatcaggggtgtgtttactaagccaattgactcctcctctcagccccagcagcagtttcccaaggcaaacggcactcctaaaagtgccgcaagtctcgtacgaactgccaatgccggaccacccagaccatctagctccgggtataagatgaccacggaggactataaaaagttggcaccatataatattaggcggtctagcacaagcggggacactgaggaggaggaagaagaagaagtcgtcccatttagttccgacgagcagaaacggcgctcggaagctgcctccggtgtgcttaggcggaccgcaccgagagaacatagctatgtcctgtccgcagcgaaaaaaagtaccggacctacacaggagacccaggctccttttatcgcgaaacgtgtagaggtggtggaagaggatggcccctcagaaaaatctcaggaccccccagccctggcgcggtctacccccggatcaaactctgccgatgggggccgtaccaaagccagcagggctatctggatcgagtgtcttccgagcatgcccagccccgccggctctcaggagcttagttctcggggtgaagagatagttagactccaaatcctgacgcctcgggcaggactgaggctggtcgccccggacgtcgaggggatgagatcgtcacctggtaacaaagataaagaagctccttgctcccgcgaactgcaacgcgatctggcaggagaggaagcatttagggccccgaacacggacgctgcccgatcatccgctcagttgtctgacggcaacgtagggtccggggctactggctcaaggcccgaagggctggctgccgtcgacatcggttcagagagaggcagtagctctgcaacctccgtgtcagccgtgccggcagataggaagtcaaatagtacagcagcacaggaggacgccaaagccgacccaaagggggctcttgcggactacgaggggaaggacgtggcaactcgcgtcggtgaagcttggcaggaaaggccaggggcgcctcggggtgggcaaggcgatccagccgtgccagcccagcagcccgccgatcctagcacccctgaaagacaatcaagccccagcggatcggagcaacttgtacgcagggaatcgtgtgggtcttctgtgctcacagattttgaaggcaaggatgtggccactaaagtgggcgaggcgtggcaggaccggccaggcgcgcccagaggcgggcaaggagaccccgccgtgccaacacagcaaccagccgatcccagcaccccagagcagcaaaactctcctagtggttctgaacagtttgtgcgccgcgagtcctgtactagtagagttcgcagcccctcatcatgtatggtcacggtgacagtcactgctacctcagaacagccgcacatctatattccggccccggcgtctgagctagactcctcaagcaccactaaaggcatattattcgtcaaggaatatgtgaatgcgtcggaggtcagttctggcaagcccgtttccgctcgctactcaaatgttagctctattgaagactcattcgccatggaaaagaagcccccatgcggcagcaccccttatagtgagcggactacagggggaatctgcacttattgcaatcgggagattcgcgattgtcccaaaatcacactcgaacacctgggcatttgttgtcacgagtattgctttaagtgtggaatttgctccaagcccatgggggacctgctggatcagatttttattcatcgcgatacaatccactgtggcaagtgctatgagaagcttttctag

SEQ ID NO: 285442 - DNA, 2070 bp, Artificial Sequence
  derived and/or modified sequence
atgagcatcagcgccctgggcggccgcaccaagggcaagcccctgcccccaggagaggaggagaggaacaacgtgctgaagcagatgaaggtgaggaccaccctgaagggggacaagtcctggatcaccaagcaggatgagagcgagggccgcaccatcgagctgcccagcggccgcagccgggccaccagcttcagcagcgctggggaggtgcccaagccccggccccccagcacccgggcccccaccggctacatcatccggggcgtcttcaccaagcccatcgacagcagcagccagccccagcagcagttccccaaggccaacggcacccccaagtctgctgccagcctggtgaggacagccaatgccggccccccccggcccagcagcagcggctacaagatgaccacagaggactacaagaagctggccccctacaacatccgccgcagcagcaccagcggggacacagaggaggaggaggaggaggaggtggtgcccttcagcagtgatgagcagaagagaagaagtgaggccgccagcggcgtgctgcggaggacagccccccgggagcacagctatgtgctgtctgctgccaagaagagcacaggccccacccaggagacccaggcccccttcatcgccaagagggtggaggtggtggaggaggatggccccagcgagaagagccaggaccccccagccctggcccggagcaccccaggcagcaacagcgcagatggcggccgcaccaaggccagccgggccatctggattgaatgtctgcccagcatgcccagccctgctggcagccaggagctgagcagcagaggagaggagatcgtgcggctgcagatcctgaccccccgggccggcctgcggctggtggccccagatgtggagggcatgaggagcagccctggcaacaaggacaaggaggccccctgcagccgggagctgcagagggacctggccggggaggaggccttccgggcccccaacacagatgctgcccggagcagcgcccagctgagtgatggaaatgtgggcagcggggccaccggcagcaggcctgagggcctggccgctgtggacatcggcagcgagcggggcagcagcagcgccacctctgtgtctgctgtgcctgctgacaggaagagcaacagcacagctgcccaggaggatgccaaggctgaccccaagggggccctggccgactatgagggcaaggatgtggccaccagggtgggggaggcctggcaggagaggcctggggccccccggggcggccagggcgaccctgctgtgcctgcccagcagcctgctgaccccagcaccccagagcggcagagcagccccagcggcagcgagcagctggtgcggcgggagagctgtggcagctctgtgctgacagactttgagggcaaggatgtggccaccaaggtgggggaggcctggcaggacaggcctggggccccccggggcggccagggcgaccctgctgtgcccacccagcagcctgctgaccccagcaccccagagcagcagaacagccccagcggcagcgagcagtttgtgcggcgggagagctgcaccagccgggtgcgcagccccagcagctgcatggtgacagtgacagtgacagccaccagcgagcagccccacatctacatcccagccccagccagcgagctggacagcagcagcaccaccaagggcatcctgtttgtgaaggagtatgtgaatgccagcgaggtgtcctctgggaagcctgtgtctgcccgctacagcaatgtgagcagcattgaggacagctttgccatggagaagaagccaccctgtggcagcaccccctacagcgagaggaccactggaggcatctgcacctactgcaaccgggagatccgggactgccccaagatcaccctggagcacctgggcatctgctgccacgagtactgcttcaagtgtggcatctgcagcaagcccatgggagacctgctggaccagatcttcatccaccgggacaccatccactgtgggaaatgttatgagaagctgttctag

SEQ ID NO: 285443 - DNA, 2070 bp, Artificial Sequence
  derived and/or modified sequence
atgagcatcagcgccctgggcggccggaccaagggcaagcccctgcctccaggagaggaagaacggaacaatgtgctgaaacagatgaaggtccgcaccaccctgaaaggtgataagtcttggatcaccaagcaggatgagagcgagggcagaacaatcgagcttccttcggggcgatccagagccaccagtttctcatcagccggcgaagtgcccaagcccaggcctccttctaccagagctcccaccgggtacattatccggggggtcttcactaaacccatcgactcaagtagccaaccccaacagcagttccctaaggcaaatgggacgcctaagagcgccgcctcgctagtgcgcacagccaacgcaggacctcccagaccatcctcatccgggtacaagatgaccactgaagattataaaaagttggccccttacaatatccgacgaagttctacctccggtgacacagaggaagaagaggaggaagaagtagtgccattcagcagtgacgagcaaaagagacgttccgaagctgcttcaggggtactccggagaacagctcctagagagcactcttatgtgctgagcgcggccaagaagtctaccggccctactcaagaaacacaggcacccttcatcgctaaacgtgtggaggtcgtggaggaggatggaccgtcagaaaaatctcaggacccaccagcactggcacgaagtacccctgggtctaatagcgctgacggaggccgcactaaggcaagcagggcgatttggattgagtgcctccctagtatgccatctccagctggttctcaggagctttccagcaggggtgaagagatcgtgaggttacaaattctcaccccacgggccggactccgcctggtggctcctgacgtggaagggatgagatccagccccggcaataaggacaaggaggccccttgctcccgagagctccaaagggatctcgcaggcgaggaagcttttcgcgcacccaatactgatgcggctaggagctcagcacagctgtccgacggaaacgtgggaagtggcgcaactggcagccggcccgaagggctggctgcagtcgacatcggaagtgaaagaggctcctcatctgccactagcgtgagcgctgtccccgcagaccgcaaaagcaacagcacggcagcccaggaagatgccaaagcggatcccaaaggggcgctggctgattatgaaggaaaagacgtagccacaagagtgggggaagcttggcaggagcggccaggcgctccccggggaggacagggggatccagccgtgccagcccagcagcctgccgacccttctacccccgaacggcaatcttcccccagtggctctgaacagctggttcgccgggagtcttgtggaagcagtgtgttgacggattttgaaggaaaagacgttgcgacaaaggtaggagaggcttggcaggatcgacccggggctccacgaggcgggcagggggaccccgcagtccccactcagcaaccagcagacccttcaactcctgagcaacagaatagtccctcagggagcgaacagtttgtgcgcagagaaagttgcacttccagggttcgctccccaagcagttgtatggtgacagtcacagttaccgctacatccgagcaacctcatatctacattcccgctcctgctagtgaactggactcatcgagcacgacaaaaggcatcctgtttgtgaaggaatatgttaacgctagcgaagtcagtagcggcaagcccgtgtccgcccgctattcgaatgtgtcatcaatagaagactcgtttgccatggagaagaagccaccatgtggttcaaccccatactcagaacgcacaaccggcggcatttgcacctattgcaatcgggaaatcagggattgtcccaagattaccttagaacacctcggaatttgttgccacgagtattgcttcaaatgcggcatttgctctaaacccatgggcgatctactggatcagatatttatccatcgtgatacaattcactgtggcaaatgttatgagaaactgttctag

SEQ ID NO: 285444 - DNA, 2070 bp, Artificial Sequence
  derived and/or modified sequence
atgtcaataagtgcactagggggtcgcactaaaggaaaacccctcccgccaggcgaggaagagagaaacaacgtgctaaaacaaatgaaagttaggaccactttgaaaggtgataaaagttggattaccaaacaggatgagtccgaaggacggacaattgaactcccgtcggggagatctcgggctacttcttttagctccgcaggagaggtgccaaaacccagacctcctagtacgagggcccctaccggctatattatcagaggtgtcttcaccaaacccatcgacagctctagtcagccccagcagcaattccctaaagccaacggcacccctaaaagcgccgctagcctggttaggaccgcaaacgcagggcctcctcgacccagctctagtggatataagatgaccacggaggactacaagaaactggcgccatacaatatccggcgatcttccaccagcggcgacaccgaagaggaggaggaggaggaagtagtgccctttagtagcgacgagcagaagagaaggagtgaggcggcaagcggcgtgttgagacggaccgctccgagggagcactcatatgttctgtcagctgctaagaaatccacagggcctacgcaagagactcaggccccttttatcgctaagcgggtggaagtcgtggaagaggatgggccatccgagaagtcccaagacccaccggcacttgcacgaagtactccagggtccaacagtgcggacgggggtcggacaaaggccagtagagcgatctggatagaatgtctcccttccatgccctccccagctgggtctcaggagctatccagcagaggcgaagaaattgtcagactgcagatcctcacacccagagccggactccgacttgtggctccagatgtcgaagggatgcgcagcagtccaggcaacaaagacaaagaagccccttgcagcagggaactccaacgggacctggccggtgaagaggcattcagggctcctaacaccgatgccgcacgctcctcggctcagttgagcgatggaaacgtgggcagcggagcaactggaagcagacccgaggggctggctgctgttgacattggtagcgagcggggatctagcagcgctacaagtgtatccgccgtgccagcagacagaaaatcaaatagcacagccgcacaggaagatgcaaaggccgacccaaaaggcgcattggccgactatgaaggcaaggatgtggccaccagggtgggagaagcgtggcaggaaagacccggtgcccctaggggcggacagggcgatccagcggttcctgcacagcagcccgcagacccctcaacccccgaacgacagagctcgccaagcggaagcgagcagctagttcgcagggaaagctgcgggtccagcgtgttgactgacttcgaaggcaaagacgttgctacaaaggtcggggaagcctggcaggacaggcccggtgccccaaggggcggtcagggagatccagccgtacctacccagcagcctgccgatccttccactcctgaacagcagaacagcccatcagggagtgagcaattcgtcaggagggagtcgtgtacctctagggttagatcaccgtcctcatgtatggtcaccgtgactgtgacagccacgagcgagcagcctcacatctacatcccagcccctgcttcagaattagactcaagttccacgactaaaggtatcctcttcgttaaagaatacgtcaacgcgagcgaggtttcaagcggaaagcccgtttccgcaagatactcaaatgtgtcttccatcgaagactcatttgccatggagaaaaagcctccctgcggttccacgccctactctgaaaggaccacagggggaatttgtacatactgtaacagggagattagggactgtcctaaaatcaccctcgagcatctgggaatctgctgtcatgagtattgttttaagtgcggaatctgttctaaaccaatgggcgatctgctcgaccaaatctttatccaccgggataccattcactgtggcaagtgttacgaaaagttattttag

SEQ ID NO: 285445 - DNA, 4305 bp, Artificial Sequence
  derived and/or modified sequence
ctgaatcaagtgagaggagagctgcggagcaatcaccatgagtatctcagctcttggaggccgcaccaaagggaagcctctgccaccaggcgaggaggagcgcaataacgttctcaagcagatgaaagtgcgaaccacgctgaagggggacaagagctggattaccaagcaggatgaatcggagggtcgcaccatagagctgccctcaggccggagtcgcgccacatccttttcatcagctggggaggttccgaagcctaggcctccgagcacaagggctcccactggctacatcatccggggagtgttcaccaagcccatagacagctcttcccagccccagcagcagttccccaaggccaacgggactccaaaaagtgctgccagtctggtgagaacagctaacgctggtcctccccgcccctcctcctctggctacaagatgaccactgaggattacaagaagctggcaccctacaatatcaggcgcagctctacatcaggggacaccgaggaggaggaggaggaggaggtggtgccattctcctcagatgaacagaaacggaggtcagaggctgcaagcggtgttctgaggaggacagctccccgggagcactcctacgtcctgtcagcggccaagaagagcactggtcctacccaggagacacaggcaccgtttatcgcgaagagggtggaggtggtggaagaggacgggccttctgagaagagccaggacccacctgctctggcaagatccactcctggctcaaacagtgcggatggaggcaggaccaaagcgtctcgggcaatttggatcgagtgcctgccaagtatgcctagccccgctgggagccaggagctcagctcaagaggtgaggaaattgtccgcctgcagatcctgacacccagggcaggactccgcctggtggccccagacgtggaaggcatgaggtcttccccaggcaacaaagacaaggaggccccctgctccagagagctccagagggacttggctggtgaggaggctttcagggcccccaacacagatgctgcaaggtcaagtgcacagttgagtgatggcaatgtgggatccggagccacgggctcccggcctgaaggcttggctgcagtagacatcggctccgagagaggaagctccagtgccacttcagtctctgctgtccctgctgataggaagagcaacagcacagcagcccaggaggatgcaaaggcagacccaaagggggccttggctgattatgaggggaaggatgtggccaccagggtcggagaggcctggcaggagaggcctggagctccaagaggtggccaaggagacccagctgtacccgctcagcaacctgcagatcccagcaccccagagcggcagagcagccccagcggatctgagcaacttgtcagacgagagagttgtggcagcagcgtgttgactgattttgaggggaaggatgtggccaccaaggtcggagaggcctggcaggacaggcctggagccccaagaggtggccaaggagacccagctgtacccactcagcaacctgcagatcccagtaccccagaacagcagaacagccccagcggatctgagcaattcgtcagacgagagagctgcaccagcagggtgaggagcccctcgagctgcatggtcactgttactgtcactgccacatctgagcagcctcacatttatattccagcccccgcaagtgaattggactccagctctaccaccaaagggattctcttcgtgaaggagtacgtgaatgctagtgaagtgtcttctgggaagccagtatctgcacgctatagcaacgtcagcagcattgaggactcattcgccatggagaagaagcctccatgtggcagcactccatactctgagaggacaactggagggatctgtacttactgcaaccgtgagatccgagactgtccaaagattaccctagaacatcttggtatctgctgccatgaatattgctttaagtgtgggatttgcagtaaaccgatgggcgatctcctggatcagatcttcattcaccgtgacaccattcactgtgggaaatgctatgagaagctcttctagcgaccccccaccgccaggctgatcagaagctgatgactcgtggacaaatttggctgtccccagttttgccccaagttgctgtctccccttccctcacctcctccctccctgtttgatttcttcatgcttttgcccttctcaagttgaagttgcatacatccaatatcgtatcttaatgatgctatgataattgcttgtgtgtgtagcttcttgtagcttagaaagcgctttatgcccatgatgtcatttcaggctcaaccaaagaggatcaaacaggaattccatcttggcttccctaagacagattggctttctaatgagtttaagtgggcagaagtgtagggttcagtgtgtcctgactcccttgaggcttataatgggccaagttgaagactgttgatgatccctggtgggtaaattgcagacatcaaatgctagggattggcataggctagtgtttagcttgtctatttgccatatctattttttttaaatttccatacacttgtaaaagtagttagttgcttttgattgagttatatagcagtttttcatttggtcttccactcacctttcactatatttgagtgttcccttacaggtatgttggcatgtgttggaaaatttacacaattaggtttaaattcagtaggatgtgattttaggatgctactgatcaaagtgatatctgtgtctgttggaatcttgatagctgattaatttgccctcaattctgctccctgaacttcacacataaatcttcccaagtgggttttagggtgtatagatcccagcaggattaaggaggtggaaaagcagctaacatttcttgaggctctaccacatagcaggcactgtcacagagtaatggcattaatccccataataatcctgtgaaggtgatattctcatcccatcttagacatgaggatattggaactcagagaggtggctattgcattgcgcagaacgctacagagcccatgctcttcccagagcagcacccacaaaagcaagcattgattttgtgctcagtgtgtgccaagcactgtgcagagggtacacagttcctgccaggttaacaccctcccttcaggcctcccaaaggcataggcttgcaaagagcagaaggtgtgaaatcacactcttcctctgggcatcctggatccctgaattatccccccccccatgaagtacttcaagggccaagctgcccctttccctcctctccgcccatgaaaatgcctccaaactgagatgctttcagctgagaacagatttgactcacagacattaccaaagaggagcttgtgaatccaggaaaagctccagggggctagctgatctgagcagagagctttcagtgacccattttcctgtctagactctgccttaagctagtggcaactgctggggccccaggtacttgggacatggaaactcgttggatggctgggcagatgtaagcctgtccatgcagtcagccgatcctctgctcaggttcagctggactctgccatctgtgggcccagcatcactctgtaagttccttgaaaggaagaacaaccttagagtatttctgatacaaaatgagggcctctgctcttgatttaattataaaatgtctacgtctttctccagtttctgagccctatgcacattggcttgtgggcttgttcttcctgccaaatgatcagagaggaacattccatttatttgtagtggatttcctctggagggcatgtacccacactaaataccaactgctcttcctcagctgtagtccccaacatcagacttggcacgtggtggacactaacacacaggcactcaatgaatgagtgaaggaaataaaagtcaccccgttggtgagaggtgctatccctgagtctcagtgcaggaccagtggatgaaaggcaaggtaaagaggcccaagataggctggcttcccccgttcaaggtatagtctgcctttaagggagttttagaaccaacatgcaagacattgaaagaaatcttgcaagagccattattgacttagatccaaaacagcctctctcatgtctaaaaaggcacagaattttgcagatctgaggaagagggatgcattacctttttgcttcttttcaattgcttagtgtttctaatcatacttaatccacactaatgtgcgcaattataataaatggtaagatatc

SEQ ID NO: 285446 - protein, 211 aa, Artificial Sequence
  derived and/or modified sequence
EEAFRAPNTDAARSSAQLSDGNVGSGATGSRPEGLAAVDIGSERGRLCAAASFASFLEDQDGHSANSQSCKPRPAAISSSATSVSAVPADRKSNSTAAQEDAKADPKGALADYEGKDVATRVGEAWQERPGAPRGGQGDPAVPAQQPADPSTPERQSSPSGSEQLVRRESCGSSVLTDFEGKDVATKVGEAWQDRPGAPRGGQGDPAVPTQ

SEQ ID NO: 285447 - DNA, 414 bp, Artificial Sequence
  derived and/or modified sequence
tgagtgctgcccagaagacacagacacagactgagcagaagaggctggagatggtggaagagaaccggcctgctgagaagagccagaacccacctgctgtggcaggaccccctgctggcccagaccgtgagaatggaggccggccccaagagactgggccagttcggcagcagcgcctgccaggtgtgcctggcccccctgggcgccagaagcagcggcctgccccaggccaccaagaccagaagaccccccgcccccgagagcagcagaggcacctggctggtgagaagactgagcggcccccccacccagatgctgcaggcccccgtgcccctgcagagcctgctgagcctgctgatcggcagagccaccgcccagcagcccagaagaatgcagagacagacccagagatag

SEQ ID NO: 285448 - protein, 524 aa, Artificial Sequence
  derived and/or modified sequence
MTTEDYKKLAPYNIRRSSTSGDTEEEEEEEVVPFSSDEQKRRSEAASGVLRRTAPREHSYVLSAAKKSTGPTQETQAPFIAKRVEVVEEDGPSEKSQDPPALARSTPGSNSSRGEEIVRLQILTPRAGLRLVAPDVEGMRSSPGNKDKEAPCSRELQRDLAGEEAFRAPNTDAARSSAQLSDGNVGSGATGSRPEGLAAVDIGSERGSSSATSVSAVPADRKSNSTAAQEDAKADPKGALADYEGKDVATRVGEAWQERPGAPRGGQGDPAVPAQQPADPSTPERQSSPSGSEQLVRRESCGSSVLTDFEGKDVATKVGEAWQDRPGAPRGGQGDPAVPTQQPADPSTPEQQNSPSGSEQFVRRESCTSRVRSPSSCMVTVTVTATSEQPHIYIPAPASELDSSSTTKGILFVKEYVNASEVSSGKPVSARYSNVSSIEDSFAMEKKPPCGSTPYSERTTGGICTYCNREIRDCPKITLEHLGICCHEYCFKCGICSKPMGDLLDQIFIHRDTIHCGKCYEKLF

SEQ ID NO: 285449 - DNA, 1575 bp, Artificial Sequence
  derived and/or modified sequence
atgaccaccgaggactacaagaagctggccccctacaacatcagaagaagcagcaccagcggcgacaccgaggaggaggaggaggaggaggtggtgcccttcagcagcgacgagcagaagagaagaagcgaggccgccagcggcgtgctgagaagaaccgcccccagagagcacagctacgtgctgagcgccgccaagaagagcaccggccccacccaggagacccaggcccccttcatcgccaagagagtggaggtggtggaggaggacggccccagcgagaagagccaggacccccccgccctggccagaagcacccccggcagcaacagcagcagaggcgaggagatcgtgagactgcagatcctgacccccagagccggcctgagactggtggcccccgacgtggagggcatgagaagcagccccggcaacaaggacaaggaggccccctgcagcagagagctgcagagagacctggccggcgaggaggccttcagagcccccaacaccgacgccgccagaagcagcgcccagctgagcgacggcaacgtgggcagcggcgccaccggcagcagacccgagggcctggccgccgtggacatcggcagcgagagaggcagcagcagcgccaccagcgtgagcgccgtgcccgccgacagaaagagcaacagcaccgccgcccaggaggacgccaaggccgaccccaagggcgccctggccgactacgagggcaaggacgtggccaccagagtgggcgaggcctggcaggagagacccggcgcccccagaggcggccagggcgaccccgccgtgcccgcccagcagcccgccgaccccagcacccccgagagacagagcagccccagcggcagcgagcagctggtgagaagagagagctgcggcagcagcgtgctgaccgacttcgagggcaaggacgtggccaccaaggtgggcgaggcctggcaggacagacccggcgcccccagaggcggccagggcgaccccgccgtgcccacccagcagcccgccgaccccagcacccccgagcagcagaacagccccagcggcagcgagcagttcgtgagaagagagagctgcaccagcagagtgagaagccccagcagctgcatggtgaccgtgaccgtgaccgccaccagcgagcagccccacatctacatccccgcccccgccagcgagctggacagcagcagcaccaccaagggcatcctgttcgtgaaggagtacgtgaacgccagcgaggtgagcagcggcaagcccgtgagcgccagatacagcaacgtgagcagcatcgaggacagcttcgccatggagaagaagcccccctgcggcagcaccccctacagcgagagaaccaccggcggcatctgcacctactgcaacagagagatcagagactgccccaagatcaccctggagcacctgggcatctgctgccacgagtactgcttcaagtgcggcatctgcagcaagcccatgggcgacctgctggaccagatcttcatccacagagacaccatccactgcggcaagtgctacgagaagctgttctag

SEQ ID NO: 285450 - DNA, 1575 bp, Artificial Sequence
  derived and/or modified sequence
atgacaactgaagattacaagaaacttgcaccctacaacatacgacgttcctctacatcaggagacactgaggaggaggaagaagaggaagtggtgccattttccagtgatgagcaaaaaaggaggagcgaggctgcaagcggagtgctgcgacgcaccgctccccgagagcatagttacgtgctgtccgcggccaagaagagtaccggtcccacccaagagacccaggccccgttcatcgccaagagagtggaagtagtagaggaggatgggccaagtgagaagtctcaagatccaccagccctcgccagatctacgcctggctcaaacagttccaggggagaagagatagtgcgcctgcagattttgacccctcgcgccggtctccggctagtggctcctgatgttgaaggcatgcggtcgtcaccaggaaataaggataaggaggctccgtgctcacgcgagctgcagagggatctggctggggaggaggcatttcgcgctccaaacacggacgccgccagatcaagcgctcaactctctgacggcaatgtaggcagtggtgcaactggctctcgcccggagggcctcgccgcggtggacattggttcagagagggggtcctcctctgcgaccagcgtgtctgccgtaccagcagataggaagtcgaactcaaccgccgcacaagaagatgccaaggcggatcctaaaggagcacttgcagactacgaggggaaggacgtggccacacgagtgggtgaggcctggcaggaaagacctggggctccccgcgggggacagggagaccccgccgtgccggctcagcagccagctgatcccagtactcctgagcgccagagcagtccatctggaagtgaacagctggtcagacgggagtcttgtggatcgtcagttctgaccgacttcgaagggaaagatgtcgctaccaaggttggagaggcctggcaggatcgtcctggagcgcctaggggcggccagggcgatcctgccgtacccactcagcaacctgccgacccgagtacaccagagcagcagaattcccccagcggctctgaacagtttgtgaggagggagtcatgcacgtctcgcgtaagaagccctagctcctgtatggttaccgtcactgtcaccgcaacctcggagcagcctcatatctatatcccagctccagcttccgagttggatagcagttccactactaaaggcatcctcttcgtgaaggaatacgtcaatgcctccgaggttagctcgggcaaaccagtctctgctcgctattctaatgtgagctccattgaggactcttttgccatggaaaaaaaacctccttgtggctcgaccccttacagcgagaggactaccggcggcatctgcacttattgcaatcgagagatccgggactgtcccaaaatcacacttgaacatctgggcatctgctgccatgagtattgcttcaaatgtggtatttgctctaagccgatgggcgacctgctggaccagatttttattcatagagacaccatccactgcggcaaatgctacgaaaaactgttttag

SEQ ID NO: 285451 - DNA, 1575 bp, Artificial Sequence
  derived and/or modified sequence
atgaccacagaggactacaagaagctggccccctacaacatcagaagaagcagcaccagcggggacacagaggaggaggaggaggaggaggtggtgcccttcagcagtgatgagcagaagagaagaagtgaagctgccagcggcgtgctgcggaggacagccccccgggagcacagctatgtgctgtctgctgccaagaagagcacaggccccacccaggagacccaggcccccttcatcgccaagagggtggaggtggtggaggaggatggccccagcgagaagagccaggaccccccagccctggcccggagcaccccaggcagcaacagcagcagaggagaggagatcgtgcggctgcagatcctgacccccagggctggcctgcggctggtggccccagatgtggagggcatgaggagcagccctggcaacaaggacaaggaggccccctgcagccgggagctgcagagggacctggccggggaggaggccttccgggcccccaacacagatgctgcccggagcagcgcccagctgagtgatggaaatgtgggcagcggggccaccggcagcaggcctgagggcctggccgctgtggacatcggcagcgagcggggcagcagcagcgccacctctgtgtctgctgtgcctgctgacaggaagagcaacagcacagctgcccaggaggatgccaaggctgaccccaagggggccctggccgactatgagggcaaggatgtggccaccagggtgggggaggcctggcaggagaggcctggggccccccggggcggccagggcgaccctgctgtgcctgcccagcagcctgctgaccccagcaccccagagcggcagagcagccccagcggcagcgagcagctggtgagaagagagagctgtggcagctctgtgctgacagactttgagggcaaggatgtggccaccaaggtgggggaggcctggcaggacaggcctggggccccccggggcggccagggcgaccctgctgtgcccacccagcagcctgctgaccccagcaccccagagcagcagaacagccccagcggcagcgagcagtttgtgagaagagagagctgcaccagccgggtgcgcagccccagcagctgcatggtgacagtgacagtgacagccaccagcgagcagccccacatctacatcccagccccagccagcgagctggacagcagcagcaccaccaagggcatcctgtttgtgaaggagtatgtgaatgccagcgaggtgagcagcggcaagcctgtgtctgcccgctacagcaatgtgagcagcattgaagattcttttgccatggagaagaagccaccctgtggcagcaccccctacagcgagaggaccaccggcggcatctgcacctactgcaaccgggagatccgggactgccccaagatcaccctggagcacctgggcatctgctgccacgagtactgcttcaagtgtggcatctgcagcaagcccatgggagacctgctggaccagatcttcatccaccgggacaccatccactgtgggaagtgctatgagaagctgttctag

SEQ ID NO: 285452 - DNA, 1575 bp, Artificial Sequence
  derived and/or modified sequence
atgaccaccgaggactacaagaagctggccccctacaacatccggagatcttccactagcggagatactgaggaagaggaagaagaggaggttgtgccatttagctcagatgaacagaaaaggcggtccgaggccgcatctggagtcctcaggcgcactgcccctagggagcactcttatgtgcttagcgctgctaagaagtcaacaggccccacgcaagagacacaggccccctttatagctaaacgagtcgaagtcgtggaggaggacggcccatccgaaaagtcccaggacccacctgcactggcacgtagcacgcctggcagcaactcgtcacggggcgaagaaattgtgagactgcagatcctgactcccagagccggactgaggttagtggcccctgacgtcgaaggtatgaggtcttcccccggaaataaggacaaggaggcgccctgttctcgcgagctgcagcgcgacctcgcgggagaggaagctttcagggcaccgaataccgatgccgctcggtcttcagcccagctgagcgatggcaacgtgggctctggcgctacaggaagtcgcccagagggtctggcggcggtcgatatcgggtccgagcgaggctcgtctagcgccacttctgtatctgccgtgccagccgaccggaagtcaaatagcacagcggctcaggaagatgcaaaagcagatcccaaaggggccctggccgactacgaggggaaagacgtggccactagagtgggcgaagcatggcaggaacgcccaggcgctccaaggggaggccagggcgatcctgctgtccctgcacagcagccagcagacccaagcacacccgaacggcagagtagtccctctggcagtgagcagctggtacgccgtgagagttgtgggagcagcgttctgacagatttcgagggaaaggacgtggctaccaaggttggcgaagcttggcaggaccgacccggggcacccagaggcggccaaggggacccagctgtgcccacccaacagccagccgacccgtcaacccccgagcagcagaactccccttccggttcagaacagtttgtacgaagagagagttgcaccagtcgggtccgttcgccttccagctgcatggtcacagtcacagtgactgcaacatccgaacagccccatatttatataccggcccccgcaagcgaattagattccagcagtactactaaggggatcttgtttgtgaaggaatacgttaatgcatccgaggtgagctccggtaagcccgtgtctgccaggtatagtaacgtgagctcaatcgaagacagcttcgctatggagaaaaagcctccctgcggctctaccccatatagtgaacgaaccaccggcggaatctgtacttactgtaatagggagatacgtgactgccctaagatcacactcgagcacctgggcatctgctgtcatgagtattgcttcaaatgtggcatctgttctaaacccatgggtgaccttttggatcagattttcatccacagggacaccatccactgtggtaaatgttacgaaaagctcttctag

SEQ ID NO: 285453 - DNA, 1575 bp, Artificial Sequence
  derived and/or modified sequence
atgacgacagaagattataagaaactggccccttataatataaggagatctagcacaagcggtgatacagaagaagaagaggaggaagaggtagtgcctttctcctcagatgagcagaagaggagatcagaagctgcctcaggggttctgcgccgaaccgcccctcgggagcacagctatgttttgtcggcggctaagaaatccacagggcctacacaggaaacgcaggcgccattcatcgccaaacgagtggaggtcgtagaagaggacgggccttccgagaagagtcaagatcctcccgcactcgcacggagtacgcccggaagcaatagcagcaggggcgaggagatcgtcagactccagatactgacacctcgagcgggtttgaggctggtcgctcctgatgtagagggaatgaggtcgagtcctggcaataaagacaaagaagccccatgttcgagggaacttcagcgggatctggccggagaagaggcctttcgcgcacctaacacagatgccgctcgctcttccgcacagctgtcagatgggaacgtgggcagcggcgctaccggatcccgtcctgaggggttagccgctgtggacattggcagcgagcgcggaagttccagcgctacctcagtgagtgcagttcctgcagacaggaagtcaaattccactgcagcccaggaagacgccaaggcagaccctaaaggggctctggccgattacgaaggcaaggatgtggctaccagagtcggggaggcatggcaggaacgcccaggtgccccacggggaggccagggcgaccccgctgtccccgcacagcagcccgctgatccaagtaccccagaaagacagtcatctccatccggaagcgagcagttggtaaggagggagagctgcggtagttccgtgcttaccgactttgagggaaaagacgtggccaccaaagtgggggaggcgtggcaggatcggcctggcgctcctcggggtgggcagggagatcctgccgtgcctactcagcagcctgcggacccatccactcctgagcagcagaactctccctcagggtcggaacagtttgtgcgcagagagagctgcactagtcgagtcaggagcccatctagttgcatggtgactgtcacggttactgctacatcggagcaaccccatatctatattcctgccccagccagcgagcttgactccagctcgaccacaaaaggcattctctttgtaaaggagtacgtaaacgctagcgaggtgtcctcagggaagccagtctctgccagatattcgaacgtgagtagcatcgaggattccttcgcgatggaaaaaaagcccccttgtggtagtacgccctacagcgagaggaccacgggcggtatatgtacgtattgtaaccgggagattcgcgattgccccaaaattacactggagcatctgggtatttgctgtcatgaatattgtttcaaatgtgggatctgttccaaaccaatgggcgatttgttggatcagatctttattcatagggatacaatacactgtggcaaatgttatgagaagctcttctag

SEQ ID NO: 285454 - DNA, 4235 bp, Artificial Sequence
  derived and/or modified sequence
cagaagccctgctgaatcaagtgagaggagagctgcggagcaatcaccatgagtatctcagctcttggaggccgcaccaaagggaagcctctgccaccaggcgaggaggagcgcaataacgttctcaagcagatgaaagtgcgaaccacgctgaagggggacaagagctggattaccaagcaggatgaatcggagggtcgcaccatagagctgccctcaggccggagtcgcgccacatccttttcatcagctggggaggttccgaagcctaggcctccgagcacaagggctcccactggctacatcatccggggagtgttcaccaagcccatagacagctcttcccagccccagcagcagttccccaaggccaacgggactccaaaaagtgctgccagtctggtgagaacagctaacgctggtcctccccgcccctcctcctctggctacaagatgaccactgaggattacaagaagctggcaccctacaatatcaggcgcagctctacatcaggggacaccgaggaggaggaggaggaggaggtggtgccattctcctcagatgaacagaaacggaggtcagaggctgcaagcggtgttctgaggaggacagctccccgggagcactcctacgtcctgtcagcggccaagaagagcactggtcctacccaggagacacaggcaccgtttatcgcgaagagggtggaggtggtggaagaggacgggccttctgagaagagccaggacccacctgctctggcaagatccactcctggctcaaacagctcaagaggtgaggaaattgtccgcctgcagatcctgacacccagggcaggactccgcctggtggccccagacgtggaaggcatgaggtcttccccaggcaacaaagacaaggaggccccctgctccagagagctccagagggacttggctggtgaggaggctttcagggcccccaacacagatgctgcaaggtcaagtgcacagttgagtgatggcaatgtgggatccggagccacgggctcccggcctgaaggcttggctgcagtagacatcggctccgagagaggaagctccagtgccacttcagtctctgctgtccctgctgataggaagagcaacagcacagcagcccaggaggatgcaaaggcagacccaaagggggccttggctgattatgaggggaaggatgtggccaccagggtcggagaggcctggcaggagaggcctggagctccaagaggtggccaaggagacccagctgtacccgctcagcaacctgcagatcccagcaccccagagcggcagagcagccccagcggatctgagcaacttgtcagacgagagagttgtggcagcagcgtgttgactgattttgaggggaaggatgtggccaccaaggtcggagaggcctggcaggacaggcctggagccccaagaggtggccaaggagacccagctgtacccactcagcaacctgcagatcccagtaccccagaacagcagaacagccccagcggatctgagcaattcgtcagacgagagagctgcaccagcagggtgaggagcccctcgagctgcatggtcactgttactgtcactgccacatctgagcagcctcacatttatattccagcccccgcaagtgaattggactccagctctaccaccaaagggattctcttcgtgaaggagtacgtgaatgctagtgaagtgtcttctgggaagccagtatctgcacgctatagcaacgtcagcagcattgaggactcattcgccatggagaagaagcctccatgtggcagcactccatactctgagaggacaactggagggatctgtacttactgcaaccgtgagatccgagactgtccaaagattaccctagaacatcttggtatctgctgccatgaatattgctttaagtgtgggatttgcagtaaaccgatgggcgatctcctggatcagatcttcattcaccgtgacaccattcactgtgggaaatgctatgagaagctcttctagcgaccccccaccgccaggctgatcagaagctgatgactcgtggacaaatttggctgtccccagttttgccccaagttgctgtctccccttccctcacctcctccctccctgtttgatttcttcatgcttttgcccttctcaagttgaagttgcatacatccaatatcgtatcttaatgatgctatgataattgcttgtgtgtgtagcttcttgtagcttagaaagcgctttatgcccatgatgtcatttcaggctcaaccaaagaggatcaaacaggaattccatcttggcttccctaagacagattggctttctaatgagtttaagtgggcagaagtgtagggttcagtgtgtcctgactcccttgaggcttataatgggccaagttgaagactgttgatgatccctggtgggtaaattgcagacatcaaatgctagggattggcataggctagtgtttagcttgtctatttgccatatctattttttttaaatttccatacacttgtaaaagtagttagttgcttttgattgagttatatagcagtttttcatttggtcttccactcacctttcactatatttgagtgttcccttacaggtatgttggcatgtgttggaaaatttacacaattaggtttaaattcagtaggatgtgattttaggatgctactgatcaaagtgatatctgtgtctgttggaatcttgatagctgattaatttgccctcaattctgctccctgaacttcacacataaatcttcccaagtgggttttagggtgtatagatcccagcaggattaaggaggtggaaaagcagctaacatttcttgaggctctaccacatagcaggcactgtcacagagtaatggcattaatccccataataatcctgtgaaggtgatattctcatcccatcttagacatgaggatattggaactcagagaggtggctattgcattgcgcagaacgctacagagcccatgctcttcccagagcagcacccacaaaagcaagcattgattttgtgctcagtgtgtgccaagcactgtgcagagggtacacagttcctgccaggttaacaccctcccttcaggcctcccaaaggcataggcttgcaaagagcagaaggtgtgaaatcacactcttcctctgggcatcctggatccctgaattatccccccccccatgaagtacttcaagggccaagctgcccctttccctcctctccgcccatgaaaatgcctccaaactgagatgctttcagctgagaacagatttgactcacagacattaccaaagaggagcttgtgaatccaggaaaagctccagggggctagctgatctgagcagagagctttcagtgacccattttcctgtctagactctgccttaagctagtggcaactgctggggccccaggtacttgggacatggaaactcgttggatggctgggcagatgtaagcctgtccatgcagtcagccgatcctctgctcaggttcagctggactctgccatctgtgggcccagcatcactctgtaagttccttgaaaggaagaacaaccttagagtatttctgatacaaaatgagggcctctgctcttgatttaattataaaatgtctacgtctttctccagtttctgagccctatgcacattggcttgtgggcttgttcttcctgccaaatgatcagagaggaacattccatttatttgtagtggatttcctctggagggcatgtacccacactaaataccaactgctcttcctcagctgtagtccccaacatcagacttggcacgtggtggacactaacacacaggcactcaatgaatgagtgaaggaaataaaagtcaccccgttggtgagaggtgctatccctgagtctcagtgcaggaccagtggatgaaaggcaaggtaaagaggcccaagataggctggcttcccccgttcaaggtatagtctgcctttaagggagttttagaaccaacatgcaagacattgaaagaaatcttgcaagagccattattgacttagatccaaaacagcctctctcatgtctaaaaaggcacagaattttgcagatctgaggaagagggatgcattacctttttgcttcttttcaattgcttagtgtttctaatcatacttaatccacactaatgtgcgcaattataataaatggtaagatatcacatgtgtc

SEQ ID NO: 285455 - protein, 475 aa, Artificial Sequence
  derived and/or modified sequence
  misc_feature (1)..(1): Xaa can be any naturally occurring amino acid
XRSSTSGDTEEEEEEEVVPFSSDEQKRSLRRTAPREHSYVLSAAKKSTGSPTQETQAPFIAKRVEVVEEDGPSEKSQDPPALARSTPGSNRSSPGNKDKEAPCSRELQRDLAGEEAFRAPNTDAARSSAQLSDGNVGSGATGSRPEGLAAVDIGSERGSSSATSVSAVPADRKSNSTAAQEDAKADPKGALADYEGKDVATRVGEAWQERPGAPRGGQGDPAVPAQQPADPSTPERQSSPSGSEQLVRRESCGSSVLTDFEGKDVATKVGEAWQDRPGAPRGGQGDPAVPTQQPADPSTPEQQNSPSGSEQFVRRESCTSRVRSPSSCMVTVTVTATSEQPHIYIPAPASELDSSSTTKGILFVKEYVNASEVSSGKPVSARYSNVSSIEDSFAMEKKPPCGSTPYSERTTGGICTYCNREIRDCPKITLEHLGICCHEYCFKCGICSKPMGDLLDQIFIHRDTIHCGKCYEKLF

SEQ ID NO: 285456 - DNA, 1428 bp, Artificial Sequence
  derived and/or modified sequence
tgaagaagcagcaccagcggcgacaccgaggaggaggaggaggaggaggtggtgcccttcagcagcgacgagcagaagagaagcctgagaagaaccgcccccagagagcacagctacgtgctgagcgccgccaagaagagcaccggcagccccacccaggagacccaggcccccttcatcgccaagagagtggaggtggtggaggaggacggccccagcgagaagagccaggacccccccgccctggccagaagcacccccggcagcaacagaagcagccccggcaacaaggacaaggaggccccctgcagcagagagctgcagagagacctggccggcgaggaggccttcagagcccccaacaccgacgccgccagaagcagcgcccagctgagcgacggcaacgtgggcagcggcgccaccggcagcagacccgagggcctggccgccgtggacatcggcagcgagagaggcagcagcagcgccaccagcgtgagcgccgtgcccgccgacagaaagagcaacagcaccgccgcccaggaggacgccaaggccgaccccaagggcgccctggccgactacgagggcaaggacgtggccaccagagtgggcgaggcctggcaggagagacccggcgcccccagaggcggccagggcgaccccgccgtgcccgcccagcagcccgccgaccccagcacccccgagagacagagcagccccagcggcagcgagcagctggtgagaagagagagctgcggcagcagcgtgctgaccgacttcgagggcaaggacgtggccaccaaggtgggcgaggcctggcaggacagacccggcgcccccagaggcggccagggcgaccccgccgtgcccacccagcagcccgccgaccccagcacccccgagcagcagaacagccccagcggcagcgagcagttcgtgagaagagagagctgcaccagcagagtgagaagccccagcagctgcatggtgaccgtgaccgtgaccgccaccagcgagcagccccacatctacatccccgcccccgccagcgagctggacagcagcagcaccaccaagggcatcctgttcgtgaaggagtacgtgaacgccagcgaggtgagcagcggcaagcccgtgagcgccagatacagcaacgtgagcagcatcgaggacagcttcgccatggagaagaagcccccctgcggcagcaccccctacagcgagagaaccaccggcggcatctgcacctactgcaacagagagatcagagactgccccaagatcaccctggagcacctgggcatctgctgccacgagtactgcttcaagtgcggcatctgcagcaagcccatgggcgacctgctggaccagatcttcatccacagagacaccatccactgcggcaagtgctacgagaagctgttctag

SEQ ID NO: 285457 - DNA, 1428 bp, Artificial Sequence
  derived and/or modified sequence
tgacgttcttccaccagcggggatacggaggaggaggaggaggaggaagtggtcccctttagcagcgacgagcagaagcgatctttgcgtaggacggccccccgcgagcattcatacgttttgagcgccgctaagaagtccactggcagtcccacccaagagacccaggcaccctttattgccaagcgtgtcgaagtggtggaggaagacggacccagcgagaaatcacaggatccccccgcgctagcaaggtcaactccaggttctaatcgctcctcaccaggaaataaggacaaagaagccccatgcagccgggagctgcagagggatctggctggcgaggaggcattcagagccccgaacacagatgcggctaggagctctgctcagctgagcgatggcaacgtcggcagcggggccaccggctcccgcccagaaggcttggccgcagtagatatagggtcggaaaggggctctagcagcgctaccagcgtctctgcagtgccagccgatcgaaagtcaaactcaacagctgcccaggaagatgcgaaggccgaccccaagggcgcattagccgactatgaaggaaaagacgtcgctactcgcgtcggagaagcctggcaggaaaggccgggtgcaccccgaggggggcagggagaccctgcggtgcccgctcagcagcccgctgatccaagtacccctgaacggcagagctcaccttccgggagtgaacagcttgtccggagggagtcgtgtggatcaagtgtgctcacggactttgagggcaaggatgttgcaacaaaagtcggcgaggcgtggcaagatcggcccggagcacccaggggaggacagggtgatccggccgttcctacccaacagcccgcagacccatccacacctgagcagcagaactctccgtcgggcagcgaacagtttgttagacgtgagagttgcacttcacgagtacgatcaccttcatcctgcatggtgactgtgaccgtgaccgccacaagcgaacagccacatatatatatcccagcacccgcatcagagctggatagctcttctacaacaaaggggatcctcttcgttaaagaatacgtcaatgcctcagaggtctcgtccggaaagccagtaagcgccaggtattcaaatgtctcatcaatcgaggactcttttgctatggaaaagaaaccaccctgcggatcaactccatattctgaaagaacgacagggggaatctgtacatattgtaatcgggaaatacgggactgccctaaaataactctggagcaccttggcatctgctgccatgagtattgcttcaaatgtggtatctgttccaaaccaatgggagacttgcttgatcagatttttattcaccgggacacaattcattgcggcaaatgctacgagaaactgttctag

SEQ ID NO: 285458 - DNA, 1428 bp, Artificial Sequence
  derived and/or modified sequence
tgaagaagcagcaccagcggggacacagaggaggaggaggaggaggaggtggtgcccttcagcagtgatgagcagaagaggagcctgcggaggacagccccccgggagcacagctatgtgctgtctgctgccaagaagagcacaggcagccccacccaggagacccaggcccccttcatcgccaagagggtggaggtggtggaggaggatggccccagcgagaagagccaggaccccccagccctggcccggagcaccccaggcagcaacagaagcagccctggcaacaaggacaaggaggccccctgcagccgggagctgcagagggacctggccggggaggaggccttccgggcccccaacacagatgctgcccggagcagcgcccagctgagtgatggaaatgtgggcagcggggccaccggcagcaggcctgagggcctggccgctgtggacatcggcagcgagcggggcagcagcagcgccacctctgtgtctgctgtgcctgctgacaggaagagcaacagcacagctgcccaggaggatgccaaggctgaccccaagggggccctggccgactatgagggcaaggatgtggccaccagggtgggggaggcctggcaggagaggcctggggccccccggggcggccagggcgaccctgctgtgcctgcccagcagcctgctgaccccagcaccccagagcggcagagcagccccagcggcagcgagcagctggtgcggcgggagagctgtggcagctctgtgctgacagactttgagggcaaggatgtggccaccaaggtgggggaggcctggcaggacaggcctggggccccccggggcggccagggcgaccctgctgtgcccacccagcagcctgctgaccccagcaccccagagcagcagaacagccccagcggcagcgagcagtttgtgcggcgggagagctgcaccagccgggtgcgcagccccagcagctgcatggtgacagtgacagtgacagccaccagcgagcagccccacatctacatcccagccccagccagcgagctggacagcagcagcaccaccaagggcatcctgtttgtgaaggagtatgtgaatgccagcgaggtgtcctctgggaagcctgtgtctgcccgctacagcaatgtgagcagcattgaggacagctttgccatggagaagaagccaccctgtggcagcaccccctacagcgagaggaccactggaggcatctgcacctactgcaaccgggagatccgggactgccccaagatcaccctggagcacctgggcatctgctgccacgagtactgcttcaagtgtggcatctgcagcaagcccatgggagacctgctggaccagatcttcatccaccgggacaccatccactgtgggaaatgttatgagaagctgttctag

SEQ ID NO: 285459 - DNA, 1428 bp, Artificial Sequence
  derived and/or modified sequence
tgacggagcagcaccagcggcgacaccgaggaggaggaggaggaggaggtcgtgccattctcttctgacgaacagaagagatccttgcgcaggaccgcacccagggaacattcgtacgttctgtcggcagccaagaagagcaccggtagtcccacacaggaaacccaggcaccgtttatcgccaagagggtcgaggtcgtcgaggaggatggccccagcgaaaaatcccaggatccaccagcactcgctagatccacacctgggagcaatcgctcctctccaggcaacaaggataaggaagctccatgttccagggaacttcaaagagacctggccggtgaggaagcatttagagcacccaatactgacgcagccagaagcagcgcccaactgagcgacggcaatgtgggaagtggtgccaccggaagccgaccagaaggtctggccgctgtggatattggctctgagcgtggttcttcaagtgccacaagtgtgtctgccgtcccggccgaccgcaagtctaacagcaccgcagcacaggaggatgccaaggccgatcctaagggcgccttagccgactatgaggggaaggatgtggcaacaagggtcggagaggcctggcaggagcgtcctggcgcgccacgtgggggccagggcgatcctgccgtgcctgcgcaacagcccgcagatcctagcaccccagaaaggcagtcttcccccagtggatcagaacaactggtgagaagggaatcatgtggctccagcgtcttgaccgacttcgaaggaaaggatgtagccaccaaggtaggcgaagcatggcaagatcggcccggcgccccgaggggcggacagggcgatccggcggttcctactcaacaacccgccgatccctctactccagaacagcagaacagcccgtcgggcagtgagcagttcgtgcggagagagagctgcacctctcgagttcgctccccatctagctgcatggtgaccgttaccgtcaccgctacaagtgaacagccccacatttacattcccgctcccgccagtgaattagacagttccagcaccacaaagggcatattgttcgtgaaggagtacgtcaatgccagcgaggtatcctccggtaagcccgtgagtgcccgctacagcaatgtgtcctctattgaagattcctttgctatggagaaaaaacctccatgcgggtcaacaccatactccgagaggactactgggggaatttgtacatactgcaatcgggagatccgagattgcccaaaaatcaccctggagcaccttggcatctgctgccatgaatactgctttaagtgtggaatctgtagcaagcccatgggagacctgcttgaccagatattcattcatcgcgacacaattcactgcgggaagtgttatgagaagctgttttag

SEQ ID NO: 285460 - DNA, 1428 bp, Artificial Sequence
  derived and/or modified sequence
tgaaggtcatccacctccggtgacaccgaggaggaggaggaggaggaggtagtgccgtttagttccgatgagcaaaaacggagccttaggaggacagcgcctagggagcatagttatgtgctgagtgcagctaagaaaagtaccggctcccctacccaagagacacaggctccattcatagcgaaacgcgtggaggtagtcgaagaggacgggccatccgaaaaatctcaggatccccctgccttggccaggtccacgcccggaagcaatcggtcctcaccgggaaacaaagataaggaagcaccttgcagccgagagttacagcgcgatctcgccggagaggaagcatttcgcgcaccaaacactgacgctgcacggtctagcgcccagctctcggatgggaatgttgggtctggcgcaaccggcagccggccagaaggactcgctgccgtggacataggctcggaaagggggagctcgagcgcaacctcagtgtctgctgtgccggctgatcgcaagagcaactccaccgctgcccaagaagatgctaaggccgatccgaaaggagctctcgcagactatgagggaaaagatgtggcaacccgcgtaggtgaagcctggcaggagcggcctggggcacctcgtggcggacagggggaccccgctgtacctgcacaacagcctgcggatcctagcacacctgaacgtcagtcctccccttccggaagcgagcaattagtgcggagggagtcttgcggcagctcagtcctgacggatttcgagggaaaggacgtcgccactaaggtcggtgaggcctggcaggaccgtccaggggctccaaggggcggacagggcgatcctgctgtgcccacgcagcagcctgccgacccgtccacccccgaacagcagaatagccctagcgggagcgagcagtttgttcgccgtgaatcctgtacttcccgggtgcgcagtccatcctcttgcatggtgaccgtgactgtaacggctactagcgagcaacctcacatttacattccagcacccgctagcgaactcgatagtagttccacaacgaaaggcattttatttgtcaaggagtatgtaaatgcaagtgaggtgtcttccggcaagccagtgagcgctagatactcaaatgtatccagcattgaggatagcttcgctatggaaaagaaacctccttgtggaagtacgccgtactcagaacggactacaggcggtatttgcacatattgcaatagagagatccgggactgtccaaagatcaccctggagcaccttgggatttgctgccatgaatattgtttcaaatgcggcatctgtagcaagcccatgggtgatttgctcgaccaaatatttatacacagagacaccatccattgcggaaagtgctacgaaaaactcttttag

SEQ ID NO: 285461 - DNA, 3626 bp, Artificial Sequence
  derived and/or modified sequence
gcgcagctctacatcaggggacaccgaggaggaggaggaggaggaggtggtgccattctcctcagatgaacagaaacggagtctgaggaggacagctccccgggagcactcctacgtcctgtcagcggccaagaagagcactggcagtcctacccaggagacacaggcaccgtttatcgcgaagagggtggaggtggtggaagaggacgggccttctgagaagagccaggacccacctgctctggcaagatccactcctggctcaaacaggtcttccccaggcaacaaagacaaggaggccccctgctccagagagctccagagggacttggctggtgaggaggctttcagggcccccaacacagatgctgcaaggtcaagtgcacagttgagtgatggcaatgtgggatccggagccacgggctcccggcctgaaggcttggctgcagtagacatcggctccgagagaggaagctccagtgccacttcagtctctgctgtccctgctgataggaagagcaacagcacagcagcccaggaggatgcaaaggcagacccaaagggggccttggctgattatgaggggaaggatgtggccaccagggtcggagaggcctggcaggagaggcctggagctccaagaggtggccaaggagacccagctgtacccgctcagcaacctgcagatcccagcaccccagagcggcagagcagccccagcggatctgagcaacttgtcagacgagagagttgtggcagcagcgtgttgactgattttgaggggaaggatgtggccaccaaggtcggagaggcctggcaggacaggcctggagccccaagaggtggccaaggagacccagctgtacccactcagcaacctgcagatcccagtaccccagaacagcagaacagccccagcggatctgagcaattcgtcagacgagagagctgcaccagcagggtgaggagcccctcgagctgcatggtcactgttactgtcactgccacatctgagcagcctcacatttatattccagcccccgcaagtgaattggactccagctctaccaccaaagggattctcttcgtgaaggagtacgtgaatgctagtgaagtgtcttctgggaagccagtatctgcacgctatagcaacgtcagcagcattgaggactcattcgccatggagaagaagcctccatgtggcagcactccatactctgagaggacaactggagggatctgtacttactgcaaccgtgagatccgagactgtccaaagattaccctagaacatcttggtatctgctgccatgaatattgctttaagtgtgggatttgcagtaaaccgatgggcgatctcctggatcagatcttcattcaccgtgacaccattcactgtgggaaatgctatgagaagctcttctagcgaccccccaccgccaggctgatcagaagctgatgactcgtggacaaatttggctgtccccagttttgccccaagttgctgtctccccttccctcacctcctccctccctgtttgatttcttcatgcttttgcccttctcaagttgaagttgcatacatccaatatcgtatcttaatgatgctatgataattgcttgtgtgtgtagcttcttgtagcttagaaagcgctttatgcccatgatgtcatttcaggctcaaccaaagaggatcaaacaggaattccatcttggcttccctaagacagattggctttctaatgagtttaagtgggcagaagtgtagggttcagtgtgtcctgactcccttgaggcttataatgggccaagttgaagactgttgatgatccctggtgggtaaattgcagacatcaaatgctagggattggcataggctagtgtttagcttgtctatttgccatatctattttttttaaatttccatacacttgtaaaagtagttagttgcttttgattgagttatatagcagtttttcatttggtcttccactcacctttcactatatttgagtgttcccttacaggtatgttggcatgtgttggaaaatttacacaattaggtttaaattcagtaggatgtgattttaggatgctactgatcaaagtgatatctgtgtctgttggaatcttgatagctgattaatttgccctcaattctgctccctgaacttcacacataaatcttcccaagtgggttttagggtgtatagatcccagcaggattaaggaggtggaaaagcagctaacatttcttgaggctctaccacatagcaggcactgtcacagagtaatggcattaatccccataataatcctgtgaaggtgatattctcatcccatcttagacatgaggatattggaactcagagaggtggctattgcattgcgcagaacgctacagagcccatgctcttcccagagcagcacccacaaaagcaagcattgattttgtgctcagtgtgtgccaagcactgtgcagagggtacacagttcctgccaggttaacaccctcccttcaggcctcccaaaggcataggcttgcaaagagcagaaggtgtgaaatcacactcttcctctgggcatcctggatccctgaattatccccccccccatgaagtacttcaagggccaagctgcccctttccctcctctccgcccatgaaaatgcctccaaactgagatgctttcagctgagaacagatttgactcacagacattaccaaagaggagcttgtgaatccaggaaaagctccagggggctagctgatctgagcagagagctttcagtgacccattttcctgtctagactctgccttaagctagtggcaactgctggggccccaggtacttgggacatggaaactcgttggatggctgggcagatgtaagcctgtccatgcagtcagccgatcctctgctcaggttcagctggactctgccatctgtgggcccagcatcactctgtaagttccttgaaaggaagaacaaccttagagtatttctgatacaaaatgagggcctctgctcttgatttaattataaaatgtctacgtctttctccagtttctgagccctatgcacattggcttgtgggcttgttcttcctgccaaatgatcagagaggaacattccatttatttgtagtggatttcctctggagggcatgtacccacactaaataccaactgctcttcctcagctgtagtccccaacatcagacttggcacgtggtggacactaacacacaggcactcaatgaatgagtgaaggaaataaaagtcaccccgttggtgagaggtgctatccctgagtctcagtgcaggaccagtggatgaaaggcaaggtaaagaggcccaagataggctggcttcccccgttcaaggtatagtctgcctttaagggagttttagaaccaacatgcaagacattgaaagaaatcttgcaagagccattattgacttagatccaaaacagcctctctcatgtctaaaaaggcacagaattttgcagatctgaggaagagggatgcattacctttttgcttcttttcaattgcttagtgtttctaatcatacttaatccacactaatgtgcgcaattataataaatggtaagatatcac

SEQ ID NO: 285462 - protein, 630 aa, Artificial Sequence
  derived and/or modified sequence
MSISALGGRTKGKPLPPGEEERNNVLKQMKVRTTLKGDKSWITKQDESEGRTIELPSGRSRATSFSSAGEVPKPRPPSTRAPTGYIIRGVFTKPIDSSSQPQQQFPKANGTPKSAASLVRTANAGPPRPSSSGYKMTTEDYKKLAPYNIRRSSTSGDTEEEEEEEVVPFSSDEQKRRSEAASGVLRRTAPREHSYVLSAAKKSTGPTQETQAPFIAKRVEVVEEDGPSEKSQDPPALARSTPGSNRSSPGNKDKEAPCSRELQRDLAGEEAFRAPNTDAARSSAQLSDGNVGSGATGSRPEGLAAVDIGSERGSSSATSVSAVPADRKSNSTAAQEDAKADPKGALADYEGKDVATRVGEAWQERPGAPRGGQGDPAVPAQQPADPSTPERQSSPSGSEQLVRRESCGSSVLTDFEGKDVATKVGEAWQDRPGAPRGGQGDPAVPTQQPADPSTPEQQNSPSGSEQFVRRESCTSRVRSPSSCMVTVTVTATSEQPHIYIPAPASELDSSSTTKGILFVKEYVNASEVSSGKPVSARYSNVSSIEDSFAMEKKPPCGSTPYSERTTGGICTYCNREIRDCPKITLEHLGICCHEYCFKCGICSKPMGDLLDQIFIHRDTIHCGKCYEKLF

SEQ ID NO: 285463 - DNA, 1893 bp, Artificial Sequence
  derived and/or modified sequence
atgagcatcagcgccctgggcggcagaaccaagggcaagcccctgccccccggcgaggaggagagaaacaacgtgctgaagcagatgaaggtgagaaccaccctgaagggcgacaagagctggatcaccaagcaggacgagagcgagggcagaaccatcgagctgcccagcggcagaagcagagccaccagcttcagcagcgccggcgaggtgcccaagcccagaccccccagcaccagagcccccaccggctacatcatcagaggcgtgttcaccaagcccatcgacagcagcagccagccccagcagcagttccccaaggccaacggcacccccaagagcgccgccagcctggtgagaaccgccaacgccggcccccccagacccagcagcagcggctacaagatgaccaccgaggactacaagaagctggccccctacaacatcagaagaagcagcaccagcggcgacaccgaggaggaggaggaggaggaggtggtgcccttcagcagcgacgagcagaagagaagaagcgaggccgccagcggcgtgctgagaagaaccgcccccagagagcacagctacgtgctgagcgccgccaagaagagcaccggccccacccaggagacccaggcccccttcatcgccaagagagtggaggtggtggaggaggacggccccagcgagaagagccaggacccccccgccctggccagaagcacccccggcagcaacagaagcagccccggcaacaaggacaaggaggccccctgcagcagagagctgcagagagacctggccggcgaggaggccttcagagcccccaacaccgacgccgccagaagcagcgcccagctgagcgacggcaacgtgggcagcggcgccaccggcagcagacccgagggcctggccgccgtggacatcggcagcgagagaggcagcagcagcgccaccagcgtgagcgccgtgcccgccgacagaaagagcaacagcaccgccgcccaggaggacgccaaggccgaccccaagggcgccctggccgactacgagggcaaggacgtggccaccagagtgggcgaggcctggcaggagagacccggcgcccccagaggcggccagggcgaccccgccgtgcccgcccagcagcccgccgaccccagcacccccgagagacagagcagccccagcggcagcgagcagctggtgagaagagagagctgcggcagcagcgtgctgaccgacttcgagggcaaggacgtggccaccaaggtgggcgaggcctggcaggacagacccggcgcccccagaggcggccagggcgaccccgccgtgcccacccagcagcccgccgaccccagcacccccgagcagcagaacagccccagcggcagcgagcagttcgtgagaagagagagctgcaccagcagagtgagaagccccagcagctgcatggtgaccgtgaccgtgaccgccaccagcgagcagccccacatctacatccccgcccccgccagcgagctggacagcagcagcaccaccaagggcatcctgttcgtgaaggagtacgtgaacgccagcgaggtgagcagcggcaagcccgtgagcgccagatacagcaacgtgagcagcatcgaggacagcttcgccatggagaagaagcccccctgcggcagcaccccctacagcgagagaaccaccggcggcatctgcacctactgcaacagagagatcagagactgccccaagatcaccctggagcacctgggcatctgctgccacgagtactgcttcaagtgcggcatctgcagcaagcccatgggcgacctgctggaccagatcttcatccacagagacaccatccactgcggcaagtgctacgagaagctgttctag

SEQ ID NO: 285464 - DNA, 1893 bp, Artificial Sequence
  derived and/or modified sequence
atgtctatcagcgcattgggtggacgcaccaagggcaaacccctacccccgggagaggaagagaggaataatgtgttgaagcagatgaaggttcggacaacactcaagggcgacaaaagctggattaccaagcaggatgagtctgagggaaggacaatcgaactcccctcgggacgttcacgggctacatccttctccagcgcgggagaggtgcccaaaccccgccctcctagcacacgggccccaaccgggtacatcatacgaggcgtatttacaaaacctattgattcaagctcacagccgcaacagcagttcccaaaggccaacggaacgcccaagtctgctgccagtctggtgcgcacggctaacgctgggcctcccagaccttcttcctccggctacaaaatgacaacggaagactacaagaagcttgcaccctacaatatcaggagaagttcaactagcggagataccgaggaggaggaagaggaagaggtggtaccattcagctccgacgagcaaaaaaggcgaagcgaagccgccagtggggttttacgtcgaacagctcctagggagcactcctacgtcctgagcgccgccaagaagtcaacgggcccaacccaggagacccaggctccttttattgcaaaacgcgtggaggtagttgaggaggacggcccaagtgagaaatctcaggatccacccgcgctagcccggtccacgcccgggagtaatcgctcgagccctggcaataaggacaaagaggctccctgcagcagagagctccaaagggatttggcaggtgaggaggcatttcgagccccgaatacagatgctgccagatctagcgcccaactatccgatggtaatgttggtagcggagcaactggcagtcgccctgaaggcctggcagcagtagacattgggtctgaaaggggatccagcagcgccacatccgtatcagcagtccctgctgataggaagagcaacagtaccgccgcccaggaggacgccaaagccgatcctaagggcgccttggcagactacgagggcaaggacgttgccactagggttggcgaggcatggcaggagcggcccggtgctccccggggagggcaaggcgatcccgccgttcccgcacagcagccagccgacccgtccacacctgagaggcagagctctccaagtggctcagagcagctggtgcgccgcgagagttgtggttcctcagtcctgacagactttgagggcaaggacgttgccactaaagtgggggaagcctggcaagataggcctggagccccaaggggtggccagggagaccccgctgttccaactcagcagcccgccgatccctcgaccccagagcaacagaattccccctcagggtctgagcagtttgttagacgtgaatcttgtacatctagagtacggtctcccagttcttgtatggttacagtgactgtcactgccaccagtgagcaaccacacatctatatccctgctcccgcgtcagagctggattcgagctctacaaccaagggcatcctgttcgtgaaggaatatgttaatgcctctgaagtttcatctggcaagccagtcagtgcacgctactctaacgtgagttctatcgaagactctttcgccatggagaaaaagccaccttgcgggtctaccccatacagcgaaagaacaactggaggaatttgcacttattgcaacagagagatccgcgattgtcccaagatcacattggagcacttaggtatatgttgtcatgagtactgtttcaaatgtggcatatgcagtaaacctatgggagatcttctggatcagatcttcatccacagagacacaattcattgcggcaagtgctatgagaagctattctag

SEQ ID NO: 285465 - DNA, 1893 bp, Artificial Sequence
  derived and/or modified sequence
atgagcatcagcgccctgggcggccgcaccaagggcaagcccctgcccccaggagaggaggagaggaacaacgtgctgaagcagatgaaggtgaggaccaccctgaagggggacaagtcctggatcaccaagcaggatgagagcgagggccgcaccatcgagctgcccagcggccgcagccgggccaccagcttcagcagcgctggggaggtgcccaagccccggccccccagcacccgggcccccaccggctacatcatccggggcgtcttcaccaagcccatcgacagcagcagccagccccagcagcagttccccaaggccaacggcacccccaagtctgctgccagcctggtgaggacagccaatgccggccccccccggcccagcagcagcggctacaagatgaccacagaggactacaagaagctggccccctacaacatccgccgcagcagcaccagcggggacacagaggaggaggaggaggaggaggtggtgcccttcagcagtgatgagcagaagagaagaagtgaggccgccagcggcgtgctgcggaggacagccccccgggagcacagctatgtgctgtctgctgccaagaagagcacaggccccacccaggagacccaggcccccttcatcgccaagagggtggaggtggtggaggaggatggccccagcgagaagagccaggaccccccagccctggcccggagcaccccaggcagcaacagaagcagccctggcaacaaggacaaggaggccccctgcagccgggagctgcagagggacctggccggggaggaggccttccgggcccccaacacagatgctgcccggagcagcgcccagctgagtgatggaaatgtgggcagcggggccaccggcagcaggcctgagggcctggccgctgtggacatcggcagcgagcggggcagcagcagcgccacctctgtgtctgctgtgcctgctgacaggaagagcaacagcacagctgcccaggaggatgccaaggctgaccccaagggggccctggccgactatgagggcaaggatgtggccaccagggtgggggaggcctggcaggagaggcctggggccccccggggcggccagggcgaccctgctgtgcctgcccagcagcctgctgaccccagcaccccagagcggcagagcagccccagcggcagcgagcagctggtgagaagagagagctgtggcagctctgtgctgacagactttgagggcaaggatgtggccaccaaggtgggggaggcctggcaggacaggcctggggccccccggggcggccagggcgaccctgctgtgcccacccagcagcctgctgaccccagcaccccagagcagcagaacagccccagcggcagcgagcagtttgtgagaagagagagctgcaccagccgggtgcgcagccccagcagctgcatggtgacagtgacagtgacagccaccagcgagcagccccacatctacatcccagccccagccagcgagctggacagcagcagcaccaccaagggcatcctgtttgtgaaggagtatgtgaatgccagcgaggtgagcagcggcaagcctgtgtctgcccgctacagcaatgtgagcagcattgaagattcttttgccatggagaagaagccaccctgtggcagcaccccctacagcgagaggaccaccggcggcatctgcacctactgcaaccgggagatccgggactgccccaagatcaccctggagcacctgggcatctgctgccacgagtactgcttcaagtgtggcatctgcagcaagcccatgggagacctgctggaccagatcttcatccaccgggacaccatccactgtgggaagtgctatgagaagctgttctag

SEQ ID NO: 285466 - DNA, 1893 bp, Artificial Sequence
  derived and/or modified sequence
atgagcatcagcgccctgggcggccggaccaagggcaagcccctgcctcccggcgaggaggagagaaacaacgtgttaaaacaaatgaaggtgagaactacccttaaaggagacaagagctggatcaccaagcaggacgaaagtgaaggcaggaccattgaactcccctctggtaggtccagagctacttcttttagcagtgctggggaagttccaaagcctagacctccgtctacgcgcgcccccacagggtatattatccggggagtcttcaccaagcccatagatagctccagccaaccacagcagcaattccctaaggctaatggcactcctaagagcgcagccagtctggtgcgcacagcaaacgcaggtcccccccggccctcctcgagcggctacaaaatgaccaccgaagactataagaagcttgcaccctataatatccgcagaagtagtacttctggtgataccgaggaagaagaggaagaagaggtggtgcccttttcgtcagacgaacagaaaagacggtcagaggctgccagtggcgtgctccgcaggaccgcccccagggagcatagctacgttcttagcgctgcaaagaagagtaccggacccacccaagagacccaggctccttttatcgccaaacgggtggaagtggtggaagaagacggtccctcagagaagtcccaagatcccccagcattggccagaagtacgcctgggtccaaccgatcgtcaccaggcaataaagataaagaagcaccgtgcagccgggaactgcagcgcgatctagcgggggaggaggcattccgcgcgccgaacaccgacgccgcccgtagctcagctcagctgtccgacgggaacgtagggtccggcgctaccggatcacggccggaggggctagccgccgtagatattggatctgagcgtggtagctcctcagccacttccgtgtccgccgtccccgcagatcggaagagcaatagcacggccgctcaggaggatgctaaggcagatcccaaaggggcattagccgactatgaggggaaagacgtagcaacaagggtgggggaggcgtggcaggagcggcctggtgcccctagaggcgggcaaggcgaccccgcagttccagcccaacagcccgccgacccatccacacctgagcggcagagtagccccagtggatctgagcagctggttagaagagagtcatgtggaagttcagtgcttaccgattttgagggcaaagacgtcgccaccaaggtaggggaagcttggcaggaccgtccaggggcgccccgagggggtcagggcgaccccgctgtgcctacccaacagcctgccgatcccagcacccctgagcagcaaaacagcccatctgggtctgagcagttcgtaagacgcgagagctgcaccagtagggttcgaagtccatcctcctgcatggtgactgttactgtgactgccacctctgagcagccacacatctatataccagctcctgcatccgagttggatagctcaagcaccactaagggtatcctgtttgtgaaagagtacgtaaatgcctcagaggtgtcatccggcaagcctgtgtcagcccgctactctaacgtgagctccatcgaagactcttttgccatggagaagaagccaccatgtggttccaccccttatagtgagagaaccactggcgggatctgcacatactgcaacagggagatccgcgattgcccaaaaatcacactggagcatctgggtatttgctgtcacgagtactgctttaagtgtggaatttgttccaaaccaatgggagacctgctagatcagatattcatccatagagacactattcactgcgggaagtgctatgaaaagttattttag

SEQ ID NO: 285467 - DNA, 1893 bp, Artificial Sequence
  derived and/or modified sequence
atgagcatcagcgcactaggcggtcgcacaaagggcaaacccctgccacccggagaggaggagagaaataatgtccttaaacagatgaaggtgcggaccaccctgaagggagataagtcgtggatcaccaagcaggacgagtccgagggaaggaccattgagctgccttccggcagatcccgtgccacttctttcagctccgctggcgaggtccctaaaccaaggcctccaagcacccgtgctccaaccggttacatcatcagaggggtctttacaaagcctatcgatagcagcagccagcctcagcagcagtttcctaaagctaacgggacccccaagtctgccgcttcactcgtcaggaccgctaacgctggtcccccacgaccctcatcgagtgggtataaaatgaccactgaagattacaaaaagctcgccccatacaatatacgcagaagttcaacttcaggagatacagaggaagaggaagaagaggaagttgtccccttttctagtgatgagcagaagcgacggtccgaggcagctagcggtgtgctgcgacggacagcacctcgggaacattcatacgtcctgagcgccgcaaaaaaaagcaccggccctacccaagaaacacaagcccctttcattgcgaagcgggtagaagtagttgaggaagatggaccaagcgaaaagtctcaggacccgccagcccttgcacgcagtacccccggtagcaaccgctcaagcccaggcaataaagacaaagaggcaccttgttccagggaactgcagagggacttagcgggtgaagaagcctttagagccccaaataccgacgcggctcggtcttcagcccagctctcagatggcaatgtgggctcaggcgctactggatctagacccgaaggcctcgctgctgtggatatcggttcagagagaggctccagctccgccacgagcgtctctgccgtgcctgccgaccgcaaaagtaactccaccgccgctcaggaggatgccaaagccgatcccaaaggtgccctggctgattacgagggcaaagatgtggccaccagagtcggtgaggcttggcaggagcgacccggagcacctcggggtggacagggcgatcccgctgtccccgcacagcagcccgctgacccctctactcctgaacgacagtcatctccaagtggctctgaacagctggtgaggagagaatcttgcggcagttctgtgttgacggactttgagggtaaggacgtggctaccaaagttggggaagcatggcaagaccgaccaggcgcaccccgaggaggccaaggagatcccgcagtccctacccaacagccagctgatccctccacccccgaacagcagaattcgccttcagggtctgagcaattcgtgcggagggaaagctgtacaagtcgcgtaagatctcccagctcctgtatggtgacagtgaccgtgaccgcgacgtcggaacagccccatatctacattcccgctccagcatcagagttagacagcagcagcaccacaaaaggcattctgtttgtgaaggagtatgtcaatgccagcgaggtcagctcaggcaaaccagtctctgccaggtattccaatgtgtcctcgatcgaggatagctttgccatggagaagaagcctccctgcggatccaccccttacagcgagaggacaactgggggaatttgtacctactgcaacagggagattcgggactgtccaaaaatcacactcgaacacctggggatctgttgccatgagtactgtttcaaatgcggaatatgctccaaaccgatgggcgaccttcttgaccagatcttcattcacagggacacaatccattgcggtaagtgctacgaaaagctcttttag

SEQ ID NO: 285468 - DNA, 4148 bp, Artificial Sequence
  derived and/or modified sequence
cagaagccctgctgaatcaagtgagaggagagctgcggagcaatcaccatgagtatctcagctcttggaggccgcaccaaagggaagcctctgccaccaggcgaggaggagcgcaataacgttctcaagcagatgaaagtgcgaaccacgctgaagggggacaagagctggattaccaagcaggatgaatcggagggtcgcaccatagagctgccctcaggccggagtcgcgccacatccttttcatcagctggggaggttccgaagcctaggcctccgagcacaagggctcccactggctacatcatccggggagtgttcaccaagcccatagacagctcttcccagccccagcagcagttccccaaggccaacgggactccaaaaagtgctgccagtctggtgagaacagctaacgctggtcctccccgcccctcctcctctggctacaagatgaccactgaggattacaagaagctggcaccctacaatatcaggcgcagctctacatcaggggacaccgaggaggaggaggaggaggaggtggtgccattctcctcagatgaacagaaacggaggtcagaggctgcaagcggtgttctgaggaggacagctccccgggagcactcctacgtcctgtcagcggccaagaagagcactggtcctacccaggagacacaggcaccgtttatcgcgaagagggtggaggtggtggaagaggacgggccttctgagaagagccaggacccacctgctctggcaagatccactcctggctcaaacaggtcttccccaggcaacaaagacaaggaggccccctgctccagagagctccagagggacttggctggtgaggaggctttcagggcccccaacacagatgctgcaaggtcaagtgcacagttgagtgatggcaatgtgggatccggagccacgggctcccggcctgaaggcttggctgcagtagacatcggctccgagagaggaagctccagtgccacttcagtctctgctgtccctgctgataggaagagcaacagcacagcagcccaggaggatgcaaaggcagacccaaagggggccttggctgattatgaggggaaggatgtggccaccagggtcggagaggcctggcaggagaggcctggagctccaagaggtggccaaggagacccagctgtacccgctcagcaacctgcagatcccagcaccccagagcggcagagcagccccagcggatctgagcaacttgtcagacgagagagttgtggcagcagcgtgttgactgattttgaggggaaggatgtggccaccaaggtcggagaggcctggcaggacaggcctggagccccaagaggtggccaaggagacccagctgtacccactcagcaacctgcagatcccagtaccccagaacagcagaacagccccagcggatctgagcaattcgtcagacgagagagctgcaccagcagggtgaggagcccctcgagctgcatggtcactgttactgtcactgccacatctgagcagcctcacatttatattccagcccccgcaagtgaattggactccagctctaccaccaaagggattctcttcgtgaaggagtacgtgaatgctagtgaagtgtcttctgggaagccagtatctgcacgctatagcaacgtcagcagcattgaggactcattcgccatggagaagaagcctccatgtggcagcactccatactctgagaggacaactggagggatctgtacttactgcaaccgtgagatccgagactgtccaaagattaccctagaacatcttggtatctgctgccatgaatattgctttaagtgtgggatttgcagtaaaccgatgggcgatctcctggatcagatcttcattcaccgtgacaccattcactgtgggaaatgctatgagaagctcttctagcgaccccccaccgccaggctgatcagaagctgatgactcgtggacaaatttggctgtccccagttttgccccaagttgctgtctccccttccctcacctcctccctccctgtttgatttcttcatgcttttgcccttctcaagttgaagttgcatacatccaatatcgtatcttaatgatgctatgataattgcttgtgtgtgtagcttcttgtagcttagaaagcgctttatgcccatgatgtcatttcaggctcaaccaaagaggatcaaacaggaattccatcttggcttccctaagacagattggctttctaatgagtttaagtgggcagaagtgtagggttcagtgtgtcctgactcccttgaggcttataatgggccaagttgaagactgttgatgatccctggtgggtaaattgcagacatcaaatgctagggattggcataggctagtgtttagcttgtctatttgccatatctattttttttaaatttccatacacttgtaaaagtagttagttgcttttgattgagttatatagcagtttttcatttggtcttccactcacctttcactatatttgagtgttcccttacaggtatgttggcatgtgttggaaaatttacacaattaggtttaaattcagtaggatgtgattttaggatgctactgatcaaagtgatatctgtgtctgttggaatcttgatagctgattaatttgccctcaattctgctccctgaacttcacacataaatcttcccaagtgggttttagggtgtatagatcccagcaggattaaggaggtggaaaagcagctaacatttcttgaggctctaccacatagcaggcactgtcacagagtaatggcattaatccccataataatcctgtgaaggtgatattctcatcccatcttagacatgaggatattggaactcagagaggtggctattgcattgcgcagaacgctacagagcccatgctcttcccagagcagcacccacaaaagcaagcattgattttgtgctcagtgtgtgccaagcactgtgcagagggtacacagttcctgccaggttaacaccctcccttcaggcctcccaaaggcataggcttgcaaagagcagaaggtgtgaaatcacactcttcctctgggcatcctggatccctgaattatccccccccccatgaagtacttcaagggccaagctgcccctttccctcctctccgcccatgaaaatgcctccaaactgagatgctttcagctgagaacagatttgactcacagacattaccaaagaggagcttgtgaatccaggaaaagctccagggggctagctgatctgagcagagagctttcagtgacccattttcctgtctagactctgccttaagctagtggcaactgctggggccccaggtacttgggacatggaaactcgttggatggctgggcagatgtaagcctgtccatgcagtcagccgatcctctgctcaggttcagctggactctgccatctgtgggcccagcatcactctgtaagttccttgaaaggaagaacaaccttagagtatttctgatacaaaatgagggcctctgctcttgatttaattataaaatgtctacgtctttctccagtttctgagccctatgcacattggcttgtgggcttgttcttcctgccaaatgatcagagaggaacattccatttatttgtagtggatttcctctggagggcatgtacccacactaaataccaactgctcttcctcagctgtagtccccaacatcagacttggcacgtggtggacactaacacacaggcactcaatgaatgagtgaaggaaataaaagtcaccccgttggtgagaggtgctatccctgagtctcagtgcaggaccagtggatgaaaggcaaggtaaagaggcccaagataggctggcttcccccgttcaaggtatagtctgcctttaagggagttttagaaccaacatgcaagacattgaaagaaatcttgcaagagccattattgacttagatccaaaacagcctctctcatgtctaaaaaggcacagaattttgcagatctgaggaagagggatgcattacctttttgcttcttttcaattgcttagtgtttctaatcatacttaatccacactaatgtgcgcaattataataaatggtaagatatcacatgtgtc

SEQ ID NO: 285469 - protein, 468 aa, Artificial Sequence
  derived and/or modified sequence
MTTEDYKKLAPYNIRRSSTSGDTEEEEEEEVVPFSSDEQKRSSPTQETQAPFIAKRVEVVEEDGPSEKSQDPPALARSTPGSNRSSPGNKDKEAPCSRELQRDLAGEEAFRAPNTDAARSSAQLSDGNVGSGATGSRPEGLAAVDIGSERGSSSATSVSAVPADRKSNSTAAQEDAKADPKGALADYEGKDVATRVGEAWQERPGAPRGGQGDPAVPAQQPADPSTPERQSSPSGSEQLVRRESCGSSVLTDFEGKDVATKVGEAWQDRPGAPRGGQGDPAVPTQQPADPSTPEQQNSPSGSEQFVRRESCTSRVRSPSSCMVTVTVTATSEQPHIYIPAPASELDSSSTTKGILFVKEYVNASEVSSGKPVSARYSNVSSIEDSFAMEKKPPCGSTPYSERTTGGICTYCNREIRDCPKITLEHLGICCHEYCFKCGICSKPMGDLLDQIFIHRDTIHCGKCYEKLF

SEQ ID NO: 285470 - DNA, 1407 bp, Artificial Sequence
  derived and/or modified sequence
atgaccaccgaggactacaagaagctggccccctacaacatcagaagaagcagcaccagcggcgacaccgaggaggaggaggaggaggaggtggtgcccttcagcagcgacgagcagaagagaagcagccccacccaggagacccaggcccccttcatcgccaagagagtggaggtggtggaggaggacggccccagcgagaagagccaggacccccccgccctggccagaagcacccccggcagcaacagaagcagccccggcaacaaggacaaggaggccccctgcagcagagagctgcagagagacctggccggcgaggaggccttcagagcccccaacaccgacgccgccagaagcagcgcccagctgagcgacggcaacgtgggcagcggcgccaccggcagcagacccgagggcctggccgccgtggacatcggcagcgagagaggcagcagcagcgccaccagcgtgagcgccgtgcccgccgacagaaagagcaacagcaccgccgcccaggaggacgccaaggccgaccccaagggcgccctggccgactacgagggcaaggacgtggccaccagagtgggcgaggcctggcaggagagacccggcgcccccagaggcggccagggcgaccccgccgtgcccgcccagcagcccgccgaccccagcacccccgagagacagagcagccccagcggcagcgagcagctggtgagaagagagagctgcggcagcagcgtgctgaccgacttcgagggcaaggacgtggccaccaaggtgggcgaggcctggcaggacagacccggcgcccccagaggcggccagggcgaccccgccgtgcccacccagcagcccgccgaccccagcacccccgagcagcagaacagccccagcggcagcgagcagttcgtgagaagagagagctgcaccagcagagtgagaagccccagcagctgcatggtgaccgtgaccgtgaccgccaccagcgagcagccccacatctacatccccgcccccgccagcgagctggacagcagcagcaccaccaagggcatcctgttcgtgaaggagtacgtgaacgccagcgaggtgagcagcggcaagcccgtgagcgccagatacagcaacgtgagcagcatcgaggacagcttcgccatggagaagaagcccccctgcggcagcaccccctacagcgagagaaccaccggcggcatctgcacctactgcaacagagagatcagagactgccccaagatcaccctggagcacctgggcatctgctgccacgagtactgcttcaagtgcggcatctgcagcaagcccatgggcgacctgctggaccagatcttcatccacagagacaccatccactgcggcaagtgctacgagaagctgttctag

SEQ ID NO: 285471 - DNA, 1407 bp, Artificial Sequence
  derived and/or modified sequence
atgactaccgaggactataagaagttggcaccatataacatccggcggagtagtacgtccggcgataccgaagaagaagaagaggaagaagttgtgccattttcgtccgacgaacaaaaaagatcttctcctacacaggaaacacaagcaccattcattgccaagagagtcgaagtcgtagaggaggatgggccctccgagaaatcacaggatccacctgcacttgcgcggagcaccccaggaagtaacagaagttccccaggcaataaagataaggaggccccatgctcacgcgagctgcaacgagatctagcgggggaagaagctttccgcgcacccaacaccgatgccgcaagatcttcggcacagctctcagatgggaacgtcgggagtggagcaaccggatctcggcctgaggggcttgcagccgtggacatcggaagcgaaagagggtcctctagcgcaacctccgtctccgcagttcccgccgatcggaagagtaattcaaccgcagcccaagaagacgccaaggcagacccaaaaggggctctggccgactacgagggaaaggatgtcgccacgcgggtgggagaggcctggcaggaacgtccaggagctccccggggagggcagggagatcccgcagtgcctgcacagcagcccgccgacccttcaacaccagaacgccaatcatctccttccgggtccgagcagctggttcgccgggaaagttgtggctcttctgtcctgacagactttgaaggcaaggacgtggccacaaaggtgggggaagcctggcaggacagacctggagcccctcgtggcggccagggggacccagcggtacctacccagcagccagctgatccctccacaccagagcagcagaattcaccatccggcagcgaacagttcgtgcggagggaatcttgcacttcccgggttcgctccccctcaagctgtatggttaccgtgacagtgactgccaccagcgaacaacctcacatatatatccctgctccggccagcgaacttgattcatcctctaccactaagggcattcttttcgtcaaggagtatgtaaacgcttcagaggtatcatccgggaaacctgtgtctgctcgctactctaacgtttcttccatcgaggactctttcgccatggaaaaaaaacctccctgcggctccacaccttactctgaacgcaccactgggggtatttgcacatactgtaatagagagattcgtgactgtcccaaaatcacgttagagcatctgggaatttgctgtcacgaatactgcttcaagtgtgggatctgctccaagccgatgggtgacttgttagatcagatatttatccacagggatacaattcactgtggcaaatgttacgaaaagttgttttag

SEQ ID NO: 285472 - DNA, 1407 bp, Artificial Sequence
  derived and/or modified sequence
atgaccacagaggactacaagaagctggccccctacaacatcagaagaagcagcaccagcggggacacagaggaggaggaggaggaggaggtggtgcccttcagcagtgatgagcagaagaggagcagccccacccaggagacccaggcccccttcatcgccaagagggtggaggtggtggaggaggatggccccagcgagaagagccaggaccccccagccctggcccggagcaccccaggcagcaacagaagcagccctggcaacaaggacaaggaggccccctgcagccgggagctgcagagggacctggccggggaggaggccttccgggcccccaacacagatgctgcccggagcagcgcccagctgagtgatggaaatgtgggcagcggggccaccggcagcaggcctgagggcctggccgctgtggacatcggcagcgagcggggcagcagcagcgccacctctgtgtctgctgtgcctgctgacaggaagagcaacagcacagctgcccaggaggatgccaaggctgaccccaagggggccctggccgactatgagggcaaggatgtggccaccagggtgggggaggcctggcaggagaggcctggggccccccggggcggccagggcgaccctgctgtgcctgcccagcagcctgctgaccccagcaccccagagcggcagagcagccccagcggcagcgagcagctggtgagaagagagagctgtggcagctctgtgctgacagactttgagggcaaggatgtggccaccaaggtgggggaggcctggcaggacaggcctggggccccccggggcggccagggcgaccctgctgtgcccacccagcagcctgctgaccccagcaccccagagcagcagaacagccccagcggcagcgagcagtttgtgagaagagagagctgcaccagccgggtgcgcagccccagcagctgcatggtgacagtgacagtgacagccaccagcgagcagccccacatctacatcccagccccagccagcgagctggacagcagcagcaccaccaagggcatcctgtttgtgaaggagtatgtgaatgccagcgaggtgagcagcggcaagcctgtgtctgcccgctacagcaatgtgagcagcattgaagattcttttgccatggagaagaagccaccctgtggcagcaccccctacagcgagaggaccaccggcggcatctgcacctactgcaaccgggagatccgggactgccccaagatcaccctggagcacctgggcatctgctgccacgagtactgcttcaagtgtggcatctgcagcaagcccatgggagacctgctggaccagatcttcatccaccgggacaccatccactgtgggaagtgctatgagaagctgttctag

SEQ ID NO: 285473 - DNA, 1407 bp, Artificial Sequence
  derived and/or modified sequence
atgaccaccgaggactacaagaagctggccccctacaacatccggcggagcagcacaagtggcgataccgaggaagaggaagaagaagaggttgtgcccttttccagcgacgaacagaaacgaagcagtcccacccaagaaacccaggctcctttcattgccaaacgcgtcgaagtcgtggaagaggatggtccaagcgaaaaaagtcaagacccacccgctctggcccgcagcacacccggcagtaatagatcatcacctgggaacaaggataaggaggccccttgtagccgtgagttacagagggaccttgcgggcgaagaggcttttcgggcccccaacacagacgctgctaggtcatcagctcagttatccgacggcaacgtcggatccggggccacaggcagtcgaccagaaggactcgccgctgtcgatatcggaagcgaaagagggtccagctccgccacttcagtctcagcggtacctgctgaccggaagtctaacagcactgctgcccaggaggatgccaaggcagacccgaaaggagccctggccgattacgagggcaaagacgtggcaactagagttggtgaagcgtggcaagagaggccaggagccccccgcggcggtcagggggaccctgccgttcctgctcagcaacctgccgatccttcaacaccagaacgccagtcttcgccctctgggagtgagcagctggtgcggagggaatcttgtggtagctcggtccttaccgacttcgaagggaaggatgtcgctacaaaagtgggtgaggcctggcaggaccgacctggcgccccaagagggggccagggcgatccagcggtgcccacacagcagcctgccgatccgagtacaccagaacagcaaaactcccccagcgggtctgagcagtttgtcagaagagaaagttgtaccagcagagtgcgctcaccctcgtcctgtatggtaacggtcactgtgacagcgacctccgagcagccccatatctacattcctgcacctgccagcgagcttgattcctcgagcacaaccaaggggatcctgtttgtgaaagaatatgtcaacgcgagtgaagtaagcagtgggaagccagtgtctgccagatactcaaacgtctcctcgattgaagattcttttgccatggaaaagaaaccaccttgtggaagcactccctactctgagaggacaaccggcgggatttgcacttattgcaaccgcgaaatcagggattgtcctaaaattacacttgagcacttggggatttgttgccatgagtactgctttaaatgcggcatttgctcaaagcctatgggggatcttcttgatcagatctttatccatagagatactattcactgtggcaagtgctatgaaaaactgttctag

SEQ ID NO: 285474 - DNA, 1407 bp, Artificial Sequence
  derived and/or modified sequence
atgacgaccgaggactacaaaaaactcgcaccatacaatatccgtcgatcatcaacctccggtgatacagaagaggaggaggaagaggaagtggtcccttttagttcagacgaacagaagaggtcatccccgacgcaggagacacaagcaccatttatagctaaaagggtcgaggtggttgaggaagacgggccaagcgaaaaatctcaggacccgcctgcactagcccgtagcactcccggtagcaatcggtctagtccgggtaataaggataaagaagcaccttgttccagggagttgcagcgcgatctggcgggagaggaggctttcagagctccaaatactgatgcggcacgctccagcgcacaactcagcgacgggaacgtgggcagcggagcgacaggctctaggcccgagggcctagccgcagttgatatcgggtccgaaagggggtcctcttccgctacttctgtatctgccgtgcccgcagaccggaagtctaacagcaccgcagcacaggaagacgcaaaggccgacccaaaaggggctttggctgactatgaagggaaagacgttgctaccagggtgggagaggcctggcaagaacggccaggcgcaccacgtggcggtcagggagatcccgctgtccccgctcagcagcctgcggaccccagtaccccagaaagacaatctagcccttcaggtagcgagcaacttgtgcgacgcgagagctgcgggtcttctgtactgactgatttcgaggggaaggatgtggccacgaaagtcggtgaggcctggcaagatagacccggagctcctcgaggaggccagggagacccagctgtacccactcaacagcctgcagatccatctaccccggaacagcaaaacagcccttccgggtctgagcaatttgtccggcgagagtcatgcacctccagggtgcggtctccttcatcctgtatggtaacagtgactgttacagcaacttccgagcagccccacatctatatcccagcacccgcttccgagctggattcatcctcaacgactaagggaatccttttcgtaaaggagtacgtgaacgccagtgaagtttcttcaggaaagccagtttctgcaaggtatagtaatgtctcttctattgaggactcttttgctatggaaaaaaagcctccctgcgggtccacaccatatagtgaacgaacaacaggcggtatctgcacctattgcaacagggagatcagagattgtcccaaaatcacgcttgagcacctgggcatttgctgccatgagtattgctttaagtgcggaatttgttctaaacctatgggcgatctccttgaccagattttcatccatagggacaccattcactgcggcaagtgttatgagaaactgttttag

SEQ ID NO: 285475 - DNA, 3878 bp, Artificial Sequence
  derived and/or modified sequence
gttccctgaagctcggtggggtttgcctacacagctgctctgagtggcgcagttccgggtgtctgtcagggccaaaagcaaagaggaaaggctcccaggcagctcctggtccacctctcatgtgtccactgggctgtgtggccaaatctggaggcaggagggagcctgcaggtagacacatggaaccttctcctctctagtgctgccagtctggtgagaacagctaacgctggtcctccccgcccctcctcctctggctacaagatgaccactgaggattacaagaagctggcaccctacaatatcaggcgcagctctacatcaggggacaccgaggaggaggaggaggaggaggtggtgccattctcctcagatgaacagaaacggagcagtcctacccaggagacacaggcaccgtttatcgcgaagagggtggaggtggtggaagaggacgggccttctgagaagagccaggacccacctgctctggcaagatccactcctggctcaaacaggtcttccccaggcaacaaagacaaggaggccccctgctccagagagctccagagggacttggctggtgaggaggctttcagggcccccaacacagatgctgcaaggtcaagtgcacagttgagtgatggcaatgtgggatccggagccacgggctcccggcctgaaggcttggctgcagtagacatcggctccgagagaggaagctccagtgccacttcagtctctgctgtccctgctgataggaagagcaacagcacagcagcccaggaggatgcaaaggcagacccaaagggggccttggctgattatgaggggaaggatgtggccaccagggtcggagaggcctggcaggagaggcctggagctccaagaggtggccaaggagacccagctgtacccgctcagcaacctgcagatcccagcaccccagagcggcagagcagccccagcggatctgagcaacttgtcagacgagagagttgtggcagcagcgtgttgactgattttgaggggaaggatgtggccaccaaggtcggagaggcctggcaggacaggcctggagccccaagaggtggccaaggagacccagctgtacccactcagcaacctgcagatcccagtaccccagaacagcagaacagccccagcggatctgagcaattcgtcagacgagagagctgcaccagcagggtgaggagcccctcgagctgcatggtcactgttactgtcactgccacatctgagcagcctcacatttatattccagcccccgcaagtgaattggactccagctctaccaccaaagggattctcttcgtgaaggagtacgtgaatgctagtgaagtgtcttctgggaagccagtatctgcacgctatagcaacgtcagcagcattgaggactcattcgccatggagaagaagcctccatgtggcagcactccatactctgagaggacaactggagggatctgtacttactgcaaccgtgagatccgagactgtccaaagattaccctagaacatcttggtatctgctgccatgaatattgctttaagtgtgggatttgcagtaaaccgatgggcgatctcctggatcagatcttcattcaccgtgacaccattcactgtgggaaatgctatgagaagctcttctagcgaccccccaccgccaggctgatcagaagctgatgactcgtggacaaatttggctgtccccagttttgccccaagttgctgtctccccttccctcacctcctccctccctgtttgatttcttcatgcttttgcccttctcaagttgaagttgcatacatccaatatcgtatcttaatgatgctatgataattgcttgtgtgtgtagcttcttgtagcttagaaagcgctttatgcccatgatgtcatttcaggctcaaccaaagaggatcaaacaggaattccatcttggcttccctaagacagattggctttctaatgagtttaagtgggcagaagtgtagggttcagtgtgtcctgactcccttgaggcttataatgggccaagttgaagactgttgatgatccctggtgggtaaattgcagacatcaaatgctagggattggcataggctagtgtttagcttgtctatttgccatatctattttttttaaatttccatacacttgtaaaagtagttagttgcttttgattgagttatatagcagtttttcatttggtcttccactcacctttcactatatttgagtgttcccttacaggtatgttggcatgtgttggaaaatttacacaattaggtttaaattcagtaggatgtgattttaggatgctactgatcaaagtgatatctgtgtctgttggaatcttgatagctgattaatttgccctcaattctgctccctgaacttcacacataaatcttcccaagtgggttttagggtgtatagatcccagcaggattaaggaggtggaaaagcagctaacatttcttgaggctctaccacatagcaggcactgtcacagagtaatggcattaatccccataataatcctgtgaaggtgatattctcatcccatcttagacatgaggatattggaactcagagaggtggctattgcattgcgcagaacgctacagagcccatgctcttcccagagcagcacccacaaaagcaagcattgattttgtgctcagtgtgtgccaagcactgtgcagagggtacacagttcctgccaggttaacaccctcccttcaggcctcccaaaggcataggcttgcaaagagcagaaggtgtgaaatcacactcttcctctgggcatcctggatccctgaattatccccccccccatgaagtacttcaagggccaagctgcccctttccctcctctccgcccatgaaaatgcctccaaactgagatgctttcagctgagaacagatttgactcacagacattaccaaagaggagcttgtgaatccaggaaaagctccagggggctagctgatctgagcagagagctttcagtgacccattttcctgtctagactctgccttaagctagtggcaactgctggggccccaggtacttgggacatggaaactcgttggatggctgggcagatgtaagcctgtccatgcagtcagccgatcctctgctcaggttcagctggactctgccatctgtgggcccagcatcactctgtaagttccttgaaaggaagaacaaccttagagtatttctgatacaaaatgagggcctctgctcttgatttaattataaaatgtctacgtctttctccagtttctgagccctatgcacattggcttgtgggcttgttcttcctgccaaatgatcagagaggaacattccatttatttgtagtggatttcctctggagggcatgtacccacactaaataccaactgctcttcctcagctgtagtccccaacatcagacttggcacgtggtggacactaacacacaggcactcaatgaatgagtgaaggaaataaaagtcaccccgttggtgagaggtgctatccctgagtctcagtgcaggaccagtggatgaaaggcaaggtaaagaggcccaagataggctggcttcccccgttcaaggtatagtctgcctttaagggagttttagaaccaacatgcaagacattgaaagaaatcttgcaagagccattattgacttagatccaaaacagcctctctcatgtctaaaaaggcacagaattttgcagatctgaggaagagggatgcattacctttttgcttcttttcaattgcttagtgtttctaatcatacttaatccacactaatgtgcgcaattataataaatggtaagatatcacatgtgtc

SEQ ID NO: 285476 - DNA, 1949 bp, Artificial Sequence
  derived and/or modified sequence
gaagggcgaccgcgaaactgggactttctcggagcgccggggccctaccagcgttcacagtccgccgctcccacccttctcacgtctgacggactctgctgacagcccttgccctgttggatgaataggcacctctggaagagccaactgtgtgagatggtgcagcccagtggtggcccggcagcagatcaggacgtactgggcgaagagtctcctctggggaagccagccatgctgcacctgccttcagaacagggcgctcctgagaccctccagcgctgcctggaggagaatcaagagctccgagatgccatccggcagagcaaccagattctgcgggagcgctgcgaggagcttctgcatttccaagccagccagagggaggagaaggagttcctcatgtgcaagttccaggaggccaggaaactggtggagagactcggcctggagaagctcgatctgaagaggcagaaggagcaggctctgcgggaggtggagcacctgaagagatgccagcagatggctgaggacaaggcctctgtgaaagcccaggtgacgtccttgctcggggagctgcaggagagccagagtcgcttggaggctgccactaaggaatgccaggctctggagggtcgggcccgggcggccagcgagcaggcgcggcagctggagagtgagcgcgaggcgctgcagcagcagcacagcgtgcaggtggaccagctgcgcatgcagggccagagcgtggaggccgcgctccgcatggagcgccaggccgcctcggaggagaagaggaagctggcccagttgcaggtggcctatcaccagctcttccaagaatacgacaaccacatcaagagcagcgtggtgggcagtgagcggaagcgaggaatgcagctggaagatctcaaacagcagctccagcaggccgaggaggccctggtggccaaacaggaggtgatcgataagctgaaggaggaggccgagcagcacaagattgtgatggagaccgttccggtgctgaaggcccaggcggatatctacaaggcggacttccaggctgagaggcaggcccgggagaagctggccgagaagaaggagctcctgcaggagcagctggagcagctgcagagggagtacagcaaactgaaggccagctgtcaggagtcggccaggatcgaggacatgaggaagcggcatgtcgaggtctcccaggcccccttgccccccgcccctgcctacctctcctctcccctggccctgcccagccagaggaggagcccccccgaggagccacctgacttctgctgtcccaagtgccagtatcaggcccctgatatggacaccctgcagatacatgtcatggagtgcattgagtagggccggccagtgcaaggccactgcctgccgaggacgtgcccgggaccgtgcagtctgcgctttcctctcccgcctgcctagcccaggatgaagggctgggtggccacaactgggatgccacctggagccccacccaggagctggccgcggcaccttacgcttcagctgttgatccgctggtcccctcttttggggtagatgcggccccgatcaggcctgactcgctgctctttttgttcccttctgtctgctcgaaccacttgcctcgggctaatccctccctcttcctccacccggcactggggaagtcaagaatggggcctggggctctcagggagaactgcttcccctggcagagctgggtggcagctcttcctcccaccggacaccgacccgcccgctgctgtgccctgggagtgctgccctcttaccatgcacacgggtgctctccttttgggctgcatgctattccattttgcagccagaccgatgtgtatttaaccagtcactattgatggacatttgggttgtttcccatctttttgttaccataaataatggcatagtaaaaa

SEQ ID NO: 285477 - DNA, 940 bp, Artificial Sequence
  derived and/or modified sequence
ccacgctccaggccgtttgttcctgctgctccctttgggattaactagagattgaaccggctcaccttgtttcagctcaggccctgcaaccgaccgaccgtctgctgggctccaagtcacctgagaggcgaggtgaggtggggaaactaaggcccagagaagtgaggaccccgcagactatcaatcccagtctcttcccctcactccctgtgaagctctccagcatcatcgaggtcccatcaggtggggaaagatgctgttccaggcgcacactagtctacaaggccagagctttctggaagggggcacccttgccctgttggatgaataggcacctctggaagagccaactgtgtgagatggtgcagcccagtggtggcccggcagcagatcaggacgtactgggcgaagagtctcctctggggaagccagccatgctgcacctgccttcagaacagggcgctcctgagaccctccagcgctgcctggaggagaatcaagagctccgagatgccatccggcagagcaaccagattctgcgggagcgctgcgaggagcttctgcatttccaagccagccagagggaggagaaggagttcctcatgtgcaagttccaggaggccaggaaactggtggagagactcggcctggagaagctcgatctgaagaggcagaaggagcaggctctgcgggaggtggagcacctgaagagatgccagcagcagatggctgaggacaaggcctctgtgaaagcccaggtgacgtccttgctcggggagctgcaggagagccagagtcgcttggaggctgccactaaggaatgccaggctctggagggtcgggcccgggcggccagcgagcaggcgcggcagctggagagtgagcgcgaggcgctgcagcagcagcacagcgtgcaggtggaccagctgcgcatgcaggg

SEQ ID NO: 285478 - DNA, 960 bp, Artificial Sequence
  derived and/or modified sequence
acagactccagaaaggtactggtggcaggggactggtctgctgagtcacagcaaccccacgctccaggccgtttgttcctgctgctccctttgggattaactagagattgaaccggctcaccttgtttcagctcaggccctgcaaccgaccgaccgtctgctgggctccaagtcacctgagaggcgaggtgagcccttgccctgttggatgaataggcacctctggaagagccaactgtgtgagatggtgcagcccagtggtggcccggcagcagatcaggacgtactgggcgaagagtctcctctggggaagccagccatgctgcacctgccttcagaacagggcgctcctgagaccctccagcgctgcctggaggagaatcaagagctccgagatgccatccggcagagcaaccagattctgcgggagcgctgcgaggagcttctgcatttccaagccagccagagggaggagaaggagttcctcatgtgcaagttccaggaggccaggaaactggtggagagactcggcctggagaagctcgatctgaagaggcagaaggagcaggctctgcgggaggtggagcacctgaagagatgccagcagcagatggctgaggacaaggcctctgtgaaagcccaggtgacgtccttgctcggggagctgcaggagagccagagtcgcttggaggctgccactaaggaatgccaggctctggagggtcgggcccgggcggccagcgagcaggcgcggcagctggagagtgagcgcgaggcgctgcagcagcagcacagcgtgcaggtggaccagctgcgcatgcagggccagagcgtggaggccgcgctccgcatggagcgccaggccgcctcggaggagaagaggaagctggcccagttgcaggtggcctatcaccagctcttccaagaatacgacaaccacatcaagagcagcgtggtggg

SEQ ID NO: 285479 - protein, 418 aa, Artificial Sequence
  derived and/or modified sequence
MNRHLWKSQLCEMVQPSGGPAADQDVLGEESPLGKPAMLHLPSEQGAPETLQRCLEENQELRDAIRQSNQILRERCEELLHFQASQREEKEFLMCKFQEARKLVERLGLEKLDLKRQKEQALREVEHLKRCQQMAEDKASVKAQVTSLLGELQESQSRLEAATKECQALEGRARAASEQARQLESEREALQQQHSVQVDQLRMQGQSVEAALRMERQAASEEKRKLAQLQVAYHQLFQEYDNHIKSSVVGSERKRGMQLEDLKQQLQQAEEALVAKQEVIDKLKEEAEQHKIVMETVPVLKAQADIYKADFQAERQAREKLAEKKELLQEQLEQLQREYSKLKASCQESARIEDMRKRHVEVSQAPLPPAPAYLSSPLALPSQRRSPPEEPPDFCCPKCQYQAPDMDTLQIHVMECIE

SEQ ID NO: 285480 - DNA, 1257 bp, Artificial Sequence
  derived and/or modified sequence
atgaatcgtcacctgtggaagtcacagctctgtgagatggttcagccctctggcggacctgccgcggaccaggacgtactgggcgaggaaagtccgttagggaagccggccatgctacatctacccagcgagcagggtgcgccagaaactcttcagaggtgcctggaagaaaaccaggaactgcgcgatgcaataagacagagtaaccaaatcctccgcgaacggtgtgaagagcttcttcactttcaggcttcccagcgggaggagaaggaattccttatgtgtaagttccaagaagctagaaaactcgtcgagcgcttgggactggaaaaactggacctcaaacggcagaaggagcaggccctacgcgaagtggaacacctcaagagatgccagcaaatggccgaggacaaggcatccgtgaaggcccaggtaacaagtctgttgggcgaactgcaggagagtcagagccggcttgaggccgctacaaaagaatgccaggccctcgaggggagggccagggctgcctccgaacaagcacgccagctggaatccgagcgtgaagctcttcaacaacagcactcagtccaagtcgaccagctgcggatgcagggtcaatctgtagaagccgcccttaggatggaacgtcaagcagcatcggaggaaaagcggaagctggctcaactccaagtggcgtaccaccagctgttccaggagtatgacaatcacatcaagtcatccgtggtgggctctgaacggaagcgaggcatgcagctggaggatctgaaacaacagctgcaacaggccgaggaagccctggtggctaagcaggaagttatagataaactaaaagaggaggctgagcagcacaagattgtgatggagacagttcctgtcctaaaagcccaagctgacatttacaaggccgactttcaggccgagagacaggcacgagaaaagttagcggagaagaaggaactgctgcaagaacaactggaacagctgcagagagagtactctaagctgaaggcttcttgtcaggagtccgccagaatagaagatatgcgaaaacgccacgtggaggtgtcacaggcccctctaccccccgcgcccgcctatctgagctctcctttggccctgccaagccaacgtagaagccctccagaagagcccccagatttttgctgtcccaagtgccagtaccaggcccccgacatggacaccctgcagattcatgtaatggagtgcatagagtag

SEQ ID NO: 285481 - DNA, 1257 bp, Artificial Sequence
  derived and/or modified sequence
atgaacagacacctgtggaagagccagctgtgtgagatggtgcagcccagcggcggccctgctgctgaccaggatgtgctgggggaggagagccccctgggcaagccagccatgctgcacctgcccagcgagcagggcgcccctgagaccctgcagcgctgcctggaggagaaccaggagctgagagatgccatccggcagagcaaccagatcctgcgggagcgctgtgaggagctgctgcacttccaggccagccagcgggaggagaaggagttcctgatgtgcaagttccaggaggccaggaagctggtggagcggctgggcctggagaagctggacctgaagaggcagaaggagcaggccctgcgggaggtggagcacctgaagcgctgccagcagatggccgaggacaaggcctctgtgaaggcccaggtgaccagcctgctgggggagctgcaggagagccagagccggctggaggccgccaccaaggagtgccaggccctggagggccgggcccgggccgccagcgagcaggcccggcagctggagagcgagcgggaggccctgcagcagcagcacagcgtgcaggtggaccagctgaggatgcagggccagagcgtggaggccgccctgaggatggagcggcaggccgccagcgaggagaagaggaagctggcccagctgcaggtggcctaccaccagctgttccaggagtatgacaaccacatcaagagctctgtggtgggcagcgagaggaagaggggcatgcagctggaggacctgaagcagcagctgcagcaggccgaggaggccctggtggccaagcaggaggtgattgacaagctgaaggaggaggccgagcagcacaagatcgtgatggagaccgtgcctgtgctgaaggcccaggccgacatctacaaggctgacttccaggccgagcggcaggcccgggagaagctggccgagaagaaggagctgctgcaggagcagctggagcagctgcagcgggagtacagcaagctgaaggccagctgccaggagagcgccagaattgaggacatgaggaagagacatgtggaggtgtcccaggcccccctgcccccagccccagcctacctgagcagccccctggccctgcccagccagaggaggagccccccagaggagcccccagacttctgctgccccaagtgccagtaccaggccccagacatggacaccctgcagatccacgtgatggagtgcattgaatag

SEQ ID NO: 285482 - DNA, 1257 bp, Artificial Sequence
  derived and/or modified sequence
atgaaccggcacctgtggaagagccagctgtgcgagatggtgcagcctagcgggggacctgccgctgatcaggatgtgctgggtgaggagtcacctctaggcaagccagccatgctgcacttaccctcagagcagggtgccccggagacacttcagcggtgcctcgaagagaatcaggaactcagagacgccataagacagtctaaccagatccttagagaaagatgtgaggaattactgcacttccaggccagtcaaagagaggagaaagagttcctgatgtgtaaatttcaggaagcccgtaaattagttgagaggctgggcctcgaaaagcttgatctgaaacgtcagaaagagcaggccctgcgggaagtggaacacttaaagcgttgtcaacaaatggccgaggacaaagcctccgtaaaagctcaggtgactagcttgctgggtgaactccaggagagtcagagccggctggaagctgccactaaagaatgccaggctctggagggaagggcccgggccgcgagtgagcaggccaggcaactagagagcgagagggaggctctgcaacagcaacattctgttcaggtggaccagctacggatgcagggacaatcggtggaggctgcattgaggatggagcgccaggccgcttctgaagaaaaacggaaactcgcacagctccaggtggcctatcaccagttgtttcaggagtatgataaccacatcaagtccagcgtagtggggtcggagagaaaacgagggatgcagttggaagatctgaaacagcagctgcagcaggccgaagaagccctggtggctaaacaggaagtgatcgacaaattgaaggaggaggccgagcagcacaaaatcgttatggaaacagtgccagtgctgaaggcccaggcggatatttacaaggctgattttcaagctgaaaggcaggcgcgtgagaagcttgccgaaaaaaaagagctgctgcaggaacagctcgagcagctccagagagagtactcgaagttaaaagcctcatgccaggagtcggcacggattgaagatatgcgaaagcgccacgtggaggtgtcccaggcccccctacctcctgccccggcctatctctcaagcccgctggcgctgccttcccagagacgcagccccccggaagagcccccagatttttgctgccctaaatgccaatatcaggccccagacatggataccctgcaaattcacgttatggagtgcatcgagtag

SEQ ID NO: 285483 - DNA, 1257 bp, Artificial Sequence
  derived and/or modified sequence
atgaaccgacatttgtggaaaagccaactgtgtgagatggtacagccgagcggcggtccggctgccgatcaggacgtgttgggggaggagtctcctctcggaaaacccgctatgttgcacctgccatccgaacagggagcccctgagaccctgcaaagatgcctcgaagaaaatcaggaactacgagacgccatccggcagtcgaatcaaattctgcgggaacggtgcgaggagctgttgcacttccaggcctctcagagagaggaaaaggagttcttgatgtgcaaattccaggaggctaggaagctcgtggagagactcggactggagaagctcgacctgaagcgccagaaagagcaggctctgcgcgaagtggagcatttgaagaggtgtcaacagatggccgaggacaaggcatccgtgaaagctcaggtgactagcctgttgggggagcttcaggagtctcagagtcgactcgaggccgcaaccaaagaatgtcaggctttggagggcagggctagggctgcatcggagcaggcccgtcagctggaatcagagcgggaggccctgcagcagcagcattccgtccaagtggatcagctgagaatgcaaggccagtccgtcgaagctgccctccggatggagcgccaggccgcatctgaagaaaagagaaagcttgcccagctccaggtcgcgtatcaccagctgttccaggagtacgacaatcacatcaagagcagtgtcgttggctccgagaggaagcgtggaatgcagctcgaggatcttaagcaacaactccagcaggctgaagaggccttggtggccaagcaggaggtcatagacaagctgaaagaggaagccgagcagcacaagatagttatggagacggtcccagtgctcaaggcacaggctgatatttacaaggccgacttccaggcagaacgtcaggccagggaaaagctcgcagagaagaaggaacttttacaagagcagttggaacaattgcagcgagagtactccaagctaaaagcatcttgtcaggaaagcgcacgcattgaagatatgcgcaagaggcatgtggaggttagccaagctccacttccgcctgcccctgcgtaccttagttctccacttgcgttgccctctcagcgccgatccccaccagaggaacctcccgacttctgttgcccaaaatgtcaataccaggctccagacatggacactcttcagattcacgtgatggagtgtattgaatag

SEQ ID NO: 285484 - DNA, 1257 bp, Artificial Sequence
  derived and/or modified sequence
atgaacagacacctgtggaagagccagctgtgcgagatggtgcagcccagcggcggccccgccgccgaccaggacgtgctgggcgaggagagccccctgggcaagcccgccatgctgcacctgcccagcgagcagggcgcccccgagaccctgcagagatgcctggaggagaaccaggagctgagagacgccatcagacagagcaaccagatcctgagagagagatgcgaggagctgctgcacttccaggccagccagagagaggagaaggagttcctgatgtgcaagttccaggaggccagaaagctggtggagagactgggcctggagaagctggacctgaagagacagaaggagcaggccctgagagaggtggagcacctgaagagatgccagcagatggccgaggacaaggccagcgtgaaggcccaggtgaccagcctgctgggcgagctgcaggagagccagagcagactggaggccgccaccaaggagtgccaggccctggagggcagagccagagccgccagcgagcaggccagacagctggagagcgagagagaggccctgcagcagcagcacagcgtgcaggtggaccagctgagaatgcagggccagagcgtggaggccgccctgagaatggagagacaggccgccagcgaggagaagagaaagctggcccagctgcaggtggcctaccaccagctgttccaggagtacgacaaccacatcaagagcagcgtggtgggcagcgagagaaagagaggcatgcagctggaggacctgaagcagcagctgcagcaggccgaggaggccctggtggccaagcaggaggtgatcgacaagctgaaggaggaggccgagcagcacaagatcgtgatggagaccgtgcccgtgctgaaggcccaggccgacatctacaaggccgacttccaggccgagagacaggccagagagaagctggccgagaagaaggagctgctgcaggagcagctggagcagctgcagagagagtacagcaagctgaaggccagctgccaggagagcgccagaatcgaggacatgagaaagagacacgtggaggtgagccaggcccccctgccccccgcccccgcctacctgagcagccccctggccctgcccagccagagaagaagcccccccgaggagccccccgacttctgctgccccaagtgccagtaccaggcccccgacatggacaccctgcagatccacgtgatggagtgcatcgagtag

SEQ ID NO: 285485 - protein, 359 aa, Artificial Sequence
  derived and/or modified sequence
MQVPNSTGPDNATLQMLRNPAIAVALPVVYSLVAAVSIPGNLFSLWVLCRRMGPRSPSVIFMINLSVTDLMLASVLPFQIYYHCNRHHWVFGVLLCNVVTVAFYANMYSSILTMTCISVERFLGVLYPLSSKRWRRRRYAVAACAGTWLLLLTALSPLARTDLTYPVHALGIITCFDVLKWTMLPSVAMWAVFLFTIFILLFLIPFVITVACYTATILKLLRTEEAHGREQRRRAVGLAAVVLLAFVTCFAPNNFVLLAHIVSRLFYGKSYYHVYKLTLCLSCLNNCLDPFVYYFASREFQLRLREYLGCRRVPRDTLDTRRESLFSARTTSVRSEAGAHPEGMEGATRPGLQRQESVF

SEQ ID NO: 285486 - DNA, 1080 bp, Artificial Sequence
  derived and/or modified sequence
atgcaggtgccaaacagtaccggcccagacaacgctaccctgcagatgctgcggaaccccgcgattgcagttgccttgcctgtggtctatagtctcgttgccgccgtgagcattcccgggaaccttttctctctctgggttctgtgtcgccggatgggtcctcgctctcctagcgtgatctttatgatcaatctgtccgtgaccgacctaatgctggcatccgtgctgccctttcagatttattaccactgcaatagacatcactgggtgtttggagtgctactgtgcaatgttgtgacagtagctttctatgcaaatatgtactcctctattcttactatgacctgtatatctgtggaaaggttcctaggtgtcctttacccgctgtctagtaagaggtggaggaggcgacggtacgcggtcgcagcatgcgccggtacctggttgcttctacttacggcactttctccccttgcgcgcacagaccttacctatcctgtgcatgcactgggaattatcacttgtttcgacgtgctgaagtggacgatgctaccttccgtggccatgtgggctgtgttcctgttcactatctttattctgctgttcctgatcccattcgtgataacagtggcctgctacacagctaccatcctgaaactcctcaggaccgaggaagcacacggaagagaacagcggcgtagagctgtcggtttggccgcagtggttcttctggcattcgtgacgtgctttgctcccaataatttcgtgctgctggctcatatcgtctcacgcttgttctacggtaaatcttactaccatgtgtacaagctcacactgtgcctgagctgcctcaataattgtcttgacccattcgtgtactattttgcatcacgggaattccagctccgtcttcgagagtacttgggctgtcgacgcgtaccacgagacaccctggatacgcgccgagagtctctcttctccgctcgtacaacaagtgtcagaagtgaggccggggctcatcctgagggaatggagggcgcaactcgtcctggcctgcaacggcaagagagcgtgttctag

SEQ ID NO: 285487 - DNA, 1080 bp, Artificial Sequence
  derived and/or modified sequence
atgcaggtgcccaacagcactggaccagacaatgccaccctgcagatgctgaggaacccagccatcgctgtggccctgcctgtggtgtacagcctggtggccgctgtgtccatccctggcaacctcttcagcctgtgggtgctgtgcaggaggatgggccccaggagccccagcgtcatcttcatgatcaacctgtctgtgacagacctgatgctggcctctgtgctgcccttccagatctactaccactgcaacagacaccactgggtgtttggagtgctgctgtgcaatgtggtgacagtggccttctacgccaacatgtacagcagcatcctgaccatgacctgcatctctgtggagcgcttcctgggcgtgctgtaccccctgagcagcaagcgctggaggagaagaagatatgctgtggccgcctgtgccggcacctggctgctgctgctgacagccctgagccccctggccaggacagacctgacctaccctgtgcacgccctgggcatcatcacctgctttgatgtgctgaagtggaccatgctgcccagcgtggccatgtgggccgtgttcctgttcaccatcttcatcctgctcttcctgatccccttcgtcatcaccgtggcctgctacacagccaccatcctgaagctgctgaggacagaggaggcccacggccgggagcagaggagaagagctgtgggcctggccgctgtggtgctgctggcctttgtgacctgctttgcccccaacaactttgtgctgctggcccacatcgtgagccgcctcttctacggcaagagctactaccacgtgtacaagctgaccctgtgcctgagctgcctgaacaactgcctggacccctttgtgtactactttgccagccgggagttccagctgcggctgcgggagtacctgggctgcagaagagtgccccgggacaccctggacacccggcgggagagcctcttcagcgcccggaccacctctgtgcgctctgaggccggggcccaccctgagggcatggagggcgccacccggcccggcctgcagaggcaggagagcgtcttctag

SEQ ID NO: 285488 - DNA, 1080 bp, Artificial Sequence
  derived and/or modified sequence
atgcaggtgcccaacagcaccggccccgacaacgccaccctgcagatgctgcggaatcctgccattgctgtcgctctgcccgtggtgtacagccttgtggccgctgtatctattccgggtaacctgttttctctctgggtgttgtgtcggcgtatgggcccccggtctccctcagttatttttatgattaacctgtcagtgactgacctgatgctcgcctctgttctccctttccagatctattaccattgtaatagacaccattgggtgttcggcgttttgctctgtaatgtggtcactgtggctttttatgcaaatatgtattctagtatacttacaatgacctgcatctctgtggaacggtttctaggtgtcctgtaccccctcagtagtaaacgctggcgaaggcgcagatatgccgtggccgcttgcgcgggaacatggcttcttctgctcaccgccctgtccccactggcgagaaccgacctgacatatcccgtgcacgcattaggaatcattacctgcttcgacgtcctcaagtggaccatgcttccttctgtggcgatgtgggcggtgtttctgttcacaattttcattctcctctttctcatcccatttgtcattaccgtggcttgttataccgctactatattgaaactgctcaggaccgaggaagcccatggtcgcgaacagcgcaggcgggcagtggggctggccgcagttgtcctactggcgtttgttacttgcttcgcacccaacaatttcgtgcttttagcccacatcgtgagccgattattttacggaaaatcatactaccatgtgtataagctaaccttgtgcctgtcgtgtcttaataattgcctggatccattcgtctactatttcgcctctagagagttccagctcagattgcgcgaatatttggggtgccgaagagtcccacgtgacactctcgacactcggagagaatcattgttttctgcaaggacgaccagtgtgagatctgaggccggagcccaccctgaggggatggaaggcgccacccgccccggactgcagcggcaggagtcggtattctag

SEQ ID NO: 285489 - DNA, 1080 bp, Artificial Sequence
  derived and/or modified sequence
atgcaggtcccaaactctactgggccagacaacgccacactgcagatgttgcggaatccagccattgctgttgcccttcctgtagtatacagtttagtagccgcagtgagcattccgggaaatctgttttccctgtgggtgctctgtaggagaatgggtcctaggtcccccagcgttatcttcatgattaatctgtccgtcactgatctgatgctggcctccgttctgcccttccaaatttattaccactgcaaccggcatcactgggtgttcggtgtcttactatgcaatgtcgtaaccgtggccttttatgcaaatatgtacagctctattctcaccatgacatgtattagcgttgagcgatttttgggtgtgctgtacccactgtcctctaagcggtggcgcaggcggagatacgctgtggccgcttgcgcgggaacctggctgctgttgcttaccgcgctctctcctctcgcgcgtacagacctgacctatcctgtacatgccctgggcataattacatgcttcgacgttctcaagtggacgatgctgcccagtgttgcaatgtgggcggtgtttctctttaccatttttatcctgctcttcctcataccattcgtgattactgtggcttgctacacagccacgatcctgaaactgctcagaaccgaagaggctcacggaagggaacagagacggagggcagtaggtctggccgctgtggtactgctggcttttgtgacgtgctttgcaccaaataattttgtgctcctggctcacatcgtgtccaggctattttatggaaaatcctactatcatgtgtacaaactgactttatgtctgtcttgcctgaacaactgcctcgatcccttcgtgtactacttcgcatctcgagagtttcagctcaggttacgggagtatttgggatgcaggagagtcccccgtgacacccttgatacacggagggagtctttattctctgctcgtacaacatccgtgcgatccgaggcaggtgcccacccagagggcatggagggagcaaccaggcccggtctacaacgtcaagagtctgtattttag

SEQ ID NO: 285490 - DNA, 1080 bp, Artificial Sequence
  derived and/or modified sequence
atgcaggtgcccaacagcaccggccccgacaacgccaccctgcagatgctgagaaaccccgccatcgccgtggccctgcccgtggtgtacagcctggtggccgccgtgagcatccccggcaacctgttcagcctgtgggtgctgtgcagaagaatgggccccagaagccccagcgtgatcttcatgatcaacctgagcgtgaccgacctgatgctggccagcgtgctgcccttccagatctactaccactgcaacagacaccactgggtgttcggcgtgctgctgtgcaacgtggtgaccgtggccttctacgccaacatgtacagcagcatcctgaccatgacctgcatcagcgtggagagattcctgggcgtgctgtaccccctgagcagcaagagatggagaagaagaagatacgccgtggccgcctgcgccggcacctggctgctgctgctgaccgccctgagccccctggccagaaccgacctgacctaccccgtgcacgccctgggcatcatcacctgcttcgacgtgctgaagtggaccatgctgcccagcgtggccatgtgggccgtgttcctgttcaccatcttcatcctgctgttcctgatccccttcgtgatcaccgtggcctgctacaccgccaccatcctgaagctgctgagaaccgaggaggcccacggcagagagcagagaagaagagccgtgggcctggccgccgtggtgctgctggccttcgtgacctgcttcgcccccaacaacttcgtgctgctggcccacatcgtgagcagactgttctacggcaagagctactaccacgtgtacaagctgaccctgtgcctgagctgcctgaacaactgcctggaccccttcgtgtactacttcgccagcagagagttccagctgagactgagagagtacctgggctgcagaagagtgcccagagacaccctggacaccagaagagagagcctgttcagcgccagaaccaccagcgtgagaagcgaggccggcgcccaccccgagggcatggagggcgccaccagacccggcctgcagagacaggagagcgtgttctag

SEQ ID NO: 285491 - protein, 98 aa, Artificial Sequence
  derived and/or modified sequence
MSVRLHVPSGSRGSELSALIQAIGASTSGKPKCFVCILRSGLSVALSLSVYFLLLFSRTRGGGHGEPPECQRRASCSAYSFREIEDCRQKQPRRWQQG

SEQ ID NO: 285492 - protein, 177 aa, Artificial Sequence
  derived and/or modified sequence
MARGAALALLLFGLLGVLVAAPDGGFDLSDALPDNENKKPTAIPKKPSAGDDFDLGDAVVDGENDDPRPPNPPKPMPNPNPNHPSSSGSFSDADLADGVSGGEGKGGSDGGGSHRKEGEEADAPGVIPGIVGAVVVAVAGAISSFIAYQKKKLCFKENGQLAGSLGPCIGIRREADG

SEQ ID NO: 285493 - DNA, 534 bp, Artificial Sequence
  derived and/or modified sequence
atggcacgcggcgccgcacttgctctcctgctgtttgggctcctaggtgttctggttgccgcccccgacggcggctttgacctgtccgatgccttgcccgataatgaaaacaagaagcccacagctatccctaaaaagccgagtgccggggacgattttgatctcggtgatgcggtagtggacggcgaaaatgatgacccacgtccacccaacccacccaagcccatgcctaacccgaacccgaaccatccatcctcgagtgggtctttctctgacgccgatctggccgatggagtgagcgggggggagggcaagggtggcagcgatggcggtgggagccaccggaaagagggcgaggaggcagacgctccgggtgtgattccaggaattgtcggggcagtcgtcgtggctgtggccggggccatcagctctttcatcgcctatcaaaaaaagaaactttgtttcaaggagaacggacaactcgccggaagcctgggaccctgtattggtataaggcgcgaggccgacggatag

SEQ ID NO: 285494 - DNA, 534 bp, Artificial Sequence
  derived and/or modified sequence
atggcccggggagctgccctggccctgctgctgtttggcctgctgggcgtgctggtggccgccccagatggcggctttgacctgagtgatgccctgcctgacaatgaaaacaagaagcccacagccatccccaagaagcccagcgctggagatgactttgacctgggagatgctgtggtggatggagaaaatgatgaccccaggcctcccaacccccccaagcccatgcccaaccccaaccccaaccaccccagcagcagcggcagcttcagtgatgctgacctggctgatggagtgtctggaggagagggcaaaggaggcagtgatggcggcggcagccacaggaaggagggggaggaggctgatgcccctggggtcatccctggcatcgtgggcgctgtggtggtggccgtggccggggccatcagcagcttcatcgcctaccagaagaagaagctgtgcttcaaggaaaatggccagctggccggcagcctgggcccctgcatcggcatccggcgggaggctgatggatag

SEQ ID NO: 285495 - DNA, 534 bp, Artificial Sequence
  derived and/or modified sequence
atggcccggggcgccgccctggccctgctgctgttcggcctgctgggcgttctggtagccgcccccgatggcggctttgacctatccgacgcactgcccgacaatgagaataaaaagccgaccgcaatcccaaagaagccatccgccggagacgatttcgacttgggagatgcggtagtcgatggagagaacgacgaccctaggccaccgaacccgcctaagccgatgccgaatcctaacccgaatcacccatcttcctccggctcttttagtgatgccgatctggccgatggggtatccggaggcgaggggaaaggagggtcagacggtggaggctcccacaggaaagagggggaggaggccgacgccccaggtgtgattcccgggattgtgggtgccgtggtggtagccgtggcgggtgctatctctagtttcattgcatatcagaaaaagaagctgtgctttaaggagaacggccaactggccggttccctcgggccctgtatcggaattcggcgcgaggccgacggctag

SEQ ID NO: 285496 - DNA, 534 bp, Artificial Sequence
  derived and/or modified sequence
atggctaggggcgctgcactggcactgctgcttttcggcttgctgggcgttctggtggccgctccagacggaggcttcgatctctccgatgcactgcctgataatgagaataagaaaccaaccgccatccccaagaagccctcagccggagatgacttcgacctcggggacgctgtagtggacggggagaacgatgaccccagacctccaaacccccctaaaccaatgcctaaccccaaccctaaccacccgtcatcatcgggaagtttttcggacgccgatcttgccgatggggttagtgggggtgagggcaagggcggatctgacgggggagggagtcaccggaaggagggcgaggaggccgacgctccaggcgtgattccaggcatcgtgggcgcagtcgttgtggcggttgctggggctattagtagctttatcgcctatcaaaaaaaaaagctgtgcttcaaagagaacggccagcttgcaggttcccttggtccatgcattggcatcagaagagaagctgacggctag

SEQ ID NO: 285497 - DNA, 918 bp, Artificial Sequence
  derived and/or modified sequence
ggcccgtgggggagtatctgtcctgccgccttcgcccacgccctgcactccgggaccgtccctgcgcgctctgggcgcaccatggcccgcggggctgcgctggcgctgctgctcttcggcctgctgggtgttctggtcgccgccccggatggtggtttcgatttatccgatgcccttcctgacaatgaaaacaagaaacccactgcaatccccaagaaacccagtgctggggatgactttgacttaggagatgctgttgttgatggagaaaatgacgacccacgaccaccgaacccacccaaaccgatgccaaatccaaaccccaaccaccctagttcctccggtagcttttcagatgctgaccttgcggatggcgtttcaggtggagaaggaaaaggaggcagtgatggtggaggcagccacaggaaagaaggggaagaggccgacgccccaggcgtgatccccgggattgtgggggctgtcgtggtcgccgtggctggagccatctctagcttcattgcttaccagaaaaagaagctatgcttcaaagaaaatggtcagctggcaggctctttgggaccttgtattgggatccgccgtgaagctgatggctgaagacctaggggtgagcagagaacccagcccaggcctgcggagcgtcctgaccgtaatcgttttatctgctaagacatagccttaaagcaaacccttccatctgccgctcccctcgccctgctggcaaattcccaccacgatgggattctcaatcacatggcggattctctgccttcagttccatatgcttttgcctttctggatgcacagaagctcattatagcaaatcatatttctgcataagagcttcagaaaatgaagagaaatgcagatattttcttttaaacatgaatctaacagaaa

SEQ ID NO: 285498 - DNA, 534 bp, Artificial Sequence
  derived and/or modified sequence
atggccagaggcgccgccctggccctgctgctgttcggcctgctgggcgtgctggtggccgcccccgacggcggcttcgacctgagcgacgccctgcccgacaacgagaacaagaagcccaccgccatccccaagaagcccagcgccggcgacgacttcgacctgggcgacgccgtggtggacggcgagaacgacgaccccagaccccccaacccccccaagcccatgcccaaccccaaccccaaccaccccagcagcagcggcagcttcagcgacgccgacctggccgacggcgtgagcggcggcgagggcaagggcggcagcgacggcggcggcagccacagaaaggagggcgaggaggccgacgcccccggcgtgatccccggcatcgtgggcgccgtggtggtggccgtggccggcgccatcagcagcttcatcgcctaccagaagaagaagctgtgcttcaaggagaacggccagctggccggcagcctgggcccctgcatcggcatcagaagagaggccgacggctag

SEQ ID NO: 285499 - DNA, 297 bp, Artificial Sequence
  derived and/or modified sequence
atgtccgtcaggttgcatgtcccctccggcagccgagggtctgaactgagtgctctgattcaggctattggagcgagcacctctggaaaaccgaaatgttttgtctgcatcctaaggtccgggctgtctgttgcgctgtccctgtcagtgtacttccttctgctctttagtcggacccgcgggggcgggcatggggaaccccccgaatgccagagacgggcatcctgcagtgcatatagttttcgcgagattgaagattgcaggcagaaacaaccaaggaggtggcagcagggttag

SEQ ID NO: 285500 - DNA, 297 bp, Artificial Sequence
  derived and/or modified sequence
atgtctgtgcggctgcacgtgcccagcggcagccggggcagcgagctgagcgccctgatccaggccatcggggccagcaccagcggcaagcccaagtgctttgtgtgcatcctgcggagcggcctgtctgtggccctgagcctgtctgtgtacttcctgctgctcttcagcaggacccggggcggcggccacggggagcccccagagtgccagaggcgggccagctgcagcgcctacagcttccgggagattgaggactgccggcagaagcagccccggcgctggcagcagggctag

SEQ ID NO: 285501 - DNA, 297 bp, Artificial Sequence
  derived and/or modified sequence
atgagcgtgcggctgcacgtgcccagcggcagccggggcagcgagctttccgctttaatccaggcaatcggagcctccaccagtgggaagcccaaatgttttgtgtgtatacttagatccgggctgtccgttgccctctcactgtccgtctattttctcctgctcttttcacggacccgcggaggcggacacggcgaaccgcccgaatgtcagagaagggcctcttgttcagcctacagcttcagagagattgaggattgtaggcagaagcagcctcggcgatggcaacaaggttag

SEQ ID NO: 285502 - DNA, 297 bp, Artificial Sequence
  derived and/or modified sequence
atgagcgtgagacttcacgttccatcgggtagtcgcggatcagaattatccgcgttgatacaggccatcggagcatccacctctgggaaacccaaatgcttcgtctgcatcctaagaagcggtctgagcgtggcgctgtctctgagcgtgtactttctactgctatttagcagaactcgcggaggtggacatggagaaccaccggagtgtcagcgcagagcatcttgctccgcgtattcattcagggagattgaagattgcaggcagaagcagcctcgtagatggcagcaaggatag

SEQ ID NO: 285503 - DNA, 756 bp, Artificial Sequence
  derived and/or modified sequence
accagaaaaagaagctatgcttcaaagaaaatgaaagagcttccatgtgcgtgttcctcagtgtttagggagaagaaagcaacccttaaaatagaggaaaatgaagctgcttggattaccctgttgaagttcatctctgcctgtgccatgcatgaaaaaatactggcaaagtcttcacttacatgagtgttagactccatgttcccagtgggtctcggggttcagaactgagtgctctcatccaagcaataggagcgtcgacctcaggaaagcccaagtgttttgtgtgtattttgaggagtgggttatctgttgcactgagcctctctgtgtattttcttcttcttttcagcagaacaaggggaggtggacatggagagccaccggaatgccaacgcagagccagctgttcagcgtactcttttagagaaatagaagattgtcggcagaaacagcccaggcgttggcagcagggttagaacagctgcctgaggctcctccctgaaggacacctgcctgagagcagagatggaggccttctgttcacggcggattctttgttttaatcttgcgatgtgctttgcttgttgctgggcggatgatgtttactaacgatgaattttacatccaaagggggataggcacttggacccccattctccaaggcccgggggggcggtttcccatgggatgtgaaaggctggccattattaagtccctgtaactcaaatgtcaaccccaccgaggcaccccccc

SEQ ID NO: 285504 - DNA, 297 bp, Artificial Sequence
  derived and/or modified sequence
atgagcgtgagactgcacgtgcccagcggcagcagaggcagcgagctgagcgccctgatccaggccatcggcgccagcaccagcggcaagcccaagtgcttcgtgtgcatcctgagaagcggcctgagcgtggccctgagcctgagcgtgtacttcctgctgctgttcagcagaaccagaggcggcggccacggcgagccccccgagtgccagagaagagccagctgcagcgcctacagcttcagagagatcgaggactgcagacagaagcagcccagaagatggcagcagggctag

SEQ ID NO: 285505 - DNA, 606 bp, Artificial Sequence
  derived and/or modified sequence
cgcaggtggggcagaccagcaggcaccccaggtgcctctagcttgccagggcggacaagatgcgcgcatggaggtcccggaccggaggaggccccgacgttctccccaacattgtttcttgaaccttttcaacgggaaaagagcgcattcgtggtgggcgttgccaattcatacatgtggggcgggctcggtagagatggcggctttgatctgagcgacgcattgcctgacaacgagaataaaaagcctacagctattccaaagaagcccagcgcaggagatgactttgatctaggagatgcagtggtggacggagaaaacgatgacccgcgcccaccaaatccgccaaaacctatgcccaaccctaaccccaatcatccctcttcatccggaagctttagtgacgccgacttagcagacggtgtgtcaggaggagagggaaagggcggtagcgacgggggagggtcacatcgcaaggaaggcgaggaagccgatgcaccgggggtgattcccgggatcgtcggtgcagtcgtcgtcgccgtggcaggcgcaatctccagcttcatagcataccagaaaaagaagttgtgctttaaggaaaattag

SEQ ID NO: 285506 - DNA, 606 bp, Artificial Sequence
  derived and/or modified sequence
agacgctggggccggcctgctggcacccctggggccagcagcctgcccggccgcacccgctgtgcccatggaggccctggccctgaggaggcccccaccttcagccccaccctcttcctggagcccttccagcgggagaagagcgcctttgtggtgggcgtggccaacagctacatgtggggcggcctgggcagagatggcggctttgacctgagtgatgccctgcctgacaatgaaaacaagaagcccacagccatccccaagaagcccagcgctggagatgactttgacctgggagatgctgtggtggatggagaaaatgatgacccccggccccccaacccccccaagcccatgcccaaccccaaccccaaccaccccagcagcagcggcagcttcagtgatgctgacctggctgatggagtgtctggaggagagggcaagggcggcagtgatggcggcggcagccacaggaaggagggggaggaggctgatgcccctggggtcatccctggcatcgtgggcgctgtggtggtggccgtggccggggccatcagcagcttcatcgcctaccagaagaagaagctgtgcttcaaggagaactag

SEQ ID NO: 285507 - DNA, 606 bp, Artificial Sequence
  derived and/or modified sequence
cggcggtggggccggcccgccggcacccccggcgccagcagcctgcctggccggaccaggtgtgcccacggaggaccgggtcctgaggaagctccaactttcagccccactctcttccttgaaccctttcagcgggaaaagtctgcctttgtagtgggcgtcgcaaactcctacatgtggggtggactcggtcgagacggcgggttcgatttatccgatgctctgcctgataacgaaaacaagaagcctacggcaattcccaagaaaccgtctgccggcgacgacttcgatctgggtgacgctgtggtggatggcgagaatgacgacccgcgcccccctaatcccccgaagccaatgcctaatcctaaccctaatcatccctctagcagcggctctttttctgatgccgatcttgcagacggcgtctcagggggagaggggaaaggcggatcagacggtggtggcagtcacagaaaggagggcgaagaagccgatgcaccgggcgtaattcctggtatcgtgggggcagtggtggttgctgtcgctggcgctattagttcgtttatcgcctatcagaagaagaagttatgcttcaaagaaaactag

SEQ ID NO: 285508 - DNA, 606 bp, Artificial Sequence
  derived and/or modified sequence
agacgctggggacggcctgccggaactcccggagcttcatccctgcccggtcggacgcgatgcgcacacggtggcccaggtccagaggaggcacctactttcagccccacactgtttcttgagccatttcagagggagaagagcgcatttgttgttggggtggccaatagctacatgtggggcggactaggtagagacggcggatttgacctttccgatgcgctccctgacaatgagaacaaaaagcccactgccatacctaagaagccatcagcgggagacgatttcgaccttggagatgccgtcgtcgacggtgaaaacgacgaccctaggccccctaacccgcctaaaccaatgcctaacccgaatcccaaccacccaagcagcagcggctcctttagcgacgcagaccttgcagacggtgtgagtgggggtgaaggaaaaggagggagcgacgggggtgggtcccatcgaaaggagggggaggaggccgacgcccctggcgtgattccagggatcgtcggcgctgttgtcgtcgccgttgctggcgcaatctctagctttatcgcataccagaaaaaaaaattatgcttcaaagagaactag

SEQ ID NO: 285509 - DNA, 604 bp, Artificial Sequence
  derived and/or modified sequence
cggcgttgggggcgccccgcggggacacccggagcctcctccctgcccggcaggacgcgctgtgcccacgggggcccaggcccggaggaggcgcccactttctccccaacgcttttcctggagccgttccagagagaaaagtcagcgtttgttgtcggagttgcaaactcttacatgtggggcggccttgggagagatggtggtttcgatttatccgatgcccttcctgacaatgaaaacaagaaacccactgcaatccccaagaaacccagtgctggggatgactttgacttaggagatgctgttgttgatggagaaaatgacgacccacgaccaccgaacccacccaaaccgatgccaaatccaaaccccaaccaccctagttcctccggtagcttttcagatgctgaccttgcggatggcgtttcaggtggagaaggaaaaggaggcagtgatggtggaggcagccacaggaaagaaggggaagaggccgacgccccaggcgtgatccccgggattgtgggggctgtcgtggtcgccgtggctggagccatctctagcttcattgcttaccagaaaaagaagctatgcttcaaagaaaatg

SEQ ID NO: 285510 - DNA, 606 bp, Artificial Sequence
  derived and/or modified sequence
agaagatggggcagacccgccggcacccccggcgccagcagcctgcccggcagaaccagatgcgcccacggcggccccggccccgaggaggcccccaccttcagccccaccctgttcctggagcccttccagagagagaagagcgccttcgtggtgggcgtggccaacagctacatgtggggcggcctgggcagagacggcggcttcgacctgagcgacgccctgcccgacaacgagaacaagaagcccaccgccatccccaagaagcccagcgccggcgacgacttcgacctgggcgacgccgtggtggacggcgagaacgacgaccccagaccccccaacccccccaagcccatgcccaaccccaaccccaaccaccccagcagcagcggcagcttcagcgacgccgacctggccgacggcgtgagcggcggcgagggcaagggcggcagcgacggcggcggcagccacagaaaggagggcgaggaggccgacgcccccggcgtgatccccggcatcgtgggcgccgtggtggtggccgtggccggcgccatcagcagcttcatcgcctaccagaagaagaagctgtgcttcaaggagaactag

SEQ ID NO: 285511 - protein, 1267 aa, Artificial Sequence
  derived and/or modified sequence
MRGLPRGRGLMRARGRGRAAPPGSRGRGRGGPHRGRGRPRSLLSLPRAQASWTPQLSTGLTSPPVPCLPSQGEAPAEMGALLLEKETRGATERVHGSLGDTPRSEETLPKANPDSLEPAGPSSPASVTVTVGDEGADTPVGATPLIGDESENLEGDGDLRGGRILLGHATKSFPSSPSKGGSCPSRAKMSMTGAGKSPPSVQSLAMRLLSMPGAQGAAAAGSEPPPATTSPEGQPKVHRARKTMSKPGNGQPPVPEKRPPEIQHFRMSDDVHSLGKVTSDLAKRRKLNSGGGLSEELGSARRSGEVTLTKGDPGSLEEWETVVGDDFSLYYDSYSVDERVDSDSKSEVEALTEQLSEEEEEEEEEEEEEEEEEEEEEEEEDEESGNQSDRSGSSGRRKAKKKWRKDSPWVKPSRKRRKREPPRAKEPRGVNGVGSSGPSEYMEVPLGSLELPSEGTLSPNHAGVSNDTSSLETERGFEELPLCSCRMEAPKIDRISERAGHKCMATESVDGELSGCNAAILKRETMRPSSRVALMVLCETHRARMVKHHCCPGCGYFCTAGTFLECHPDFRVAHRFHKACVSQLNGMVFCPHCGEDASEAQEVTIPRGDGVTPPAGTAAPAPPPLSQDVPGRADTSQPSARMRGHGEPRRPPCDPLADTIDSSGPSLTLPNGGCLSAVGLPLGPGREALEKALVIQESERRKKLRFHPRQLYLSVKQGELQKVILMLLDNLDPNFQSDQQSKRTPLHAAAQKGSVEICHVLLQAGANINAVDKQQRTPLMEAVVNNHLEVARYMVQRGGCVYSKEEDGSTCLHHAAKIGNLEMVSLLLSTGQVDVNAQDSGGWTPIIWAAEHKHIEVIRMLLTRGADVTLTDNEENICLHWASFTGSAAIAEVLLNARCDLHAVNYHGDTPLHIAARESYHDCVLLFLSRGANPELRNKEGDTAWDLTPERSDVWFALQLNRKLRLGVGNRAIRTEKIICRDVARGYENVPIPCVNGVDGEPCPEDYKYISENCETSTMNIDRNITHLQHCTCVDDCSSSNCLCGQLSIRCWYDKDGRLLQEFNKIEPPLIFECNQACSCWRNCKNRVVQSGIKVRLQLYRTAKMGWGVRALQTIPQGTFICEYVGELISDAEADVREDDSYLFDLDNKDGEVYCIDARYYGNISRFINHLCDPNIIPVRVFMLHQDLRFPRIAFFSSRDIRTGEELGFDYGDRFWDIKSKYFTCQCGSEKCKHSAEAIALEQSRLARLDPHPELLPELGSLPPVNT

SEQ ID NO: 285512 - DNA, 3804 bp, Artificial Sequence
  derived and/or modified sequence
atgcgagggctcccgcggggcaggggcttgatgcgagcccgaggaagaggtcgcgcggccccgcccggcagcagagggagaggtcgaggtgggccccaccggggcaggggtcggcctcgctcattactgtctcttccccgggctcaagcgtcctggactcctcaactaagtacaggccttactagtccaccggtgccttgcctcccatcacagggggaggccccagcagagatgggagcattgctgctcgagaaagaaactcgcggcgccaccgagcgagtgcatgggtctctgggcgacacccctcggtcagaggaaacactcccaaaagccaacccggacagtctggagccagctgggccctctagccccgctagcgtcaccgtcacggtgggcgacgagggggctgatacaccagtgggcgcgacccctctcataggcgatgaaagtgagaacctggaaggagatggcgatctacgtggaggccgcattctcctgggccacgccaccaagagcttcccatcctcacccagcaaaggcgggtcttgtccatcacgggccaagatgtcgatgacaggagcaggtaagtctcctccatccgtccaatccctggccatgcggctcctgagtatgcccggggctcaaggagccgcagctgctggctccgagccgcctcccgccacaacttcccccgaaggccagcctaaagtgcaccgcgctaggaaaaccatgtcaaagccaggcaacggccagcctccagtgcccgaaaagagaccgccggagatccagcacttcaggatgagtgacgacgtacacagcttaggaaaggtgacaagcgatctggcaaagcgcagaaaattaaattccggaggaggcttgtccgaagaactgggatctgcccggcgcagtggggaagttacactgaccaagggagatccaggctcactggaagagtgggagacagtagtaggtgatgatttctctctgtattacgactcatattctgtcgatgagcgggtcgactcagacagcaagtccgaagtggaggccctcacggagcagctttcggaggaggaggaggaggaagaggaagaagaggaagaggaagaggaagaggaagaagaagaggaagaagaagaggatgaggaaagcggcaatcagagcgacagaagtggatccagtgggagacggaaagccaaaaagaagtggcggaaagattccccttgggtcaaacccagtagaaaaaggagaaaacgcgagccacctagagccaaggaaccaaggggtgtgaacggcgttggttccagcggccctagcgagtacatggaagtgccattaggtagtcttgagcttccctccgagggtactctctccccgaaccacgcaggcgtgagcaatgatacaagcagcctagagactgaaagagggtttgaggagttgcctctgtgctcgtgcagaatggaagcacccaaaattgaccggattagcgaacgcgctggacacaagtgtatggccaccgagagtgtagatggggagctcagtggctgcaacgccgccatcttgaaacgcgaaaccatgaggccaagttccagggtagccctaatggtcctgtgtgagacccaccgggcacgaatggtcaaacatcactgctgtcccgggtgcggctatttttgtaccgccgggacctttttagaatgtcaccccgactttcgcgtggcccaccggtttcacaaggcttgcgtttctcagctcaatggcatggtgttttgcccacattgtggcgaggatgcatcagaggcccaggaagtaaccatcccaagaggcgatggagtgacgccacctgccggaaccgcagctcctgctccccctcccctatctcaggacgtgccagggcgggccgatacaagtcagccgagcgcccggatgcggggccacggcgagcccaggcggcccccctgtgatcccctggccgacacaatcgattcctctggccccagtttgactctcccaaacggcgggtgtctgagtgctgttggcctcccactagggccaggccgcgaggcactggagaaggctctagtgattcaggagtccgaacggcgaaagaagctccgctttcacccaagacagctgtacctgtctgtgaagcagggcgaattgcagaaggtcatcctcatgctgctggacaatctggacccgaatttccaatccgaccagcagagcaagcggactcctctgcatgccgctgcacagaaggggtccgtcgaaatctgccatgtgctgctgcaagccggggcaaatatcaatgcagtggacaaacagcaacgcacacctctcatggaggctgtggtgaataaccatcttgaggtggctcgatacatggtccagcgaggcggctgtgtctactccaaagaagaagacggcagtacttgcctgcaccacgctgcaaagataggcaatctggaaatggtgtcacttttgctttccacagggcaggtcgacgtcaacgcccaggatagcgggggctggacacctatcatttgggcagccgagcacaagcatatagaagttatcagaatgcttctcacacgtggggccgacgttactctgacagacaacgaggagaatatttgcctgcattgggcatccttcaccggaagcgctgctatcgccgaggtcctgctcaacgcacggtgtgatttgcacgccgttaattaccacggagatacaccactacacatagctgcacgggagtcataccatgactgtgtgctcctgttcctcagccgaggcgcaaatcctgagctaaggaataaggaaggggacaccgcttgggacttgacaccggaacgctctgatgtttggtttgccctgcagttgaaccggaaattgcgattaggagttgggaatcgtgctatccgtacagagaaaataatctgcagggatgttgccagaggctatgagaacgtcccaattccctgcgtgaatggtgtagacggagaaccctgtcccgaggactacaagtatattagcgagaattgcgaaacctcaacgatgaacattgaccggaacatcacccatctgcagcactgcacatgtgtggatgactgctcgagcagcaattgcttatgtggtcaactgtctattcgttgttggtacgacaaggatggtagactactgcaagaattcaacaagatcgagcctccacttatattcgagtgtaatcaggcctgttcttgttggagaaactgtaaaaatagggtcgttcaatctggaattaaagtacggctccagctctataggactgccaagatgggctggggtgtgcgggccttgcagacaattcctcagggaacatttatttgcgagtacgttggcgagcttatctcagacgccgaagcagatgtgcgcgaggacgatagctacctttttgatctagacaacaaggacggggaggtatactgcattgatgcgagatactatgggaacatcagccgtttcataaaccatctgtgtgatcctaacatcatcccagtacgggtgttcatgctacaccaggatttgcgattcccccgcatcgcattcttctctagccgggatataaggaccggagaggagctgggattcgattatggggaccggttttgggatattaaatccaagtatttcacgtgccaatgcggatcggagaaatgtaaacacagcgccgaggccattgcactggaacagagccggctcgctagactggatcctcacccagaactgttacctgaactgggctcactgcctcccgtaaacacttag

SEQ ID NO: 285513 - DNA, 3633 bp, Artificial Sequence
  derived and/or modified sequence
atggcagctgccgccggtgctgctgccgcagccgcagccgagggggaagcccctgccgagatgggggctctgctgctcgaaaaagagactaggggagccactgaaagagttcacggctccttaggggacaccccacgctcagaagagacactgccgaaggcaaaccctgattcccttgaacccgccgggccttcaagcccagcctcagtgactgtcaccgtaggagatgagggcgcagacactcccgtgggggccaccccattgatcggagatgagtccgagaatctcgagggtgatggtgacttgcgtggcggccggatcctgttgggacacgctactaaaagtttcccatcctctccaagtaaggggggcagttgccccagcagggctaaaatgtcaatgaccggggcaggcaaatcccccccgagtgtccagtctttggccatgagactgttaagtatgcccggcgcccagggagcggctgcagcaggaagcgaacctcctcccgccactaccagcccagagggccagcctaaggtgcacagggcaagaaagaccatgtccaaacccggcaacgggcagccccctgtgccggagaagaggccgcccgaaattcagcacttccgcatgtccgatgatgtccactccttgggtaaggtaaccagcgacctagctaagcgccgaaaattaaacagcggtggcggactttctgaagaactcggaagcgctagacgctcgggagaggtgactttgaccaagggggaccccgggtctctcgaggaatgggagacagtagtaggtgatgattttagtctgtactacgactcatacagcgttgacgaaagggttgattcagactccaagagcgaagtggaggccctgacagagcagctctccgaagaggaggaggaggaagaagaggaagaggaagaagaagaggaggaggaggaggaggaggaagaggaagaggacgaggagagtggaaatcaatctgatagaagtgggtcgagcggccggcgcaaggccaaaaagaagtggaggaaggacagcccgtgggttaaacccagcagaaagcgccgtaaacgggaaccgccaagagcaaaggagccgaggggagtgaacggggtcggctctagtggacccagcgagtatatggaggtgccactcggcagtttagaactcccaagtgaggggacgcttagccctaatcacgctggggtttccaacgacacaagctccctggaaacagagcggggctttgaagaactgcccctttgctcgtgccgcatggaggcacccaaaatagatcgtatcagcgaaagggccggccacaagtgcatggcaacggaatcggttgatggcgagctgtctggctgcaatgccgcaattctgaagcgcgagacaatgaggccaagctcccgggtggcactcatggtgctgtgcgagacacatagggcccgtatggttaagcatcactgctgtccagggtgtggttacttctgtactgctggcacgtttctggagtgccaccccgacttcagggttgcccatcgttttcacaaagcctgtgtatcccagctcaacggtatggtattttgcccacactgtggtgaggacgccagcgaggcacaggaggtaacaatacctcgcggagacggggtgacacctcctgctggcactgccgcccccgcaccacctcccctgagccaggatgtgccaggccgagcagatacgtcacagccatccgcaaggatgagggggcacggtgaaccacggaggcccccttgcgatcccttggccgatacaatcgatagctccggtcctagcctgaccttgccgaacggcggatgtctctcagccgttgggctgcccctgggccccggacgcgaagctctcgaaaaagctcttgtgatccaggagagcgaacggcgaaagaaactccgttttcaccccaggcagctttacctctctgtcaaacaaggtgaacttcagaaggtgattcttatgttgctggataatttggatcccaatttccaaagtgaccagcaatccaaacggacaccccttcatgctgctgcacagaaaggtagtgtcgaaatctgtcacgttctgctgcaggccggggcaaatatcaatgctgtggataaacagcagcgaacccccctgatggaagcggtcgtgaataatcatctagaagtcgcccgttacatggttcagcggggaggatgtgtgtattccaaagaagaggacggctcaacatgtctgcaccacgctgcgaagataggaaatctagaaatggtgagtctcctgctgtcgaccgggcaggtcgacgtgaatgcccaggactccggcggctggaccccaatcatctgggccgcagaacacaagcacattgaggtcatacgtatgcttctgaccagaggagctgatgttaccctgaccgacaatgaagaaaatatttgtctgcactgggctagcttcaccggcagcgccgccattgccgaggttctgctcaacgctagatgcgacttacatgcagtgaactatcacggtgatacacctttgcatatcgctgccagagagtcttaccatgactgcgtcttgctgtttctcagccggggagcgaaccccgaactgagaaacaaagagggagacaccgcctgggacctcacccccgagagatcagatgtgtggttcgcgctgcagttgaaccgcaagctgaggctaggtgtcgggaaccgcgcaatccgaaccgaaaagataatctgccgcgatgtcgctaggggttatgaaaatgttcctatcccgtgcgtgaacggcgttgacggagagccctgtccagaggattacaaatatatctcggagaattgcgagaccagtactatgaacatcgaccggaatatcactcacctgcagcactgcacatgtgttgacgactgttcttcctccaattgtctgtgcggccagctcagtattaggtgctggtatgacaaggacgggagattgttacaggagttcaataaaattgaaccacctttgatatttgagtgcaaccaggcttgcagctgttggaggaattgtaaaaacagagtggtgcagtctggaattaaggtccgcttgcagctttatcgaactgccaaaatgggatggggcgtgcgtgccctacagaccattccacagggcacctttatctgtgaatacgttggcgaactgatttcagacgcggaggccgacgtgcgtgaggacgattcctacttattcgatttggacaacaaggacggcgaggtatattgtattgatgccaggtattatggaaacatcagtaggtttattaaccatttgtgcgacccaaatatcatccccgtacgagtgttcatgttgcaccaggacctacgctttcctcggatagcattcttctcttctcgtgacattcgaaccggcgaggagctgggctttgactacggtgataggttttgggatataaaatctaaatacttcacctgtcagtgtggttctgagaagtgtaaacatagtgcggaggccattgccctggaacagagccggctggcccggttggaccctcaccccgagctccttcctgagcttggcagcctccctcctgtgaacacctag

SEQ ID NO: 285514 - DNA, 3633 bp, Artificial Sequence
  derived and/or modified sequence
atggccgctgctgctggcgctgccgccgccgcggcagcagagggagaagcaccagctgagatgggagctctgctgctagaaaaggagacgcgaggagctacggagcgagtccatggttcattgggtgacactccccggagcgaggaaacactgccaaaggctaatcccgactccttggagcctgccggcccatcttcccccgctagtgtgactgtgaccgtgggggacgagggagccgatacacctgttggagccacccctctgatcggagatgagagcgagaatctggaaggagacggtgacctgcgcgggggccgcatactcttgggtcacgctacaaagtcattcccttccagtcctagcaaaggtggcagctgtccaagcagggctaaaatgtccatgaccggtgcaggaaagtctccgccctctgttcagagcttagctatgcgtctactgtccatgcccggagctcagggagcagccgctgccggttcagaacctccacccgccaccaccagccctgagggccagcctaaggtccatcgagcccggaagaccatgtctaaacctggcaacggccagccacctgttccagaaaaaagaccgcccgaaatccagcactttaggatgtcagatgatgtgcactctctcgggaaagtgacctctgatctggctaagaggcgtaagctcaactcgggtgggggcctgtcagaagaactggggagtgcacgaaggagcggggaggtaactctgaccaaaggagatcccggctccctggaggagtgggagacagtagtgggcgatgacttctctctttattacgattcgtacagtgtggatgagagagtagactcagattctaaatccgaggtagaggcgctgacggagcagctcagtgaggaggaggaggaggaggaagaggaggaagaggaggaagaagaggaggaagaggaagaggaggaagaggaagatgaagagtcaggaaaccaaagcgaccgctctggtagctccgggcgacggaaggccaagaaaaaatggcgcaaagacagcccatgggtgaagccaagcaggaagcggaggaagcgagagccacctagggcgaaggagccaagaggggtgaatggggtcggctccagtgggcccagcgaatatatggaggtacccctcggctcacttgaactgcctagtgaaggaaccctctcccctaaccatgcaggagtgtctaatgacacaagtagtctggagactgagcggggcttcgaggagttgccactctgctcatgcagaatggaagcccccaagatcgatcgcatctcggaacgcgcaggccataagtgcatggccacagaaagtgtcgacggcgagctgtcaggctgtaatgctgctatccttaaacgtgagacaatgagaccttcaagcagagtcgcactgatggtgctctgcgagacccacagggctcgaatggtcaagcatcactgctgtccaggctgcggatacttttgcacagccgggacgttcctggaatgtcatccagactttagagtggctcatcggtttcacaaggcctgcgtttctcaacttaatggaatggtattttgcccacattgcggagaagacgcctccgaagcgcaggaggtgacaatccctagaggagatggtgtaacgcctcctgccgggacggccgccccagccccacctcctctgtctcaggacgtacccggtagggcagacacctctcagcctagcgcccgcatgagaggacacggcgaaccacggagaccgccgtgcgaccctctagctgataccatcgacagtagtggcccatctttgacactgcctaatggcggatgcctgagcgccgtgggtctaccgctgggtccgggccgagaagcgttggaaaaggcactcgtcatccaggagtccgaacgaagaaagaaacttcgattccacccaagacagctgtatctgtctgtgaaacagggggaattgcaaaaagtgatacttatgctcttggataatctggaccccaactttcagagtgaccaacaatcgaagaggacccctcttcacgccgcagcccagaaaggcagcgtcgagatctgtcacgtgttactgcaggcaggcgccaatataaatgccgtggataagcagcagaggacccctctcatggaagctgtcgtgaataatcacctcgaggtggctagatacatggtccaacggggcggatgtgtctattccaaagaggaagatggctccacatgtctccaccatgctgcgaagatcggcaacctagagatggtctctctgctgttgtcaacaggacaggtagatgtgaacgctcaggattctggtgggtggacgcccattatttgggcagccgagcacaaacacattgaggtgattcggatgttgctcacacggggggctgatgtgacactgaccgacaacgaggaaaacatctgtcttcactgggcatcatttaccggctccgctgccatcgcggaggtcctgctgaacgcgaggtgcgaccttcatgcagtgaattaccatggcgatacacccctgcatattgctgcaagggagagctatcacgactgtgtgctgctgtttctgtcacgcggtgcaaatcccgagcttaggaataaggagggcgacaccgcctgggacctaacaccggagagatcagatgtttggtttgcgttacaactcaatcgaaagctgcgtctgggggttgggaatagagccatccgcacagaaaagatcatatgcagggatgtcgcccgcgggtatgagaacgtacccataccatgtgtcaatggtgttgatggcgagccatgtcccgaggactataagtacatcagcgaaaactgtgaaacttcaacaatgaacatagaccggaacatcacccacctccaacactgtacctgtgtagatgactgttcctcatccaactgcctatgcggacagttgtctattcggtgctggtatgacaaagatggacgcttgttacaggagttcaacaaaattgaaccaccacttatatttgaatgcaatcaggcatgctcctgctggaggaactgtaagaaccgcgtggtccagagcggcattaaagtgcggttacagttatacaggactgctaaaatgggctggggcgttcgcgctctgcaaactattccgcagggaacctttatatgtgagtacgtgggagaactgatcagtgacgcagaagcggacgtcagggaggacgattcgtacctgtttgatctggacaataaagatggcgaagtgtactgtatcgacgcccgctactatggcaacatctctagattcattaaccatctgtgtgaccccaatatcattcctgtgcgcgttttcatgcttcatcaggacctgcgttttcctcgaattgccttcttctcatcacgcgacatccgcactggagaagagctcgggttcgattatggtgataggttctgggacattaaatctaaatacttcacctgtcaatgcggatcagaaaaatgtaaacattcagccgaagctatcgcactcgaacagagccgcctggccaggcttgacccgcaccccgaattgctgccagaactgggttcactgcctcctgttaatacatag

SEQ ID NO: 285515 - DNA, 3804 bp, Artificial Sequence
  derived and/or modified sequence
atgcgcggtctgcctagaggaagagggcttatgcgtgccagggggaggggacgcgcagccccacctggctctagggggcgtggaagggggggaccccataggggccgagggaggccccgcagccttctctccctccccagggctcaagcttcctggactccccagttgtcaactgggctgacgagcccacccgttccttgtcttccaagtcagggtgaagcaccagcagagatgggcgccttgctgcttgagaaggagaccagaggagcgactgaaagggtccacgggtccttgggtgatacgccacgctcggaggaaacattaccaaaagccaacccagactcgctggagcctgcaggtcctagtagcccagcgtccgttacagtcaccgtgggtgatgagggcgccgatacccccgtcggtgcaacacccctcatcggggatgaaagcgagaaccttgaaggagatggggatttgcgaggtggacgaatactactcggtcacgccaccaagagttttccatcctcgcccagtaagggtggatcatgccctagccgggctaagatgagtatgactggagccggaaagagccctccttcagtccagtctctggcgatgcgactcctctcgatgcctggcgcccagggggccgctgcggccggctccgagccccccccagcaaccaccagccccgagggtcaaccaaaagtacatcgagcacggaaaaccatgtctaaacccggcaatggacagccgcctgttcctgagaaacggccacccgagatccagcacttcaggatgtcagatgacgtccacagcctcggaaaggttacgagtgacttagccaagagaaggaagctgaactcaggtggtggactaagcgaagagctggggtcggcgcgcagatctggtgaggtaacacttacaaagggggatcccgggtccttagaggagtgggagacagtggtcggagatgatttctcactgtattacgactcttactccgtagacgagcgcgtggatagcgacagtaaatctgaagtggaggctctgacagagcagctttctgaagaggaggaggaggaagaagaagaggaagaggaagaggaagaggaagaggaagaagaggaggaagaagaggacgaagaaagtggcaaccagagcgataggagcggaagtagcggaaggaggaaagctaaaaaaaaatggcgcaaggatagtccctgggttaaaccttctcgaaaacgccgcaagagggagcctcctagggctaaggagcctcgcggagtgaacggcgttggctccagtggacctagcgagtatatggaagtcccactgggatcactggagctgccctccgagggaaccctgtccccaaatcatgccggtgtgtcaaatgacaccagttctctggaaaccgagcggggttttgaggagctccctctctgctcgtgcagaatggaggcgcccaaaatcgatcgcatctctgagagggcgggccataagtgcatggctaccgagtctgtggatggcgagctctcaggctgtaatgcggctattctgaagagggagacaatgagaccaagctccagagtcgcattgatggttctctgtgagactcacagggcccgcatggtgaagcaccactgttgccccggatgcgggtatttttgcactgctggaaccttcttggaatgtcatcctgacttcagagttgcacaccggttccataaagcttgcgtgagccagttaaacgggatggtgttctgtcctcattgtggggaggacgcatcagaggcacaagaggtgacaataccccggggcgacggtgttaccccgcctgccggaacggcggctccagcccctcctccactctcccaggacgttcccgggagagccgatacatcccagccttctgcaagaatgaggggccacggggaaccccgacgcccgccatgtgacccactcgctgataccatcgacagctccggccccagtttgacactccctaacggtggatgtttatctgcagttgggctccccctcgggccaggccgtgaggctttagaaaaggctctggtgattcaggagtctgagcgccgaaagaaactgcggttccatccgcgccagctctacttatctgtgaaacagggggagcttcagaaagttattttaatgttgcttgacaacctggacccaaactttcagtccgatcagcaaagcaaaaggaccccactgcacgctgcagctcagaagggctccgttgagatctgtcacgtgctcctccaggcaggagcgaacataaacgcagtcgataaacaacagaggactccgctcatggaagcagtggtcaacaaccatctggaagtggcgagatacatggttcagcgaggaggttgtgtgtacagtaaggaggaggatggttctacttgcctgcaccatgccgctaaaattggcaatctggagatggtgtcactgctcctgagcaccggacaggtcgacgtaaacgcccaggatagtggcgggtggaccccaatcatttgggcggcagagcacaagcatattgaagttattaggatgctgctcacacggggcgctgacgttacccttacagataacgaggagaacatctgtttacactgggcttcctttactggcagcgccgcgatcgctgaggtcctgctgaacgcgaggtgtgatctgcatgccgtcaattaccacggtgacacccccctacacatcgccgctcgcgagtcgtaccatgattgtgtcctgctcttcctgtctcgaggcgctaatcctgagctgcgaaataaggaaggggatactgcttgggacctgacccccgagcggtctgacgtgtggttcgctctccagcttaaccggaagctgcgcctgggcgtcggcaacagggctatcagaactgagaaaattatttgtcgtgatgtggcaagaggttatgagaatgtacccataccttgtgtgaacggagtggatggtgagccctgtccggaagactacaagtacatctccgaaaattgcgaaacttccaccatgaatattgatcgtaacattacccacctgcaacattgtacatgtgtggatgattgtagctcatctaattgcctgtgtggtcagctcagcattagatgttggtatgacaaagacggtcggctcctccaagagttcaataagattgaaccaccactcatctttgagtgtaaccaagcgtgtagttgttggcgcaactgcaagaatcgcgtggttcaatctggcattaaggtacgattacagctgtataggactgccaagatgggatggggtgtgcgagcacttcaaacaattccacaggggacatttatctgtgagtacgtgggtgagctaatttccgatgccgaagctgatgtgcgcgaagacgattcgtatctgttcgatctggataacaaggacggtgaggtgtattgcattgacgctagatactacggtaatatctcacgcttcatcaaccatctttgtgaccccaatatcattcctgtccgggtttttatgctgcaccaggatttacgctttccgcgtatcgccttctttagttctagagatatcagaaccggggaagagctgggatttgattatggggaccgtttttgggacatcaaaagcaaatacttcacgtgtcagtgcggctctgagaagtgtaaacactcagcggaagctattgctctggagcagtccagactggcccggctggacccccatcctgagctacttccggagcttgggagcctcccaccagtgaacacttag

SEQ ID NO: 285516 - DNA, 3804 bp, Artificial Sequence
  derived and/or modified sequence
atgaggggcctgccccggggccggggcctgatgagggcccggggccggggccgggccgcccctcctggcagccggggccggggccggggcggcccccaccggggccggggccggcccaggagcctgctgagcctgccccgggcccaggcctcctggaccccccagctgagcacaggcctgaccagcccccctgtgccctgcctgcccagccagggcgaggccccagctgagatgggcgccctgctgctggagaaggagaccaggggggccacagagcgggtgcacggcagcctgggggacacccccaggtctgaggagaccctgcccaaggccaacccagacagcctggagcctgctggccccagcagccctgcctctgtgacagtgacagtgggagatgaaggagctgacacccctgtgggcgccacccccctgattggagatgaaagtgagaacctggagggagatggagacctgcggggcggccgcatcctgctgggccacgccaccaagagcttccccagcagccccagcaaaggaggcagctgccccagccgggccaagatgtccatgaccggggccggcaagagcccccccagcgtgcagagcctggccatgaggctgctgtccatgcctggggcccagggcgctgctgctgctggcagcgagcccccaccagccaccaccagccctgagggccagcccaaggtgcaccgggccaggaagaccatgagcaagccaggaaatggccagccccctgtgcctgagaagaggcctcctgagatccagcacttcaggatgtctgatgatgtgcacagcctgggcaaggtgaccagtgacctggccaagaggaggaagctgaacagcggcggcggcctgtctgaggagctgggcagcgccaggagaagtggagaggtgaccctgaccaagggggaccccggcagcctggaggagtgggagaccgtggtgggagatgacttcagcctgtactatgacagctacagcgtggatgagcgggtggacagcgacagcaagtctgaggtggaggccctgacagagcagctgtctgaggaggaggaggaggaggaggaggaggaggaggaggaggaggaggaggaggaggaggaggaggaggaggaggatgaggagagcggcaaccagagcgacagaagtggcagcagcggccgcaggaaggccaagaagaagtggaggaaggacagcccctgggtgaagcccagcaggaagaggaggaagcgggagcccccccgggccaaggagccccggggcgtgaatggagtgggcagcagcggccccagcgagtacatggaggtgcccctgggcagcctggagctgcccagcgagggcaccctgagccccaaccacgccggcgtgtccaatgacaccagcagcctggagacagagcggggctttgaggagctgcccctgtgcagctgcaggatggaggcccccaagattgaccgcatcagcgagagagctggccacaagtgcatggccacagagagcgtggatggagagctgagcggctgcaatgctgccatcctgaagcgggagaccatgaggcccagcagccgggtggccctgatggtgctgtgtgagacccaccgggccaggatggtgaagcaccactgctgccccggctgcggctacttctgcacagctggcaccttcctggagtgccacccagacttccgggtggcccaccgcttccacaaggcctgtgtgtcccagctgaatggcatggtgttctgcccccactgtggagaagatgccagcgaggcccaggaggtgaccatccccagaggagatggagtgaccccacctgctggaacagctgccccagcccccccacccctgagccaggatgtgcccggccgggctgacaccagccagcccagcgccaggatgaggggccatggagagcccaggaggcctccctgtgaccccctggccgacaccatcgacagcagcggccccagcctgaccctgcccaatggaggctgcctgtctgctgtgggcctgcccctgggccctggccgggaggccctggagaaggccctggtgatccaggagagcgagaggaggaagaagctgcgcttccacccccggcagctgtacctgtctgtgaagcagggcgagctgcagaaggtgatcctgatgctgctggacaacctggaccccaacttccagagcgaccagcagagcaagaggacccccctgcacgccgccgcccagaagggctctgtggagatctgccacgtgctgctgcaggccggggccaacatcaatgctgtggacaagcagcagaggacccccctgatggaggccgtggtgaacaaccacctggaggtggcccgctacatggtgcagaggggcggctgtgtgtacagcaaggaggaggatggcagcacctgcctgcaccacgccgccaagattggcaacctggagatggtgtccctgctgctgagcacaggccaggtggatgtgaatgcccaggacagcggcggctggacccccatcatctgggccgctgagcacaagcacattgaagtcatccgcatgctgctgaccagaggagcagatgtgaccctgacagacaatgaggagaacatctgcctgcactgggccagcttcaccggcagcgctgccatcgccgaggtgctgctgaatgcccgctgtgacctgcatgctgtgaactaccatggagacacccccctgcacatcgccgcccgggagagctaccatgactgtgtgctgctcttcctgagcagaggagccaaccctgagctgaggaacaaggagggggacacagcctgggacctgaccccagagaggagtgatgtgtggtttgccctgcagctgaacaggaagctgcggctgggcgtgggcaacagagccatcagaacagagaagatcatctgcagagatgtggcccggggctatgaaaatgtgcccatcccctgtgtgaatggagtggatggagagccctgcccagaggactacaagtacatcagcgagaactgtgagaccagcaccatgaacatcgacaggaacatcacccacctgcagcactgcacctgtgtggatgactgcagcagcagcaactgcctgtgtggccagctgagcatccgctgctggtatgacaaggatggccgcctgctgcaggagttcaacaagattgagcccccactcatctttgagtgcaaccaggcctgcagctgctggaggaactgcaagaacagagtggtgcagagcggcatcaaggtgcggctgcagctgtacagaacagccaagatgggctggggcgtgcgggccctgcagaccatcccccagggcaccttcatctgtgaatatgtgggggagctgatcagtgatgctgaggctgatgtgcgggaggatgacagctacctgtttgacctggacaacaaggatggagaggtgtactgcattgatgcccgctactacggcaacatcagccgcttcatcaaccacctgtgtgaccccaacatcatccctgtgcgggtcttcatgctgcaccaggacctgcgcttccccagaattgccttcttcagcagccgggacatcagaactggagaggagctgggctttgattatggagaccgcttctgggacatcaagagcaagtacttcacctgccagtgtggcagcgagaagtgcaagcacagcgctgaggccatcgccctggagcagagccggctggcccggctggacccccaccctgagctgctgcctgagctgggcagcctgccccctgtgaacacctag

SEQ ID NO: 285517 - DNA, 3633 bp, Artificial Sequence
  derived and/or modified sequence
atggctgctgctgctggagctgctgctgctgctgctgctgagggggaggccccagctgagatgggcgccctgctgctggagaaggagaccaggggggccacagagcgggtgcacggcagcctgggggacacccccaggtctgaggagaccctgcccaaggccaacccagacagcctggagcccgccggccccagcagccctgcctctgtgacagtgacagtgggagatgagggcgctgacacccctgtgggcgccacccccctgattggagatgaaagtgagaacctggagggagatggagacctgcggggcggccgcatcctgctgggccacgccaccaagagcttccccagcagccccagcaagggcggcagctgccccagccgggccaagatgtccatgactggagctgggaagagccccccatctgtgcagagcctggccatgaggctgctgtccatgcctggggcccagggcgctgctgctgctggcagcgagcccccaccagccaccaccagccctgagggccagcccaaggtgcaccgggccaggaagaccatgagcaagccaggaaatggccagccccctgtgcctgagaagaggcctcctgagatccagcacttcaggatgtctgatgatgtgcacagcctgggcaaggtgaccagtgacctggccaagaggaggaagctgaacagcggcggcggcctgtctgaggagctgggcagcgcccggcgcagcggggaggtgaccctgaccaagggggaccccggcagcctggaggagtgggagaccgtggtgggagatgacttcagcctgtactatgacagctacagcgtggatgagcgggtggacagcgacagcaagtctgaggtggaggccctgacagagcagctgtctgaggaggaggaggaggaggaggaggaggaggaggaggaggaggaggaggaggaggaggaggaggaggaggaggatgaggagagcggcaaccagagcgacaggagcggcagcagtggaagaaggaaggccaagaagaagtggaggaaggacagcccctgggtgaagcccagcaggaagaggaggaagcgggagcccccccgggccaaggagccccggggcgtgaatggagtgggcagcagcggccccagcgagtacatggaggtgcccctgggcagcctggagctgcccagcgagggcaccctgagccccaaccacgccggcgtgtccaatgacaccagcagcctggagacagagcggggctttgaggagctgcccctgtgcagctgcaggatggaggcccccaagattgaccgcatcagcgagcgggccggccacaagtgcatggccacagaatctgtggatggagagctgagcggctgcaatgctgccatcctgaagcgggagaccatgaggcccagcagccgggtggccctgatggtgctgtgtgagacccaccgggccaggatggtgaagcaccactgctgccccggctgcggctacttctgcacagctggcaccttcctggagtgccacccagacttccgggtggcccaccgcttccacaaggcctgtgtgtcccagctgaatggcatggtgttctgcccccactgtggggaggatgccagcgaggcccaggaggtgaccatccccagaggagatggagtgaccccacctgctggaacagctgccccagcccccccacccctgagccaggatgtgcccggccgggctgacaccagccagcccagcgccaggatgaggggccacggggagccccggcggcccccctgtgaccccctggccgacaccatcgacagcagcggccccagcctgaccctgcccaacggcggctgcctgtctgctgtgggcctgcccctgggccctggccgggaggccctggagaaggccctggtgatccaggagagcgagaggaggaagaagctgcgcttccacccccggcagctgtacctgtctgtgaagcagggcgagctgcagaaggtgatcctgatgctgctggacaacctggaccccaacttccagagcgaccagcagagcaagaggacccccctgcatgctgctgcccagaagggctctgtggagatctgccacgtgctgctgcaggccggggccaacatcaatgctgtggacaagcagcagaggacccccctgatggaggccgtggtgaacaaccacctggaggtggcccgctacatggtgcagagaggaggctgtgtgtacagcaaggaggaggatggcagcacctgcctgcaccacgccgccaagattggcaacctggagatggtgtccctgctgctgagcacaggccaggtggatgtgaatgcccaggacagcggcggctggacccccatcatctgggccgctgagcacaagcacatcgaggtgatccgcatgctgctgaccagaggagcagatgtgaccctgacagacaatgaggagaacatctgcctgcactgggccagcttcaccggcagcgctgccatcgccgaggtgctgctgaatgcccgctgtgacctgcatgctgtgaactaccacggggacacccccctgcacatcgccgcccgggagagctaccatgactgtgtgctgctcttcctgagcagaggagccaaccctgagctgaggaacaaggagggggacacagcctgggacctgaccccagagaggagtgatgtgtggtttgccctgcagctgaacaggaagctgcggctgggcgtgggcaacagagccatcagaacagagaagatcatctgcagagatgtggcccggggctatgaaaatgtgcccatcccctgtgtgaatggagtggatggagagccctgcccagaggactacaagtacatcagcgagaactgtgagaccagcaccatgaacatcgacaggaacatcacccacctgcagcactgcacctgtgtggatgactgcagcagcagcaactgcctgtgtggccagctgagcatccgctgctggtatgacaaggatggccgcctgctgcaggagttcaacaagattgagcccccactcatctttgagtgcaaccaggcctgcagctgctggaggaactgcaagaacagagtggtgcagagcggcatcaaggtgcggctgcagctgtacagaacagccaagatgggctggggcgtgcgggccctgcagaccatcccccagggcaccttcatctgtgaatatgtgggggagctgatcagtgatgctgaggctgatgtgagagaagatgacagctacctgtttgacctggacaacaaggatggagaggtgtactgcattgatgcccgctactacggcaacatcagccgcttcatcaaccacctgtgtgaccccaacatcatccctgtgcgggtcttcatgctgcaccaggacctgcgcttcccccgcatcgccttcttcagcagccgggacatcagaactggagaggagctgggctttgattatggagaccgcttctgggacatcaagagcaagtacttcacctgccagtgtggcagcgagaagtgcaagcacagcgctgaggccatcgccctggagcagagccggctggcccggctggacccccaccctgagctgctgcctgagctgggcagcctgccccctgtgaacacctag

SEQ ID NO: 285518 - DNA, 3804 bp, Artificial Sequence
  derived and/or modified sequence
atgcggggcctgccccggggccggggcctgatgcgggcccggggccgagggcgggcagcacctcccggatctcgaggtcggggccgagggggccctcatagggggcgaggtcgccctagatctttactgagtttgccccgagcccaggcctcttggaccccccagctgtcgacggggctcacaagtcctccagtgccatgcctccctagccagggggaggcacctgccgaaatgggagctctgttacttgagaaggaaaccaggggtgccactgaacgggtgcacggctccctcggtgacactccaagatccgaagagacgcttcccaaagccaacccagactcgctggaaccggcaggacccagctcacctgcctcggtgactgtcaccgtcggagatgagggcgcggataccccagtcggggccacgccccttattggggacgagagcgagaacttggagggcgacggcgatttgagagggggaaggattctactgggacacgccactaaaagtttcccatcaagcccgtctaagggcggatcatgtcctagcagagcaaagatgtctatgaccggagcaggtaagtcacccccctctgtgcagagtttagccatgcgactcctaagcatgccgggtgcccagggagccgcggctgccggatcagagcccccccctgcaacaaccagccccgaggggcaaccgaaagtacacagggctcgtaagactatgtcaaagcctggaaatggtcagcctcccgtgcctgagaagcgcccacccgaaattcagcattttaggatgtccgatgatgttcattctctaggcaaagtgacaagtgacctggccaaacggagaaagctgaactctgggggcggtctctcagaagaacttggcagcgccagaaggagcggggaagttactttgactaaaggcgatccggggagcctggaagagtgggagacagttgtgggtgatgacttttcactttattacgattcctattctgttgacgaacgcgtcgactccgattctaagtctgaagtcgaagccctgacagaacaactctcggaagaggaggaagaggaggaggaggaggaggaggaggaagaggaagaggaggaggaggaagaggaagaagaagacgaggagtccggcaatcaatcagatcgttctggatcctccggtcggcggaaagccaaaaagaagtggaggaaggactccccatgggtcaaaccttctaggaaacgcagaaagcgggagccccctcgcgccaaagagcccagaggcgtcaatggagtcggaagcagtgggccgtccgaatatatggaagttccattagggtcgttagagctgccgtccgagggcacgctaagccctaaccacgccggcgtatctaacgatacatcctccctggaaacagaaaggggctttgaagagcttcctctgtgcagctgccggatggaggcacctaaaattgaccggatcagcgaacgcgcaggacataaatgcatggcaaccgaaagcgtagacggcgaactcagcggatgcaatgccgccattctcaagagagagacaatgcgcccatcctcccgggtcgcgctaatggttctctgcgaaactcatcgggccaggatggtgaagcatcattgctgtcctggatgcggctacttctgtaccgcaggcacgttcctggaatgccacccagacttccgggtcgcacatcggtttcacaaggcctgtgtctctcagttgaatggaatggtattctgtccgcactgtggggaggatgctagtgaagcacaggaggtgactatccctaggggggacggggtaacgcctccggcaggcactgctgcaccggccccccctcccctcagtcaggacgtccccgggagggcagacactagccagcctagtgcacggatgcggggacatggcgagccgcggcgcccgccctgcgaccctttagccgacacgatcgactcttcggggcccagccttacattaccaaatgggggttgcctttccgcggtgggtttgcccctgggacccggccgcgaggcactcgagaaagccttggttattcaggagtctgaacgtcgcaagaagctgagattccatcccagacagctgtacctttccgtgaagcagggcgagttacagaaggtcatcctcatgctgctggacaatctggacccaaatttccagagcgatcagcaatctaagcgaacaccgctccatgccgcagcccagaagggaagtgttgagatctgccacgtgctcctgcaggctggggctaacattaatgccgttgacaagcaacagagaacacctctgatggaggcagtcgtgaacaatcacctggaagtggctcggtacatggtgcaacggggtgggtgcgtgtatagcaaggaagaggatggctctacgtgcctgcaccatgcagccaaaatcggtaaccttgagatggtgagccttctgctgtcaacgggacaggtagacgtgaatgctcaggacagtgggggttggacacccatcatctgggccgctgagcacaagcacattgaggtgatccggatgctgctcacacggggcgcggatgttaccttgacggataatgaagaaaacatatgcctgcattgggcgagcttcactggttccgcggccatcgcagaggtgctgctgaacgcacgctgcgacctccacgcggtgaattatcacggcgataccccgcttcatatcgccgcccgcgagagttatcatgactgcgtccttctatttctgtcaaggggagcaaatcctgagctcaggaacaaagagggcgataccgcatgggatctgacacctgagcgatctgacgtttggttcgctttacagctgaatagaaagctgcgcctaggtgtcggcaatcgagccattcgtactgaaaaaatcatttgtagagatgttgcccgaggttacgaaaacgtgcctatcccatgtgtgaatggcgtggacggagaaccttgcccggaagactataagtacatttccgagaattgtgagacatcaaccatgaatatagatagaaatataacgcaccttcaacactgtacgtgtgtggacgactgcagcagctccaattgtctttgtgggcagctttctatccggtgctggtacgataaagacggaaggttgttgcaggagttcaataaaatcgaacctccgctgatatttgagtgcaatcaggcttgctcgtgttggcggaattgcaagaatcgagtggtgcagtccgggataaaagtccgcctgcaactatatcgcacagccaaaatggggtggggcgtgagagcactccagacaatcccacaaggaacgttcatctgcgagtatgttggcgagctgatcagtgatgctgaagccgatgtgagggaggatgacagttacctgttcgacctggataataaagatggcgaggtgtattgcatcgatgcccgctactacggcaatatctcgcgttttattaaccacctttgtgatcccaacatcattcccgtgcgggttttcatgcttcaccaggacctgaggttcccaagaatagccttttttagcagccgtgacatccgcaccggggaagagttgggatttgactatggggataggttctgggacatcaagagtaagtactttacctgccagtgtggttctgaaaaatgtaagcacagtgcagaggcaatcgccctagaacagtcccggctggcgcgcctggaccctcatcctgagctcctacccgaactcgggtccctgcccccggtcaacacgtag

SEQ ID NO: 285519 - DNA, 3633 bp, Artificial Sequence
  derived and/or modified sequence
atggccgccgccgccggcgccgccgccgccgccgccgccgagggcgaggcccctgctgagatgggcgctctgcttctggagaaggaaacaagaggagctacggagcgggtgcatgggagccttggagacactccccgttcagaggaaactctgccaaaagcaaaccctgatagcctggaacctgctgggccgagctcccctgcgagcgtgaccgtgactgtcggagatgaaggcgctgacacaccagtcggggccactccgctcatcggggatgagtctgaaaacctggaaggggatggcgaccttagaggaggccggattctgctgggacatgccactaaatccttccctagcagccccagtaaaggcggctcatgtccctcccgcgcaaagatgagcatgactggcgcgggtaagtccccccctagcgtccagagcttggctatgaggctcttatccatgcccggggcccagggagcggctgcggccggcagcgaacccccacctgcaactacatctccagagggacagcccaaggtgcatagagctcgcaagaccatgtccaagccaggtaacggacagccccctgtcccggagaagaggccccctgagattcagcacttcaggatgtctgatgatgtacattcgctgggcaaggtgacctccgatttagccaaacgccgaaaattaaactccggaggtggtctgtctgaggaactgggctctgccaggcggtctggagaggttacgctgacaaagggagaccccgggtctctggaggagtgggagactgtggttggagacgacttttcattgtactacgactcttatagcgtcgatgagcgagtagatagtgatagcaagtctgaagtcgaggccctgacagaacagctgtctgaggaagaggaagaagaagaggaggaggaggaagaagaagaagaggaagaggaagaagaagaagaggaggaggacgaggaatcaggaaaccaatcagaccggagtggatccagcggccgtagaaaggctaagaagaaatggaggaaagactccccttgggtgaagccctctcgcaaacgtcggaagagggagccgccccgcgccaaagagccccgcggcgtgaatggggtgggatccagtggcccgtcggagtacatggaggtgcctctgggctctctagagctcccctcagaggggacgttgagccccaatcatgccggcgttagtaatgatactagctccctcgaaaccgaaaggggattcgaggagttgcctttgtgctcttgccggatggaagccccaaaaattgatcggatatccgaacgcgctggacacaagtgcatggctacagaaagtgtggacggagagctgagcggctgcaacgctgccatcctgaagagggagacgatgcgcccttcttcccgggttgcactgatggttctgtgtgagacccatcgtgcccgcatggtaaagcaccattgttgccctggttgcggttatttctgtacagcgggcacttttctggagtgtcatccagacttccgcgtggctcacagattccataaggcatgcgtgtcacagctaaatgggatggtgttctgccctcattgcggagaagacgcaagcgaggctcaggaggtgactattccaagaggcgatggagtgaccccccccgcaggcacagctgctcctgccccccccccactctcacaggacgttccaggccgagccgatacttctcagccttccgcacgtatgagaggccacggcgaaccacgccgtcccccatgtgatcctctggctgacacgatcgacagcagtggccctagccttaccctgccgaacggcggctgtctgtcagcggttggcctgcctttagggccaggcagggaagcgttggagaaggccctggttatccaggagtctgaacgccgcaagaaactccggttccaccctagacaactctacctctccgtaaaacagggcgaacttcaaaaggtaattctcatgttgcttgataacttagatcctaactttcaaagcgaccagcaatcgaaacggacccccctgcacgcagccgcccaaaagggcagcgttgagatttgccatgtactgctccaggcgggtgccaatattaatgctgtagacaagcagcagcggactccactcatggaagctgtagtgaacaaccatttggaggtagccaggtatatggtgcagaggggtggatgcgtctactcaaaagaggaggatggatctacatgcctgcatcacgctgcaaaaatcggcaacctcgaaatggtatcccttttgctatccacaggccaggtcgatgttaacgcccaggattctgggggctggaccccgatcatttgggctgccgaacataaacacattgaggtcatacgaatgctcctgacacgtggggcagacgtcaccctcactgataatgaggagaacatctgcctccattgggcttcctttaccggttctgctgcaatcgcagaggtgctgctgaatgccagatgcgacttgcacgctgtcaattaccacggagacacacccctgcatatagccgcccgcgaatcctaccacgactgcgtcttgttgttcctctctcggggcgctaatcccgaactgaggaacaaagagggcgatacagcgtgggatcttactcctgaacgatccgatgtatggttcgcgctgcaattaaaccggaagctgcgtctgggggttggaaatcgggctattagaactgagaaaattatttgcagggatgtcgctcgtggttacgagaacgtccctattccttgtgtgaacggcgttgatggagaaccgtgccctgaggattacaagtatatctctgaaaactgtgaaacttcgacaatgaatatcgatcgtaatatcacccatctccaacactgtacatgtgttgacgattgttctagttctaactgtttatgcggacagctgtcaattcgctgttggtacgacaaggacggacggttgctgcaggaatttaataaaatagaaccacccctgatctttgaatgtaatcaagcgtgcagttgctggcggaactgtaaaaaccgagtagtgcagagcgggattaaagttaggcttcagctctatcgaacagctaagatgggttggggcgttagggcgttgcagactataccccagggaacctttatctgcgagtacgttggcgaattgatctcagacgcagaggctgacgtgcgcgaggatgattcatacttgttcgacctggataacaaagacggcgaggtgtactgcatagacgcgcgttattacgggaatatcagcaggtttataaaccatctctgtgatcctaatattattccagtgagagtgtttatgttgcatcaggatctgaggtttccccggatcgcctttttcagcagtagagacatccgcactggcgaggagttaggctttgactacggcgataggttttgggacatcaagagcaaatacttcacgtgtcagtgtggcagcgaaaagtgcaagcactcagcagaagccattgccctcgagcaaagccgacttgcgagacttgacccacacccagagttgctgccagagttgggcagcctgccacctgtaaatacttag

SEQ ID NO: 285520 - DNA, 3633 bp, Artificial Sequence
  derived and/or modified sequence
atggccgccgccgccggcgccgccgccgccgccgccgccgagggcgaggctccagctgaaatgggagccctgctgctggaaaaggagacccgcggtgccaccgagcgcgtgcatggatccctgggggatactccgagatcagaggaaaccctacccaaagctaacccggacagtctggaacccgccggcccgagtagtcccgcaagtgtgacagtgaccgtgggcgatgagggtgctgataccccagtaggggcaacaccattgattggtgatgagtcagaaaatctggagggggacggggacctccggggtggcaggattttactgggccatgcgacaaagtccttcccctcttcaccgtcaaagggcgggtcatgtccgagccgtgccaagatgagcatgacaggcgctgggaagtcccccccttccgtacagagcctagccatgcggctactttccatgcccggcgctcaaggagcagctgccgctggcagcgaaccccccccagccacaacctcaccagagggccaaccgaaagttcacagggccagaaagacaatgtctaaacccggaaacggccagcccccagtgcctgagaagaggccccctgagattcaacattttaggatgtcagatgacgttcactcgctgggaaaagttacatctgacctggctaagcgaaggaaacttaatagcggaggcggcctcagcgaggagctcggttccgctcgtcgtagcggggaggtgacactcacaaaaggcgaccctggaagccttgaggaatgggaaaccgtcgttggcgacgatttctcgctttattatgactcctattcagtcgacgagcgagtagattccgacagtaagtccgaagtggaggctctcaccgagcagctgtcggaagaggaggaggaggaggaggaggaagaagaggaagaagaggaagaagaggaggaggaagaagaggaggaagatgaagagtcaggcaatcagagcgacagaagtggatcctcaggtcgcaggaaggcgaaaaaaaagtggaggaaggatagcccctgggttaagccatctcggaaaaggcgcaagagagagcctcctagggccaaggagccccgcggcgtgaacggcgttggctcctcaggtccaagcgagtacatggaggtgccactggggagcctggagctcccatccgaggggaccctgagccctaaccacgctggcgtatccaatgataccagtagcctggaaacagagagaggttttgaagagctgccactctgctcatgccggatggaggcccccaaaattgatcggataagcgagcgcgccggacataagtgtatggcaactgagtccgtggacggggaactgtctggctgcaacgcagcaatcctgaagagggagaccatgcgaccttcctcccgagtcgctctaatggtgttatgtgaaacccaccgggcgcgcatggtaaaacatcactgctgtccagggtgcggatacttctgtacagctggaacattcttggagtgtcatcccgacttccgggtggcccatcgatttcacaaagcttgcgtgagtcaactcaacgggatggtcttctgcccacactgtggcgaggacgcttccgaagcacaagaggtgaccataccacgcggagatggagtcacccccccagcaggtaccgccgcgccagcccctccaccactgagccaggatgtgcctgggagggccgacacttctcagccaagcgcacgcatgcggggccacggtgagccacggagaccaccttgcgacccactggcagatactatagattcctccggcccatccctgactttacccaacggagggtgcctgagcgccgtcggccttcctttgggccccggacgggaagctctcgaaaaggctcttgtgatccaggagagcgagcgcagaaaaaagcttcgctttcatcccaggcaattatacctcagcgtcaagcaaggcgaactgcagaaggttatcttgatgctgctcgataatctcgatcccaatttccagtccgaccagcaaagtaaaaggacacctcttcacgctgctgcacagaaaggatcagtcgaaatctgccatgtcctcctgcaggctggagcaaacattaatgcggtggacaagcagcaacgaaccccccttatggaggcagtcgtgaataaccatctcgaagtagcacgctacatggtccagcgtggaggctgtgtgtacagtaaggaagaggatgggagcacctgcctgcaccacgccgcaaaaattggtaatctcgaaatggtctccctcctattgagcacagggcaagtagatgttaacgctcaggactcaggggggtggacacccatcatttgggctgcagaacacaagcacatagaggtgatccgtatgctacttacacgcggggctgacgtgacgctcaccgacaatgaagaaaacatttgtttgcattgggcctcctttactggctcagctgctatagccgaggtgttgctgaatgctagatgtgacttacatgcagtcaactaccacggtgacacacctctgcatatcgcagctagagagagctaccacgactgtgttctcctgttcctgtcacggggcgccaaccccgagctacgaaacaaggagggtgacactgcctgggatctaactcctgaacgctccgatgtgtggtttgctttacagctcaacagaaagctgagactgggagtaggtaaccgtgccatacgtacagagaagattatttgtcgagatgtggcaagaggctatgaaaatgtgcccatcccatgcgtaaatggcgtggacggtgagccatgccctgaagattacaaatatatctctgagaactgtgagacgtctactatgaacattgataggaatataacacatttgcagcactgtacatgcgtcgacgattgctctagctccaactgtctatgtggccagctttcaatccgttgctggtacgataaggatggtcgacttctccaggagtttaacaagattgaacctccactgatattcgaatgtaatcaggcttgctcttgctggcgcaattgcaagaatcgtgtcgttcagtcagggatcaaggtccggcttcagttataccgcacagccaagatgggctggggcgttcgagcccttcagactattcctcaggggacttttatctgtgagtatgtgggcgaactcattagtgacgcagaggcggacgtaagggaggacgacagctacttatttgatctggacaataaggacggggaggtgtattgcattgacgcgcgttactacggtaacatttccagatttattaatcatttgtgtgatcctaatattattccggtgcgggtctttatgctgcatcaggacctgagattcccacgcatcgcctttttctcctctcgtgacataagaaccggggaagaactaggctttgattatggagatcggttctgggacatcaagtctaaatattttacttgccaatgtggttctgagaaatgtaagcattcagcagaggcaatcgccctcgagcagtcgagacttgcgcgactggatcctcacccagaacttcttccggagctaggctcactgccgcctgtgaatacgtag

SEQ ID NO: 285521 - DNA, 3804 bp, Artificial Sequence
  derived and/or modified sequence
atgcggggcctgccccggggccggggcctgatgcgggcccggggccgcggccgcgcagccccccccggatcccgagggcgcgggcggggaggtccccaccgtggcagaggacggcccagatctctgctctcactgcccagggcacaggcttcctggacccctcagcttagtaccggtcttacgtctccacctgttccgtgtcttcccagtcaaggtgaagctcccgctgagatgggcgcactgctcctagagaaagagacaaggggtgctaccgagcgggtccacggatcgcttggcgacaccccaaggtctgaggaaacgttgcctaaggcgaatccagactcactcgagcctgccggccccagttcacctgcgagcgttacggtaacggtaggggatgagggagccgatacccccgtgggcgctacacccctgattggcgatgagtcagagaatctggaaggcgatggggatctgcgcggcgggaggatattgttaggtcatgcaaccaaaagttttcccagctccccaagcaagggcggatcatgcccgagccgcgccaaaatgtctatgaccggagcaggcaaatcacccccgagcgttcagagcctcgccatgcgcctgctctcaatgcccggcgcccaaggtgccgctgccgccgggtccgaacctcctcctgccacaacatcgcccgaaggtcaaccaaaggtccaccgcgctcgcaaaacaatgtctaagcctggcaatggccagccacctgtcccagagaagaggccaccggagattcagcactttcggatgtctgacgacgtgcattccttgggtaaagtgactagcgaccttgccaagagacggaaactgaactccggtggtgggctgagtgaagagttgggaagcgcccgacggtcaggtgaagttactctcaccaaaggcgatccagggagtctggaggagtgggaaactgttgtgggagacgattttagcctgtactacgattcttactcagtcgacgaaagagttgactctgacagcaaatcagaagttgaagccctcactgaacagctcagtgaagaggaggaggaggaggaggaagaagaggaagaggaggaggaggaagaagaagaagaggaagaagaggaggacgaagaatccgggaaccaaagcgatcgatccggcagctcgggcaggcgaaaggccaagaaaaagtggagaaaggactccccatgggtgaagccttcaagaaagcgcagaaagcgggaaccgccacgcgctaaagaaccaaggggagttaacggtgttggttcctcaggcccttccgagtatatggaggtgcctctggggtccctcgagttaccctcagaaggcactctatcccctaatcacgctggggtgagtaacgatacaagctctctggaaacggaaagaggctttgaagaactgccattgtgcagttgtcggatggaagctcccaagattgacaggatctctgagagggccggccacaaatgcatggcaactgagagtgtcgacggcgaactgtcaggatgcaatgcagccatcctgaagagggagacgatgaggccttcatctcgggtcgctttaatggttctgtgtgaaactcacagagctaggatggtgaagcaccactgctgcccaggttgcggctatttctgtacagctggcaccttcctggaatgtcacccagactttagagtggcacatcggtttcataaagcgtgcgtctctcagctaaacggaatggttttctgtccgcactgtggagaggacgcaagtgaggctcaggaggttaccataccacgcggggatggagtgacaccccctgcaggcacagccgcccctgctcctcctccgttgtcccaggatgtgcccgggcgcgctgataccagccagccttcggcaagaatgcgcgggcacggggaaccccgacgcccaccatgtgacccattggccgatacaatcgattccagcgggccctctctaacgttgcccaatgggggatgcctgtcagcagtgggcctacccctgggcccaggacgcgaagccttagagaaagccctggttatacaggagtccgaaaggcgtaagaagttgagatttcacccaagacagctgtatttgtctgtgaaacagggagagcttcagaaagttattcttatgctgcttgataacctggacccaaactttcagagcgatcagcagagcaagcggaccccgctgcacgcagccgcacaaaaagggtctgtggagatctgccatgtactcttgcaggcaggcgccaatatcaacgcagtggacaaacaacagaggacgccacttatggaggcagtcgtcaacaatcatctggaggtcgctcgttacatggttcagcgcggtggatgtgtatacagtaaagaagaagatggctcaacctgcctgcaccatgctgcaaaaatcgggaacctcgaaatggtatccctcctccttagcaccgggcaggtagatgtgaatgcgcaggatagcggaggttggacaccaatcatctgggcagccgaacataaacatatcgaagtgattcggatgctactgactcgaggggcagacgtaaccctcacagacaacgaggagaatatatgtctacattgggctagcttcaccggaagcgctgcaatagcagaggtgctgctgaacgctcggtgcgaccttcacgctgttaactaccacggcgatacacctctgcacattgcggctcgcgagtcttatcatgattgtgttctcctgtttctgtcccgaggggcgaaccccgagctgcgcaataaggaaggagacacggcttgggaccttacccccgagcgatctgacgtgtggtttgccctgcagctgaataggaagctgagactaggagtgggaaatcgggccattagaacagagaaaattatctgcagagacgtcgcacgaggctatgagaatgtgcctattccatgtgtgaacggcgtggacggcgaaccctgtccagaggactacaaatacatcagtgaaaactgtgagaccagcacgatgaatattgataggaacatcacccacctccaacactgtacttgtgtcgatgactgcagtagcagcaactgtctatgcggtcagctctccattcgttgctggtacgataaagacggccgcctgctacaggaattcaacaaaattgaaccaccccttattttcgaatgtaatcaggcttgtagttgctggcgtaactgcaaaaatcgagttgtccaatctggcattaaggtgcgcctgcaactgtataggaccgcaaaaatgggctggggtgtgcgggcactgcagactatcccccagggaacatttatctgcgagtacgtaggagagctgatctctgacgccgaagctgacgtgcgcgaggatgattcctatctctttgacctggataacaaggacggggaggtttactgcattgatgcccgttattacggcaatatttcacgattcatcaaccacctgtgtgacccaaacataatccccgtccgcgtctttatgttgcaccaggatctcagattcccccgaattgcctttttttcaagccgggacattagaactggtgaggagctggggtttgattacggcgatagattctgggatatcaagagcaagtatttcacttgccagtgcggatctgaaaaatgtaagcactctgcagaagcaatagccctagaacagagtaggctcgcaaggctggacccgcaccctgagcttctgcccgaactgggatctctgcctcctgtaaatacttag

SEQ ID NO: 285522 - DNA, 3804 bp, Artificial Sequence
  derived and/or modified sequence
atgaggggactgcccaggggccgtggcctgatgcgggctcggggtcggggacgtgcagccccacccggatctaggggtagaggaaggggcggtccacacaggggcaggggcagaccccgtagcttgctgtcactaccaagagctcaagctagctggacccctcagctgtccaccgggctcacatccccacccgtgccttgcctgccttcgcagggcgaggcccctgcagagatgggcgcattactcctcgagaaggaaacccggggagccactgagagggttcatggttcattgggagatacccccagatccgaagagactttgcctaaggctaatccagattccctggaacccgcaggcccatcatcccccgcttccgtcacagtcaccgtgggagatgagggcgctgacacccccgttggggctactcctttaattggcgacgagtcagagaatctggaaggagatggagatctgcgaggcggaagaattctgctcggacatgcgaccaaatcttttccatcctctcccagcaagggcggtagctgccctagtcgcgctaaaatgtcaatgacaggcgcaggtaagtccccacccagcgttcagtctctggctatgcgcctgctctctatgcctggagctcaaggcgctgcggctgcaggctccgaaccgcctccagctaccacaagcccagaaggtcagcctaaggtgcatagagcgcgaaaaacaatgtctaagcccggtaatggccagcccccagtgcccgagaaaaggccccctgaaatccaacacttcagaatgagcgatgacgtacactccctggggaaggtcacctccgatttggccaaaagaaggaagctgaattccgggggtggtctgtcagaagagctgggatccgctcggcgatcaggggaggtgactttgactaaaggggaccctgggtccctggaagaatgggaaacagtagttggggacgatttcagcttgtattatgattcctactctgtcgacgaaagagtcgatagtgatagtaaatcagaagtcgaggctctgaccgaacagctatctgaagaagaggaggaggaggaagaggaagaagaggaagaagaggaagaggaagaagaagaggaggaagaggaggacgaggagtccgggaaccagtctgaccgaagcgggtcctccggtaggcgaaaggcaaaaaagaagtggaggaaggactccccttgggttaaaccctcacgaaagcgtagaaagcgcgaaccgccaagggcgaaggaaccacggggagttaacggcgtgggttcttctggccctagtgagtacatggaggttcccctggggtcgcttgagctgcctagcgagggcacactctcgcctaaccacgccggtgtgtccaatgacacatcctccctcgaaaccgaaagagggttcgaggagctacccctgtgctcctgccgtatggaggctccaaagatagataggatctcagaacgggctggccacaagtgcatggcaaccgaatccgtggacggcgaactgtccggttgtaatgcagcaatcttgaagagagaaaccatgagacccagttccagggtggctttgatggtgttgtgcgagacacaccgcgcacgcatggttaagcaccactgttgccccggatgcggttatttctgcaccgccggaacttttttggagtgtcaccctgattttagagtggcccatcgttttcataaagcatgcgtgtctcagctgaacgggatggtcttctgcccacattgtggcgaggacgcttccgaagctcaagaggtgaccatcccaagaggagatggggtgactccaccagctggcactgcggcacccgcaccaccgcctctgagccaggacgtgcccggaagggcagataccagtcagccaagcgccagaatgcgcggtcatggggagccgagacggcctccatgcgatccgctcgccgacactatcgactcctcaggtccctctctcaccctccccaacggcggatgcttgagtgccgtcgggttacccttgggtccaggacgcgaagccttagaaaaggcactagttatccaggagtctgagcggagaaagaagctgcgcttccacccacgccaactttacctgagtgtgaagcagggcgagcttcagaaggtcatcctaatgctactggataacctggaccccaatttccagagcgaccagcagtcaaaacgcaccccgttgcacgcagcggcacagaaagggtccgtcgaaatttgtcacgtactgttgcaagctggagccaatattaacgcagtggacaagcagcagcggacccccctcatggaggctgtcgtgaacaaccatttagaagttgcccgatatatggtgcagagaggcggatgtgtgtacagcaaagaggaagatggcagtacttgcctccatcacgccgctaagatcggcaacctggagatggtgtccttgttgctctctacaggtcaagtggacgtcaacgcgcaagactccgggggatggactccaataatttgggctgctgaacataagcacattgaggttattaggatgctgctgaccagaggagccgacgttactttaaccgataacgaggaaaacatttgtctgcactgggcatccttcacaggtagtgccgctatcgctgaggttctgcttaacgcacgatgtgacctgcacgccgtcaactaccacggggatacacctcttcatatcgccgctagagagtcctatcatgattgtgtgctgctctttctttcccggggagctaaccccgaactgcgtaacaaggagggcgacaccgcctgggatctgacgcccgaaaggagcgatgtgtggtttgctctccaactgaatagaaagctcagactgggtgtggggaacagggccattagaactgagaaaatcatctgcagggatgtggccaggggctatgagaacgttccaattccctgcgtcaatggagttgatggggaaccatgccctgaggactacaagtatattagcgaaaactgtgaaactagcactatgaatatcgaccgcaacatcacgcacctgcagcactgcacttgtgtcgatgactgtagctcctcaaattgcctctgcggccagctctcaattcggtgctggtacgacaaggatggtcgcctattgcaggagttcaacaagatcgagcctcctctcatttttgaatgtaaccaagcctgctcctgctggcggaattgcaaaaacagggttgtccaatcagggatcaaggtgcgcctccagctgtatcgcaccgcaaagatgggctggggtgtcagagccctgcagaccattccccagggcacgtttatttgtgagtatgtcggagaactcatcagtgacgccgaggctgacgtccgggaagacgactcttacctgttcgacttggataacaaagacggtgaggtgtattgtatcgacgcacgctattacggaaatatatcaaggttcattaaccacttgtgcgatccaaatatcattcctgtcagggtgttcatgttgcatcaggacttgcgcttccccagaatagctttttttagctcacgagatatacggacaggagaagagctggggttcgattacggagaccgcttttgggatatcaaatccaaatatttcacgtgccaatgtggttctgaaaagtgtaaacactctgctgaggctattgccttagagcagtctaggctagcgcgtttggatccacaccccgagctactgccagagttagggtctttgccacctgtgaatacttag

SEQ ID NO: 285523 - DNA, 3633 bp, Artificial Sequence
  derived and/or modified sequence
atggccgcagcggctggagcagcagctgccgcagcagccgagggcgaagcacccgcagaaatgggagccctgctgttagagaaggagacccgcggagctacagaacgcgtccatggttcccttggagatacaccaagatctgaggaaacattaccaaaagccaatcccgatagtctggaaccagctgggccttccagtcctgcgagcgtcacggtcacagtcggtgatgagggggctgatacaccggtcggcgctacccctcttatcggagatgaatccgaaaacctagaaggtgacggcgaccttcgcggagggaggatactcttaggccacgccaccaagtcgttcccaagtagcccgtctaagggcggtagctgccctagtagggctaagatgtcaatgactggagctggtaagagtccaccctccgttcaatctctggcaatgcgcttgctgtctatgcccggagcacagggcgcagctgccgcagggtccgagccgccacctgcaacaaccagccctgagggccagcctaaggtgcacagggcccgtaaaactatgtctaaaccaggcaatggtcagcctcctgttccagagaaacgtcctcccgaaatccagcactttcgaatgtcagacgacgtgcattccctggggaaggttacgtcggatctggctaaacgaagaaagctcaactcaggcggagggttgtccgaggagttagggtcagccaggcgctctggcgaggtgacattaaccaagggcgaccccggatccctagaggaatgggaaacagtagtcggggatgacttttctctatattacgattcttatagcgtcgatgagagggtcgactcagacagtaagagtgaggtggaggccttgacggagcagctgtccgaagaggaagaggaagaagaggaagaagaagaagaagaagaagaggaggaggaagaggaggaggaagaagaagacgaggaaagcggcaaccagagtgaccgcagtgggtcaagcgggagaaggaaggctaagaagaagtggcgtaaagactccccatgggtgaaacccagtcgtaagagacggaagagggagcctcccagggctaaggagccgcgaggcgtgaacggcgtgggaagctctggcccttcagaatatatggaagtgcccctcggcagcctcgagctgcccagtgaaggcaccctgtctccaaaccatgcaggtgtctccaatgacacttccagcttggagactgagcgcggttttgaggaactgccactgtgttcctgcagaatggaggctccaaagattgatcggatttcagagagggccggacacaagtgtatggccacagagagcgttgacggcgagctcagtggctgtaacgctgctatattaaagcgggaaacaatgaggccttccagcagagtcgcgctcatggtcttgtgcgagacacatcgggcacggatggtgaagcaccactgttgtcctgggtgtggctacttttgtacggctggcacttttctggaatgtcacccagactttagagtcgcccatcgattccacaaagcctgtgtgtcccagctaaatggcatggtgttctgccctcactgtggagaagatgctagtgaggctcaggaggtcacaatcccaaggggtgatggcgtgacacccccagccggtacagccgctccagccccaccccctctgagtcaagatgtccccggaagggctgataccagccagccttctgctcggatgcgaggtcacggcgaacccagacgtcctccttgtgacccgctggctgataccatcgattcaagcgggccatctctgacgctgcccaatggcggttgcctgagtgccgtgggtctgcctttaggcccaggaagagaagccttggagaaagcgctagtaattcaggagagtgagagaaggaaaaaacttaggtttcacccgagacaattatatctgagcgtaaagcagggggagctgcagaaggtcattctgatgcttctggataacctcgacccgaattttcagtctgaccagcagtccaaacggactcctctgcatgccgctgcacagaaaggcagtgttgagatttgtcatgtgttgctccaggccggagcaaacatcaatgcagttgacaaacaacaacgcaccccattaatggaggccgtggttaacaaccatctggaagttgctcgctatatggttcagcgaggagggtgcgtttatagtaaagaggaggacggatcaacatgtcttcaccatgccgctaagatcggcaacttggagatggtgtctctgctgttatccactggacaggtagacgtgaacgcccaggattcaggcggttggactccaataatttgggctgctgagcataaacacatcgaggtcattcgcatgctgttgacacggggtgctgatgtgactcttaccgacaatgaagagaatatttgcctgcattgggcatcattcaccgggagtgctgccatagcggaggttctgctcaatgccagatgtgacctccacgctgtgaattaccatggagacacccccctgcacatcgcagcccgagaatcctaccatgactgcgtcttgctgtttttgtcacgtggggctaatcccgagcttcgcaacaaggaaggagataccgcatgggatctgacccctgaacgcagtgatgtgtggttcgcgctgcaactgaacaggaagctaaggctgggcgtgggcaacagggccatcagaacagaaaaaatcatttgccgtgacgtggctcgaggttatgagaatgtgcccattccatgcgtgaatggagtggacggggaaccctgccctgaagactataagtatatctcggaaaactgtgagacctcaacgatgaatattgaccgcaatatcacccatctacaacactgcacatgcgttgatgactgttcctcatccaattgtctctgcggacaactgtctatccggtgctggtatgacaaagacggtcgcctgctgcaggagtttaacaaaatagaacctccccttattttcgaatgtaatcaggcgtgctcctgctggagaaattgcaaaaacagagttgtgcagtcaggaattaaggtccgccttcaactgtatcgcacggccaaaatgggttggggagtcagagccctccagaccatcccccagggaacatttatctgcgagtatgtcggcgagctgatctccgatgccgaggccgacgtgcgcgaagacgatagttacctgttcgatctggacaataaggacggtgaggtgtactgcattgacgcccgttactacggaaacataagccggttcattaaccacctctgcgaccctaatattattccggtgcgagtgttcatgcttcatcaagacctgagattccctcgaatagctttcttcagctcaagagacatccgaaccggcgaggagctcggcttcgattatggagaccggttctgggacatcaaatccaagtatttcacgtgtcagtgcggatccgaaaaatgtaagcacagcgcagaagctattgccctagagcagtcccggctggctagattggatcctcatcccgagctgctacccgaacttgggtctctgccacctgtcaatacttag

SEQ ID NO: 285524 - DNA, 3633 bp, Artificial Sequence
  derived and/or modified sequence
atggcagcagccgctggggctgcagctgcagccgctgccgagggtgaagcccctgccgaaatgggtgctttgttactggagaaagaaaccagaggcgcaacagaacgggtgcatgggagcctgggggataccccacggagtgaggaaacgctgcctaaggcgaatccagacagtctagagccagccggtccttctagtcctgccagtgtgacagtgacagttggggacgaaggagctgacacacctgtgggggctacccctctgatcggcgacgagagcgagaacctggaaggtgacggtgacctgagaggagggagaatcctgctcggccacgcaactaagagctttccaagtagcccgtctaagggcggatcttgtcccagcagggctaagatgtctatgacgggggctggaaagagtcccccaagcgtgcagtctctggctatgcgtttgctgagcatgcctggcgcacagggcgctgcagcagccggtagcgagccccctcccgctacgactagcccagagggacagccaaaagttcatcgggcacggaagaccatgagtaagccaggaaatgggcagccacccgttcctgaaaagagaccgccagaaattcagcattttcgcatgtcagatgatgttcactctcttggcaaagtgaccagcgacctagcaaagagaagaaaactcaactccggaggcggtctgagtgaagaactgggaagtgcccgtcgatctggcgaagtcactctcactaagggcgaccctggatccctcgaggagtgggagaccgtggtaggggacgacttttcactctactatgattcatactcagtggacgaacgagtggactccgattccaagtcagaagtggaagccctgactgagcagctttcagaagaggaggaggaggaggaggaggaagaggaggaagaagaggaggaagaagaggaggaggaggaggaggaagacgaggagagtgggaatcaaagcgataggagcggatcttccggcaggcggaaggctaaaaaaaagtggcgcaaagactccccatgggtaaagccctcgaggaaacggaggaaaagggagccgccaagagctaaggagccccgtggagtgaatggggtgggttcctcaggacccagcgaatacatggaggtgcctttgggatccctggagttgccgtccgaaggtaccttgtcccctaaccacgctggcgtaagcaacgataccagctcactagaaacagagagggggtttgaggagctgcctctttgttcctgtaggatggaagcacctaagatcgataggatcagtgaacgggctggacacaagtgcatggccaccgagagcgttgacggcgagctgagcgggtgtaatgccgctattttaaagagagagactatgaggccgagctccagggtcgcactgatggttctgtgtgagacacatagggcacgaatggtgaagcaccattgctgtccaggatgcggttacttttgcaccgctgggacattccttgagtgccaccccgacttccgagtggcacacaggttccataaggcatgcgtcagccagctgaatgggatggttttttgcccccattgtggtgaagacgcttcagaagctcaggaggtcacaatcccacgaggagatggggtgacacccccagctggaactgcagccccagctccacccccattgagccaagatgtccccggtagggccgacacttcacagcctagtgcacggatgcgaggacacggcgagccccgaagacctccttgcgatccgctggccgatactatcgattccagcggcccatccttgacactccccaatggaggatgtttaagtgccgtcgggttacccctcggacctggcagagaggcgttggaaaaggcgcttgtgattcaggaaagcgagcggaggaagaagcttcgttttcaccccagacaactctacctctctgtgaaacagggcgaacttcagaaagtcattctgatgctgctcgataacttggacccaaattttcagtcggatcagcaatctaagcgaaccccacttcacgctgcagcgcagaagggctctgttgagatctgccatgttctcctgcaggccggagcgaacatcaacgcagtagataaacaacagcgcactccactcatggaagctgtcgttaacaatcatctcgaggttgctagatatatggttcaaaggggcggatgtgtgtactctaaggaggaggacgggtctacctgtctgcaccacgctgccaaaatcgggaacctcgagatggtctcactgctactttccacgggccaggtcgacgtcaatgcgcaagactcaggaggatggacaccaatcatctgggccgcagagcacaagcacatagaagtgattaggatgcttctgacgcgcggagcagacgtgacgcttaccgataatgaggaaaacatctgccttcactgggcatcctttacaggctccgccgcaatcgccgaggtgctgttgaacgccaggtgtgatttgcatgcagtgaactatcacggggatactcctctgcacatcgcagctcgggaatcatatcatgattgcgtgctcctgtttttgtcaaggggtgccaaccctgagctccgaaataaggagggtgacaccgcttgggaccttacgcccgagaggtccgatgtctggtttgcccttcagctaaatagaaagcttcgcctgggggtcggaaacagagctattagaactgaaaagatcatctgcagggatgtcgcacggggatatgagaatgttccaatcccctgtgtcaatggcgtagatggggaaccatgccctgaggattacaaatatatttctgagaactgcgaaaccagcacaatgaacattgacagaaacatcactcatctacagcactgcacctgcgtggacgattgctcgtcctccaattgcctgtgtggccagttgagcatcagatgttggtacgataaggatggcaggctactgcaagagttcaataagatcgagccccctctcatatttgagtgcaaccaggcttgctcctgctggagaaattgcaagaatagagtggtacagagcggtattaaggtccggttacagctgtatagaactgctaaaatgggctggggagtccgcgctctacagactatcccacaaggcacttttatctgcgagtatgtaggtgaactgatctctgacgcagaggcggacgtaagggaggatgacagctatctttttgaccttgataacaaagacggagaagtatactgcatcgacgcaaggtactacggcaacatcagtagatttattaaccacctgtgtgatccgaacatcatcccagttcgtgtgtttatgctgcaccaggacttgaggttccccaggatcgcttttttctcatcccgcgatattagaaccggtgaggaattgggcttcgactatggtgacagattttgggacattaagagcaagtattttacctgtcaatgcgggtcagaaaagtgcaaacactccgccgaggcaattgcactggaacaatcacgactggccagactggatcctcaccccgagcttctacccgagctcgggtcactgcctcccgtgaatacgtag

SEQ ID NO: 285525 - DNA, 3804 bp, Artificial Sequence
  derived and/or modified sequence
atgcgcggtctacctcgcggtcgtggcctcatgagggctcggggaaggggcagggcagcacctcctggtagccgcggtcgagggcgtggagggccacacagaggacggggtcggcctaggagtttgctctcactccctagagcacaagccagctggacgcctcagctgtcgacaggcctgacttctcctcctgtgccttgcttgccatcacaaggtgaggcacccgcagagatgggggctctgttgctggagaaggagacccgcggagcaactgaaagagtccacgggtcgttgggagacacccctcgtagtgaggaaacactgcctaaggccaaccctgactcactggaaccggcaggaccatcgtcccccgcatcagtcacagtgaccgttggtgacgaaggagcagacactcctgtcggggcaacaccactcatcggggatgagagtgagaatctcgaaggtgacggggacctgcgcggtggtaggattttactagggcacgccacaaagtctttcccctcatccccgagtaaaggtggatcatgcccttcaagggctaaaatgtctatgactggggctggaaaatcaccccctagcgttcagagtttggctatgagattactgtctatgcctggagcccaaggtgcagctgccgctgggtctgagccacctcctgccacaacatctcctgaaggccagccaaaagtccatcgggcacggaaaaccatgtccaagcctggtaacggacaacctccagttccagaaaagagaccacccgagatacaacactttagaatgtcagatgatgttcacagcctgggaaaggtaaccagcgacctggcgaagaggagaaaattaaactccggtggaggtctctcggaggaattgggctctgcgcgtcggagcggcgaggtgaccctgaccaaaggtgacccaggatctttagaagaatgggaaactgttgttggagacgattttagcctctactatgacagttactctgtggacgagcgggtcgactccgattcaaagtcggaggtggaggctcttaccgagcaactctctgaggaggaggaggaagaagaggaagaggaggaagaggaggaggaggaggaagaggaagaggaggaggaagaggatgaagaatcgggcaatcaaagtgacaggtccggcagctcaggaagacgaaaggctaaaaaaaaatggaggaaggacagcccttgggtgaaacccagtcgcaagaggcggaaaagagaaccaccaagggccaaagaaccacgcggtgtaaatggcgtgggctctagtgggcctagcgaatacatggaggtgcccctggggagcctagaactcccgtccgaggggaccctgagtccgaatcacgctggagtgtcaaacgataccagctcactggaaacagaacggggatttgaggagcttccactgtgtagctgtagaatggaagcgcctaagattgatcgcattagcgagcgggctggccataaatgtatggcaaccgagtccgtggatggagagctgtccggctgtaacgctgcgatcctgaagagagagaccatgcgcccatctagccgcgtggccctcatggtgttgtgcgagactcaccgggctagaatggtaaagcaccattgctgtccaggttgtggatacttctgcactgcagggacatttctcgaatgccaccccgacttcagggtggctcaccgtttccacaaggcctgcgtctcccagctgaatgggatggttttttgccctcattgtggcgaggacgccagcgaagcccaggaggttactatacccagaggggacggagtcactcccccagcgggtaccgctgctccggctccccctcctctcagccaggatgtaccaggaagagccgacacctcacagcctagcgccaggatgcgaggccacggagagccacggagaccgccatgcgatcccctggcagacactatcgattccagcggtcccagccttacgctacctaacggcggttgcctcagcgccgttggcctgccacttggaccgggacgggaggctttggagaaagcactggtaattcaagagtcagagagaaggaagaaattaagattccaccccaggcagctctacctaagcgtcaagcagggcgagctgcagaaagtgattttgatgcttttggataacctggaccccaactttcagtcagaccagcaatccaaacggaccccattacatgctgcagcgcagaaaggttctgttgaaatttgccatgttctactgcaggccggagcgaacataaatgccgtcgataagcagcaacgcacaccgctaatggaagctgttgtgaacaaccacctggaagttgctagatacatggttcagcggggtggttgcgtatacagcaaggaggaagacggtagcacctgtctgcaccatgcagccaagatcggtaatttagagatggtctctctgttacttagtactggacaggtggacgtcaacgcccaggacagcgggggttggacccccatcatttgggctgccgaacacaaacacattgaggtcataagaatgttactcacacggggagcagatgtgaccctgactgataacgaggaaaacatctgtttgcactgggcttctttcaccggctctgcggctatcgcagaagtgctactgaacgccagatgcgatctgcatgccgtgaactatcatggggatacccccctccacatcgccgcaagggaatcatatcatgactgtgttctgctgttccttagtagaggcgctaatccggagctccgaaacaaggagggagacacagcttgggatttaacaccagagcgtagtgacgtgtggtttgctctgcagctgaataggaaactgaggctgggagtagggaacagggcgatccgcaccgaaaagattatatgccgtgatgtggctcgcggttatgaaaatgtgcctattccttgcgtgaatggagtggatggagaaccctgccccgaggactacaaatatatttcggaaaactgtgaaactagcacaatgaacattgacagaaacattactcacttgcagcattgtacatgcgtcgacgattgtagttcaagcaattgcctgtgcggtcaattatccattaggtgttggtacgacaaggatggccgactgttgcaggagttcaacaaaatcgagccaccactgattttcgagtgcaatcaggcctgctcatgttggagaaattgcaaaaaccgagtggtccagagcggaattaaggtgaggttgcagctctatcggaccgctaagatggggtggggtgtaagggcgttgcagaccatcccacagggcacattcatttgcgagtatgtgggggaactgatctctgacgcagaagccgatgtgagggaggacgattcttacttgtttgacctggacaacaaagacggagaggtgtattgcatcgacgctagatattacggcaacatttcgcgtttcatcaatcacttgtgcgatccaaatatcatcccagtgcgagtgttcatgctccaccaagaccttaggtttcccagaatcgcattcttttctagccgcgacattcggacgggcgaggagttaggctttgattatggcgaccgtttttgggacatcaaatcaaaatacttcacctgtcagtgtggctccgaaaaatgcaagcatagtgctgaggccatcgcactcgaacagagccgactagccaggctcgatccccatccggagctgctgccggaactcggttcactgccacctgttaatacttag

SEQ ID NO: 285526 - DNA, 3804 bp, Artificial Sequence
  derived and/or modified sequence
atgagaggcctgcccagaggcagaggcctgatgagagccagaggcagaggcagagccgccccccccggcagcagaggcagaggcagaggcggcccccacagaggcagaggcagacccagaagcctgctgagcctgcccagagcccaggccagctggaccccccagctgagcaccggcctgaccagcccccccgtgccctgcctgcccagccagggcgaggcccccgccgagatgggcgccctgctgctggagaaggagaccagaggcgccaccgagagagtgcacggcagcctgggcgacacccccagaagcgaggagaccctgcccaaggccaaccccgacagcctggagcccgccggccccagcagccccgccagcgtgaccgtgaccgtgggcgacgagggcgccgacacccccgtgggcgccacccccctgatcggcgacgagagcgagaacctggagggcgacggcgacctgagaggcggcagaatcctgctgggccacgccaccaagagcttccccagcagccccagcaagggcggcagctgccccagcagagccaagatgagcatgaccggcgccggcaagagcccccccagcgtgcagagcctggccatgagactgctgagcatgcccggcgcccagggcgccgccgccgccggcagcgagcccccccccgccaccaccagccccgagggccagcccaaggtgcacagagccagaaagaccatgagcaagcccggcaacggccagccccccgtgcccgagaagagaccccccgagatccagcacttcagaatgagcgacgacgtgcacagcctgggcaaggtgaccagcgacctggccaagagaagaaagctgaacagcggcggcggcctgagcgaggagctgggcagcgccagaagaagcggcgaggtgaccctgaccaagggcgaccccggcagcctggaggagtgggagaccgtggtgggcgacgacttcagcctgtactacgacagctacagcgtggacgagagagtggacagcgacagcaagagcgaggtggaggccctgaccgagcagctgagcgaggaggaggaggaggaggaggaggaggaggaggaggaggaggaggaggaggaggaggaggaggaggaggaggacgaggagagcggcaaccagagcgacagaagcggcagcagcggcagaagaaaggccaagaagaagtggagaaaggacagcccctgggtgaagcccagcagaaagagaagaaagagagagccccccagagccaaggagcccagaggcgtgaacggcgtgggcagcagcggccccagcgagtacatggaggtgcccctgggcagcctggagctgcccagcgagggcaccctgagccccaaccacgccggcgtgagcaacgacaccagcagcctggagaccgagagaggcttcgaggagctgcccctgtgcagctgcagaatggaggcccccaagatcgacagaatcagcgagagagccggccacaagtgcatggccaccgagagcgtggacggcgagctgagcggctgcaacgccgccatcctgaagagagagaccatgagacccagcagcagagtggccctgatggtgctgtgcgagacccacagagccagaatggtgaagcaccactgctgccccggctgcggctacttctgcaccgccggcaccttcctggagtgccaccccgacttcagagtggcccacagattccacaaggcctgcgtgagccagctgaacggcatggtgttctgcccccactgcggcgaggacgccagcgaggcccaggaggtgaccatccccagaggcgacggcgtgaccccccccgccggcaccgccgcccccgcccccccccccctgagccaggacgtgcccggcagagccgacaccagccagcccagcgccagaatgagaggccacggcgagcccagaagacccccctgcgaccccctggccgacaccatcgacagcagcggccccagcctgaccctgcccaacggcggctgcctgagcgccgtgggcctgcccctgggccccggcagagaggccctggagaaggccctggtgatccaggagagcgagagaagaaagaagctgagattccaccccagacagctgtacctgagcgtgaagcagggcgagctgcagaaggtgatcctgatgctgctggacaacctggaccccaacttccagagcgaccagcagagcaagagaacccccctgcacgccgccgcccagaagggcagcgtggagatctgccacgtgctgctgcaggccggcgccaacatcaacgccgtggacaagcagcagagaacccccctgatggaggccgtggtgaacaaccacctggaggtggccagatacatggtgcagagaggcggctgcgtgtacagcaaggaggaggacggcagcacctgcctgcaccacgccgccaagatcggcaacctggagatggtgagcctgctgctgagcaccggccaggtggacgtgaacgcccaggacagcggcggctggacccccatcatctgggccgccgagcacaagcacatcgaggtgatcagaatgctgctgaccagaggcgccgacgtgaccctgaccgacaacgaggagaacatctgcctgcactgggccagcttcaccggcagcgccgccatcgccgaggtgctgctgaacgccagatgcgacctgcacgccgtgaactaccacggcgacacccccctgcacatcgccgccagagagagctaccacgactgcgtgctgctgttcctgagcagaggcgccaaccccgagctgagaaacaaggagggcgacaccgcctgggacctgacccccgagagaagcgacgtgtggttcgccctgcagctgaacagaaagctgagactgggcgtgggcaacagagccatcagaaccgagaagatcatctgcagagacgtggccagaggctacgagaacgtgcccatcccctgcgtgaacggcgtggacggcgagccctgccccgaggactacaagtacatcagcgagaactgcgagaccagcaccatgaacatcgacagaaacatcacccacctgcagcactgcacctgcgtggacgactgcagcagcagcaactgcctgtgcggccagctgagcatcagatgctggtacgacaaggacggcagactgctgcaggagttcaacaagatcgagccccccctgatcttcgagtgcaaccaggcctgcagctgctggagaaactgcaagaacagagtggtgcagagcggcatcaaggtgagactgcagctgtacagaaccgccaagatgggctggggcgtgagagccctgcagaccatcccccagggcaccttcatctgcgagtacgtgggcgagctgatcagcgacgccgaggccgacgtgagagaggacgacagctacctgttcgacctggacaacaaggacggcgaggtgtactgcatcgacgccagatactacggcaacatcagcagattcatcaaccacctgtgcgaccccaacatcatccccgtgagagtgttcatgctgcaccaggacctgagattccccagaatcgccttcttcagcagcagagacatcagaaccggcgaggagctgggcttcgactacggcgacagattctgggacatcaagagcaagtacttcacctgccagtgcggcagcgagaagtgcaagcacagcgccgaggccatcgccctggagcagagcagactggccagactggacccccaccccgagctgctgcccgagctgggcagcctgccccccgtgaacacctag

SEQ ID NO: 285527 - DNA, 3633 bp, Artificial Sequence
  derived and/or modified sequence
atggccgccgccgccggcgccgccgccgccgccgccgccgagggcgaggcccccgccgagatgggcgccctgctgctggagaaggagaccagaggcgccaccgagagagtgcacggcagcctgggcgacacccccagaagcgaggagaccctgcccaaggccaaccccgacagcctggagcccgccggccccagcagccccgccagcgtgaccgtgaccgtgggcgacgagggcgccgacacccccgtgggcgccacccccctgatcggcgacgagagcgagaacctggagggcgacggcgacctgagaggcggcagaatcctgctgggccacgccaccaagagcttccccagcagccccagcaagggcggcagctgccccagcagagccaagatgagcatgaccggcgccggcaagagcccccccagcgtgcagagcctggccatgagactgctgagcatgcccggcgcccagggcgccgccgccgccggcagcgagcccccccccgccaccaccagccccgagggccagcccaaggtgcacagagccagaaagaccatgagcaagcccggcaacggccagccccccgtgcccgagaagagaccccccgagatccagcacttcagaatgagcgacgacgtgcacagcctgggcaaggtgaccagcgacctggccaagagaagaaagctgaacagcggcggcggcctgagcgaggagctgggcagcgccagaagaagcggcgaggtgaccctgaccaagggcgaccccggcagcctggaggagtgggagaccgtggtgggcgacgacttcagcctgtactacgacagctacagcgtggacgagagagtggacagcgacagcaagagcgaggtggaggccctgaccgagcagctgagcgaggaggaggaggaggaggaggaggaggaggaggaggaggaggaggaggaggaggaggaggaggaggaggaggacgaggagagcggcaaccagagcgacagaagcggcagcagcggcagaagaaaggccaagaagaagtggagaaaggacagcccctgggtgaagcccagcagaaagagaagaaagagagagccccccagagccaaggagcccagaggcgtgaacggcgtgggcagcagcggccccagcgagtacatggaggtgcccctgggcagcctggagctgcccagcgagggcaccctgagccccaaccacgccggcgtgagcaacgacaccagcagcctggagaccgagagaggcttcgaggagctgcccctgtgcagctgcagaatggaggcccccaagatcgacagaatcagcgagagagccggccacaagtgcatggccaccgagagcgtggacggcgagctgagcggctgcaacgccgccatcctgaagagagagaccatgagacccagcagcagagtggccctgatggtgctgtgcgagacccacagagccagaatggtgaagcaccactgctgccccggctgcggctacttctgcaccgccggcaccttcctggagtgccaccccgacttcagagtggcccacagattccacaaggcctgcgtgagccagctgaacggcatggtgttctgcccccactgcggcgaggacgccagcgaggcccaggaggtgaccatccccagaggcgacggcgtgaccccccccgccggcaccgccgcccccgcccccccccccctgagccaggacgtgcccggcagagccgacaccagccagcccagcgccagaatgagaggccacggcgagcccagaagacccccctgcgaccccctggccgacaccatcgacagcagcggccccagcctgaccctgcccaacggcggctgcctgagcgccgtgggcctgcccctgggccccggcagagaggccctggagaaggccctggtgatccaggagagcgagagaagaaagaagctgagattccaccccagacagctgtacctgagcgtgaagcagggcgagctgcagaaggtgatcctgatgctgctggacaacctggaccccaacttccagagcgaccagcagagcaagagaacccccctgcacgccgccgcccagaagggcagcgtggagatctgccacgtgctgctgcaggccggcgccaacatcaacgccgtggacaagcagcagagaacccccctgatggaggccgtggtgaacaaccacctggaggtggccagatacatggtgcagagaggcggctgcgtgtacagcaaggaggaggacggcagcacctgcctgcaccacgccgccaagatcggcaacctggagatggtgagcctgctgctgagcaccggccaggtggacgtgaacgcccaggacagcggcggctggacccccatcatctgggccgccgagcacaagcacatcgaggtgatcagaatgctgctgaccagaggcgccgacgtgaccctgaccgacaacgaggagaacatctgcctgcactgggccagcttcaccggcagcgccgccatcgccgaggtgctgctgaacgccagatgcgacctgcacgccgtgaactaccacggcgacacccccctgcacatcgccgccagagagagctaccacgactgcgtgctgctgttcctgagcagaggcgccaaccccgagctgagaaacaaggagggcgacaccgcctgggacctgacccccgagagaagcgacgtgtggttcgccctgcagctgaacagaaagctgagactgggcgtgggcaacagagccatcagaaccgagaagatcatctgcagagacgtggccagaggctacgagaacgtgcccatcccctgcgtgaacggcgtggacggcgagccctgccccgaggactacaagtacatcagcgagaactgcgagaccagcaccatgaacatcgacagaaacatcacccacctgcagcactgcacctgcgtggacgactgcagcagcagcaactgcctgtgcggccagctgagcatcagatgctggtacgacaaggacggcagactgctgcaggagttcaacaagatcgagccccccctgatcttcgagtgcaaccaggcctgcagctgctggagaaactgcaagaacagagtggtgcagagcggcatcaaggtgagactgcagctgtacagaaccgccaagatgggctggggcgtgagagccctgcagaccatcccccagggcaccttcatctgcgagtacgtgggcgagctgatcagcgacgccgaggccgacgtgagagaggacgacagctacctgttcgacctggacaacaaggacggcgaggtgtactgcatcgacgccagatactacggcaacatcagcagattcatcaaccacctgtgcgaccccaacatcatccccgtgagagtgttcatgctgcaccaggacctgagattccccagaatcgccttcttcagcagcagagacatcagaaccggcgaggagctgggcttcgactacggcgacagattctgggacatcaagagcaagtacttcacctgccagtgcggcagcgagaagtgcaagcacagcgccgaggccatcgccctggagcagagcagactggccagactggacccccaccccgagctgctgcccgagctgggcagcctgccccccgtgaacacctag

SEQ ID NO: 285528 - DNA, 4129 bp, Artificial Sequence
  derived and/or modified sequence
atgcggggtctaccgagagggagggggttgatgcgggcccgggggaggggtcgtgcggcccctccgggcagccgaggccgcggaaggggggggccccacagaggaagaggtaggccccggagcctactctctcttcccagggcccaggcatcctggaccccccaactctctactgggctgaccagccctcctgtcccttgtctcccctcccagggggaggcccccgctgagatgggggcgctgctgctggagaaggaaaccagaggagccaccgagagagttcatggctctttgggggacacccctcgtagtgaagaaaccctgcccaaggccaaccccgactccctggagcctgctggcccctcatctccagcctctgtcactgtcactgttggtgatgagggggctgacacccctgtaggggctacaccactcattggggatgaatctgagaatcttgagggagatggggacctccgtgggggccggatcctgctgggccatgccacaaagtcattcccctcttcccccagcaaggggggttcctgtcctagccgggccaagatgtcaatgacaggggcgggaaaatcacctccatctgtccagagtttggctatgaggctactgagtatgccaggagcccagggagctgcagcagcagggtctgaaccccctccagccaccacgagcccagagggacagcccaaggtccaccgagcccgcaaaaccatgtccaaaccaggaaatggacagcccccggtccctgagaagcggccccctgaaatacagcatttccgcatgagtgatgatgtccactcactgggaaaggtgacctcagatctggccaaaaggaggaagctgaactcaggaggtggcctgtcggaggagttaggttctgcccggcgttcaggagaagtgaccctgacgaaaggggaccccgggtccctggaggagtgggagacggtggtgggtgatgacttcagtctctactatgattcctactctgtggatgagcgcgtggactccgacagcaagtctgaagttgaagctctaactgaacaactaagtgaagaggaggaggaggaagaggaggaagaagaagaagaggaagaggaggaggaagaggaagaagaagaggaagatgaggagtcagggaatcagtcagataggagtggttccagtggccggcgcaaggccaagaagaaatggcgaaaagacagcccatgggtgaagccgtctcggaaacggcgcaagcgggagcctccgcgggccaaggagccacgaggagtgaatggtgtgggctcctcaggccccagtgagtacatggaggtccctctggggtccctggagctgcccagcgaggggaccctctcccccaaccacgctggggtgtccaatgacacatcttcgctggagacagagcgagggtttgaggagttgcccctgtgcagctgccgcatggaggcacccaagattgaccgcatcagcgagagggcggggcacaagtgcatggccactgagagtgtggacggagagctgtcaggctgcaatgccgccatcctcaagcgggagaccatgaggccatccagccgtgtggccctgatggtgctctgtgagacccaccgcgcccgcatggtcaaacaccactgctgcccgggctgcggctacttctgcacggcgggcaccttcctggagtgccaccctgacttccgtgtggcccaccgcttccacaaggcctgtgtgtctcagctgaatgggatggtcttctgtccccactgtggggaggatgcttctgaagctcaagaggtgaccatcccccggggtgacggggtgaccccaccggccggcactgcagctcctgcacccccacccctgtcccaggatgtccccgggagagcagacacttctcagcccagtgcccggatgcgagggcatggggaaccccggcgcccgccctgcgatcccctggctgacaccattgacagctcagggccctccctgaccctgcccaatgggggctgcctttcagccgtggggctgccactggggccaggccgggaggccctggaaaaggccctggtcatccaggagtcagagaggcggaagaagctccgtttccaccctcggcagttgtacctgtccgtgaagcagggcgagctgcagaaggtgatcctgatgctgttggacaacctggaccccaacttccagagcgaccagcagagcaagcgcacgcccctgcatgcagccgcccagaagggctccgtggagatctgccatgtgctgctgcaggctggagccaacataaatgcagtggacaaacagcagcggacgccactgatggaggccgtggtgaacaaccacctggaggtagcccgttacatggtgcagcgtggtggctgtgtctatagcaaggaggaggacggttccacctgcctccaccacgcagccaaaatcgggaacttggagatggtcagcctgctgctgagcacaggacaggtggacgtcaacgcccaggacagtggggggtggacgcccatcatctgggctgcagagcacaagcacatcgaggtgatccgcatgctactgacgcggggcgccgacgtcaccctcactgacaacgaggagaacatctgcctgcactgggcctccttcacgggcagcgccgccatcgccgaagtccttctgaatgcgcgctgtgacctccatgctgtcaactaccatggggacacccccctgcacatcgcagctcgggagagctaccatgactgcgtgctgttattcctgtcacgtggggccaaccctgagctgcggaacaaagagggggacacagcatgggacctgactcccgagcgctccgacgtgtggtttgcgcttcaactcaaccgcaagctccgacttggggtgggaaatcgggccatccgcacagagaagatcatctgccgggacgtggctcggggctatgagaacgtgcccattccctgtgtcaacggtgtggatggggagccctgccctgaggattacaagtacatctcagagaactgcgagacgtccaccatgaacatcgatcgcaacatcacccacctgcagcactgcacgtgtgtggacgactgctctagctccaactgcctgtgcggccagctcagcatccggtgctggtatgacaaggatgggcgattgctccaggaatttaacaagattgagcctccgctgattttcgagtgtaaccaggcgtgctcatgctggagaaactgcaagaaccgggtcgtacagagtggcatcaaggtgcggctacagctctaccgaacagccaagatgggctggggggtccgcgccctgcagaccatcccacaggggaccttcatctgcgagtatgtcggggagctgatctctgatgctgaggctgatgtgagagaggatgattcttacctcttcgacttagacaacaaggatggagaggtgtactgcatagatgcccgttactatggcaacatcagccgcttcatcaaccacctgtgtgaccccaacatcattcccgtccgggtcttcatgctgcaccaagacctgcgatttccacgcatcgccttcttcagttcccgagacatccggactggggaggagctagggtttgactatggcgaccgcttctgggacatcaaaagcaaatatttcacctgccaatgtggctctgagaagtgcaagcactcagccgaagccattgccctggagcagagccgtctggcccgcctggacccacaccctgagctgctgcccgagctcggctccctgccccctgtcaacacatgagaacggaccacaccctctctccccagcatggatggccacagctcagccgcctcctctgccaccagctgctcgcagcccatgcctgggggtgctgccatcttctctccccaccaccctttcacacattcctgaccagagatcccagccaggccctggaggtctgacagcccctccctcccagagctggttcctccctgggagggcaacttcagggctggccaccccccgtgttccccatcctcagttgaagtttgatgaattgaagtcgggcctctatgccaactggttccttttgttctcaataaatgttgggtttggtaataaa

SEQ ID NO: 285529 - DNA, 3965 bp, Artificial Sequence
  derived and/or modified sequence
agcggcgatggcggcggcggcgggagctgcagcggcggcggccgccgagggggaggcccccgctgagatgggggcgctgctgctggagaaggaaaccagaggagccaccgagagagttcatggctctttgggggacacccctcgtagtgaagaaaccctgcccaaggccaaccccgactccctggagcctgctggcccctcatctccagcctctgtcactgtcactgttggtgatgagggggctgacacccctgtaggggctacaccactcattggggatgaatctgagaatcttgagggagatggggacctccgtgggggccggatcctgctgggccatgccacaaagtcattcccctcttcccccagcaaggggggttcctgtcctagccgggccaagatgtcaatgacaggggcgggaaaatcacctccatctgtccagagtttggctatgaggctactgagtatgccaggagcccagggagctgcagcagcagggtctgaaccccctccagccaccacgagcccagagggacagcccaaggtccaccgagcccgcaaaaccatgtccaaaccaggaaatggacagcccccggtccctgagaagcggccccctgaaatacagcatttccgcatgagtgatgatgtccactcactgggaaaggtgacctcagatctggccaaaaggaggaagctgaactcaggaggtggcctgtcggaggagttaggttctgcccggcgttcaggagaagtgaccctgacgaaaggggaccccgggtccctggaggagtgggagacggtggtgggtgatgacttcagtctctactatgattcctactctgtggatgagcgcgtggactccgacagcaagtctgaagttgaagctctaactgaacaactaagtgaagaggaggaggaggaagaggaggaagaagaagaagaggaagaggaggaggaagaggaagaagaagaggaagatgaggagtcagggaatcagtcagataggagtggttccagtggccggcgcaaggccaagaagaaatggcgaaaagacagcccatgggtgaagccgtctcggaaacggcgcaagcgggagcctccgcgggccaaggagccacgaggagtgaatggtgtgggctcctcaggccccagtgagtacatggaggtccctctggggtccctggagctgcccagcgaggggaccctctcccccaaccacgctggggtgtccaatgacacatcttcgctggagacagagcgagggtttgaggagttgcccctgtgcagctgccgcatggaggcacccaagattgaccgcatcagcgagagggcggggcacaagtgcatggccactgagagtgtggacggagagctgtcaggctgcaatgccgccatcctcaagcgggagaccatgaggccatccagccgtgtggccctgatggtgctctgtgagacccaccgcgcccgcatggtcaaacaccactgctgcccgggctgcggctacttctgcacggcgggcaccttcctggagtgccaccctgacttccgtgtggcccaccgcttccacaaggcctgtgtgtctcagctgaatgggatggtcttctgtccccactgtggggaggatgcttctgaagctcaagaggtgaccatcccccggggtgacggggtgaccccaccggccggcactgcagctcctgcacccccacccctgtcccaggatgtccccgggagagcagacacttctcagcccagtgcccggatgcgagggcatggggaaccccggcgcccgccctgcgatcccctggctgacaccattgacagctcagggccctccctgaccctgcccaatgggggctgcctttcagccgtggggctgccactggggccaggccgggaggccctggaaaaggccctggtcatccaggagtcagagaggcggaagaagctccgtttccaccctcggcagttgtacctgtccgtgaagcagggcgagctgcagaaggtgatcctgatgctgttggacaacctggaccccaacttccagagcgaccagcagagcaagcgcacgcccctgcatgcagccgcccagaagggctccgtggagatctgccatgtgctgctgcaggctggagccaacataaatgcagtggacaaacagcagcggacgccactgatggaggccgtggtgaacaaccacctggaggtagcccgttacatggtgcagcgtggtggctgtgtctatagcaaggaggaggacggttccacctgcctccaccacgcagccaaaatcgggaacttggagatggtcagcctgctgctgagcacaggacaggtggacgtcaacgcccaggacagtggggggtggacgcccatcatctgggctgcagagcacaagcacatcgaggtgatccgcatgctactgacgcggggcgccgacgtcaccctcactgacaacgaggagaacatctgcctgcactgggcctccttcacgggcagcgccgccatcgccgaagtccttctgaatgcgcgctgtgacctccatgctgtcaactaccatggggacacccccctgcacatcgcagctcgggagagctaccatgactgcgtgctgttattcctgtcacgtggggccaaccctgagctgcggaacaaagagggggacacagcatgggacctgactcccgagcgctccgacgtgtggtttgcgcttcaactcaaccgcaagctccgacttggggtgggaaatcgggccatccgcacagagaagatcatctgccgggacgtggctcggggctatgagaacgtgcccattccctgtgtcaacggtgtggatggggagccctgccctgaggattacaagtacatctcagagaactgcgagacgtccaccatgaacatcgatcgcaacatcacccacctgcagcactgcacgtgtgtggacgactgctctagctccaactgcctgtgcggccagctcagcatccggtgctggtatgacaaggatgggcgattgctccaggaatttaacaagattgagcctccgctgattttcgagtgtaaccaggcgtgctcatgctggagaaactgcaagaaccgggtcgtacagagtggcatcaaggtgcggctacagctctaccgaacagccaagatgggctggggggtccgcgccctgcagaccatcccacaggggaccttcatctgcgagtatgtcggggagctgatctctgatgctgaggctgatgtgagagaggatgattcttacctcttcgacttagacaacaaggatggagaggtgtactgcatagatgcccgttactatggcaacatcagccgcttcatcaaccacctgtgtgaccccaacatcattcccgtccgggtcttcatgctgcaccaagacctgcgatttccacgcatcgccttcttcagttcccgagacatccggactggggaggagctagggtttgactatggcgaccgcttctgggacatcaaaagcaaatatttcacctgccaatgtggctctgagaagtgcaagcactcagccgaagccattgccctggagcagagccgtctggcccgcctggacccacaccctgagctgctgcccgagctcggctccctgccccctgtcaacacatgagaacggaccacaccctctctccccagcatggatggccacagctcagccgcctcctctgccaccagctgctcgcagcccatgcctgggggtgctgccatcttctctccccaccaccctttcacacattcctgaccagagatcccagccaggccctggaggtctgacagcccctccctcccagagctggttcctccctgggagggcaacttcagggctggccaccccccgtgttccccatcctcagttgaagtttgatgaattgaagtcgggcctctatgccaactggttccttttgttctcaataaatgttgggtttggtaataaa

SEQ ID NO: 285530 - DNA, 1926 bp, Artificial Sequence
  derived and/or modified sequence
atggccaccgccaagggcatcgccatcggcatcgacctgggcaccacctacagctgcgtgggcgtgttccagcacggcaaggtggagatcatcgccaacgaccagggcaacagaaccacccccagctacgtggccttcaccgacaccgagagactgatcggcgacgccgccaagaaccaggtggccatgaacccccagaacaccgtgttcgacgccaagagactgatcggcagaaagttcaacgaccccgtggtgcaggccgacatgaagctgtggcccttccaggtgatcaacgagggcggcaagcccaaggtgctggtgagctacaagggcgagaacaaggccttctaccccgaggagatcagcagcatggtgctgaccaagctgaaggagaccgccgaggccttcctgggccaccccgtgaccaacgccgtgatcaccgtgcccgcctacttcaacgacagccagagacaggccaccaaggacgccggcgtgatcgccggcctgaacgtgctgagaatcatcaacgagcccaccgccgccgccatcgcctacggcctggacaagggcggccagggcgagagacacgtgctgatcttcgacctgggcggcggcaccttcgacgtgagcatcctgaccatcgacgacggcatcttcgaggtgaaggccaccgccggcgacacccacctgggcggcgaggacttcgacaacagactggtgagccacttcgtggaggagttcaagagaaagcacaagaaggacatcagccagaacaagagagccgtgagaagactgagaaccgcctgcgagagagccaagagaaccctgagcagcagcacccaggccaacctggagatcgacagcctgtacgagggcatcgacttctacaccagcatcaccagagccagattcgaggagctgtgcgccgacctgttcagaggcaccctggagcccgtggagaaggccctgagagacgccaagatggacaaggccaagatccacgacatcgtgctggtgggcggcagcaccagaatccccaaggtgcagagactgctgcaggactacttcaacggcagagacctgaacaagagcatcaaccccgacgaggccgtggcctacggcgccgccgtgcaggccgccatcctgatgggcgacaagagcgagaaggtgcaggacctgctgctgctggacgtggcccccctgagcctgggcctggagaccgccggcggcgtgatgaccgccctgatcaagagaaacagcaccatccccaccaagcagacccagatcttcaccacctacagcgacaaccagcccggcgtgctgatccaggtgtacgagggcgagagagccatgaccaaggacaacaacctgctgggcagattcgacctgaccggcatcccccccgcccccagaggcgtgccccagatcgaggtgaccttcgacatcgacgccaacggcatcctgaacgtgaccgccatggacaagagcaccggcaaggtgaacaagatcaccatcaccaacgacaagggcagactgagcaaggaggagatcgagagaatggtgctggacgccgagaagtacaaggccgaggacgaggtgcagagagagaagatcgccgccaagaacgccctggagagctacgccttcaacatgaagagcgtggtgagcgacgagggcctgaagggcaagatcagcgagagcgacaagaacaagatcctggacaagtgcaacgagctgctgagctggctggaggtgaaccagctggccgagaaggacgagttcgaccacaagagaaaggagctgaagcagatgtgcaaccccatcatcaccaagctgtaccagggcggctgcaccggccccgcctgcggcaccggctacgtgcccggcagacccgccaccggccccaccatcgaggaggtggactag

SEQ ID NO: 285531 - DNA, 1926 bp, Artificial Sequence
  derived and/or modified sequence
atggcaacggctaaaggcattgcaattggcattgatctgggaaccacgtattcttgtgtgggcgtgttccagcatggcaaggtggaaattatcgccaatgatcagggcaaccggaccaccccctcttatgtggctttcacagacactgaaagactcataggagacgcagccaaaaatcaggtagccatgaatccgcaaaacacggtatttgacgcgaagaggctgattggccggaagttcaacgacccggtggtgcaggctgacatgaaactctggccctttcaggtcattaacgagggaggaaagccaaaggtgctggtcagctataaaggcgagaataaggccttttaccccgaagaaatatcatcgatggtcttaaccaagctcaaggaaacagccgaagctttcctgggacatccagttacaaacgccgtgattacggtccctgcgtactttaacgattcgcagagacaggctaccaaagacgctggagtcatagcaggattgaatgtgcttcgtatcatcaatgagccaacagccgcagccattgcctacgggttagacaagggtggccaaggagaacgtcacgtactgatcttcgacttgggcggggggacttttgacgtgtcaatcctaacaatagatgacggtatcttcgaggtgaaagcgaccgctggcgatacccacctcgggggtgaggacttcgacaaccgcctcgtgagccatttcgtcgaagagttcaagagaaaacataaaaaagatatcagccagaataagcgagcagtgcgacggctgcgtaccgcctgcgagcgggccaaacgaactctatccagcagcacgcaagcaaacttggagatcgattccctgtacgagggcatcgatttttacacctccatcactagagcacgtttcgaagagttgtgcgctgacctattcagaggaaccctggagcctgtcgagaaggccctgcgtgatgccaagatggataaggccaagatacacgacatcgttcttgttggcggctcaactagaatacccaaggttcagaggctcctgcaggactactttaatggacgggatctgaacaagagcattaatccagacgaagccgtcgcttatggcgcagccgttcaggccgcaattctaatgggggacaaatcagagaaagttcaagacttgctgctgctggatgttgctccactttctctgggactggagaccgctgggggagtcatgaccgcattaatcaagagaaacagtactatacccactaagcagacgcagatctttacaacgtactccgataaccagcccggcgtgctgattcaagtgtatgagggtgagagagccatgaccaaagacaacaatcttcttgggcgctttgacctgactggcataccccccgcacctcggggcgtacctcaaattgaagtaacatttgatatagacgcaaacggtattttgaatgtgactgccatggacaaatccaccggaaaggtcaacaagatcacaatcaccaatgataagggcaggctgagcaaagaggaaatcgagcggatggtgctcgacgccgagaaatacaaggccgaggacgaggtacagcgagaaaagatcgctgccaagaatgcactggagtcttacgcttttaacatgaaaagcgtggtatctgacgaaggactcaagggcaaaatttctgagagtgataaaaataagattctagacaagtgcaacgaactgttaagttggctcgaagtgaaccagctcgcggaaaaagatgagtttgaccacaagcgcaaagagctgaaacaaatgtgtaaccccataattaccaagctctaccaaggcgggtgtacagggcccgcgtgcggaaccggttacgttcctgggagaccggctacgggccctacgattgaggaggtcgactag

SEQ ID NO: 285532 - DNA, 1926 bp, Artificial Sequence
  derived and/or modified sequence
atggcaaccgcaaaaggtatcgctattggcatcgacctaggcaccacctactcatgtgttggagtgttccagcacggaaaagttgagatcatcgccaatgaccaggggaatcgcactactcctagctatgtggccttcaccgacacggaaagactcattggagacgccgcgaaaaaccaagtagcgatgaacccccagaacacagtcttcgacgcaaagagactcattggacgaaaattcaatgatcccgtcgtgcaggccgacatgaagctgtggccattccaagtgattaatgaaggggggaaacccaaagtcttggtgagctacaaaggagagaacaaagctttttacccggaagaaatttcttctatggtgctaaccaagcttaaggagactgctgaagcgttcctaggccacccagttactaatgccgtgattacagtgcctgcttattttaacgacagccagcggcaggccactaaagatgcaggagtcatagctggactgaatgtcctgagaatcattaacgagcctactgccgccgctattgcttacggcctcgacaaggggggccagggagaaagacacgtactgattttcgatttgggagggggtacctttgatgtgagtattctgactatcgacgatggaattttcgaagtcaaggccaccgccggagacacccacctgggaggggaagactttgacaaccgcctcgtctcccacttcgtggaggaattcaagcggaagcacaaaaaggatatctcccagaacaaacgagccgtccgtcggctccgcaccgcctgcgagcgggctaagaggacactgtccagctctacacaagctaacctagaaatcgacagtttgtatgagggcattgacttctacacttctattacaagagccagatttgaagaattgtgtgccgacttgttccggggaaccctggaacctgtcgagaaggctctgagggacgcaaaaatggacaaggcgaagatccatgatatcgtcctggttggggggtcaacacggattccaaaagtgcagaggctgttacaggactactttaatggccgcgatctgaataaatcaatcaatcctgatgaggcagtcgcttatggggccgcagtgcaggccgcaattctcatgggtgataaatctgaaaaagtgcaagatctcctcctgttagatgttgctcccctctctctggggctggaaacagccggcggtgtcatgaccgctttaattaagagaaacagcacgattccaactaaacagacccagattttcaccacatattcagataaccagcccggagtgttgatccaggtttatgagggggaacgcgccatgacgaaggacaacaaccttctgggacggtttgatctgaccgggattccccccgctccgagaggggtgccccagattgaggtgacattcgatattgacgccaacggcatcctcaacgtgactgctatggacaagagcaccggcaaggtcaacaagattactattacgaatgacaaggggcggttaagtaaagaggaaattgagaggatggtgctcgatgccgagaagtataaggcagaagatgaagtgcagagggagaagattgcggccaagaacgcactggagagctatgcattcaacatgaagtccgtggtatcagatgagggcctgaaaggtaagatttcagagtccgacaaaaataagatactcgacaagtgtaacgagctcctcagctggctggaggtgaatcagctcgcagaaaaagacgaattcgatcacaaacggaaagagttaaaacagatgtgtaatcccataattacgaaattgtaccaaggcggctgtacaggacccgcctgtggcactggatatgttcccggacgaccggcaacagggcctaccattgaagaagtagactag

SEQ ID NO: 285533 - DNA, 2544 bp, Artificial Sequence
  derived and/or modified sequence
gggccagtttggaaaaagattactgagttggagccgtctcaaatttgcagggagggacggggtggggggtggggggaccccggttgtgcagtttgatattgagggagcccccacctactcgctggggctgcgtaatctggacgtttccaaactgaagcgaaggcgtcgggagactaggcctcagagaaccatggctactgccaagggaatcgccataggcatcgacctgggcaccacctactcctgtgtgggggtgttccagcacggcaaggtggagatcatcgccaacgaccagggcaaccgcaccacccccagctacgtggccttcacagacaccgagcggctcattggggatgcggccaagaaccaggtagcaatgaatccccagaacactgtttttgatgctaaacgtctgatcggcaggaaatttaatgatcctgttgtacaagcagatatgaaactttggccttttcaagtgattaatgaaggaggcaagcccaaagtccttgtgtcctacaaaggggagaataaagctttctaccctgaggaaatctcttcgatggtattgactaagttgaaggagactgctgaggcctttttgggccaccctgtcaccaatgcagtgattaccgtgccagcctatttcaatgactctcaacgtcaggctactaaggatgcaggtgtgattgctggacttaatgtgctaagaatcatcaatgagcccacggctgctgccattgcctatggtttagataaaggaggtcaaggagaacgacatgtcctgatttttgatctgggtggaggcacatttgatgtgtcaattctgaccatagatgatgggatttttgaggtaaaggccactgctggggacactcacctgggtggggaggactttgacaacaggcttgtgagccacttcgtggaggagttcaagaggaaacacaaaaaggacatcagccagaacaagcgagccgtgaggcggctgcgcaccgcctgcgagagggccaagaggaccctgtcgtccagcacccaggccaacctagaaattgattcactttatgaaggcattgacttctatacatccatcaccagagctcgatttgaagagttgtgtgcagacctgtttaggggtaccctggagcctgtagaaaaagcgcttcgggatgccaagatggataaggctaaaatccatgacattgttttagtagggggctccacccgcatccccaaggtgcagcggctgcttcaggactacttcaatggacgtgatctcaacaagagcatcaaccctgatgaggccgtagcatatggggctgcggtacaagcagccatcctgatgggggacaagtctgagaaggtacaggacctgctgctgctggacgtggctcccctgtccctggggctggagacggctgggggcgtgatgactgccctgataaagcgcaactccaccatccccaccaagcagacacagattttcaccacctactctgacaaccaacccggggtgctgatccaggtgtatgagggcgagagggccatgacaaaggacaacaacctgctggggcggtttgacctgactggaatccctccagcacccaggggagttcctcagatcgaggtgacgtttgacattgatgccaatggtattctcaatgtcacagccatggacaagagcaccggcaaggtgaacaagatcaccatcaccaatgacaagggccgcctgagcaaggaggagattgagcgcatggttctggatgctgagaaatataaagctgaagatgaggtccagagggagaaaattgctgcaaagaatgccttagaatcctatgcttttaacatgaagagtgttgtgagtgatgaaggtttgaagggcaagattagtgagtctgataaaaataaaatattggataaatgcaacgagctcctttcgtggctggaggtcaatcaactggcagagaaagatgagtttgatcataagagaaaggaattgaagcagatgtgtaaccctatcatcacaaaactctaccaaggaggatgcactgggcctgcctgcggaacagggtatgtgcctggaaggcctgccacaggccccacaattgaagaagtagattaattctttttagaactgaagcatcctaggatgcctctacatgtatttcattcccctcatcttcaaacatcattattattcttgaccagacctgaatctaagttaccatcccttggaaattctggagaaggagtctcatgcaccacctatcacactccctcacatcctgtttctgactttggaatggactcaggaaaactaggcccctctttaaaccgtgtgatgtatttgaatgtctgttatttccagccaccctaacattcttcttcctgtgtggatgcttatttgtcaatcagtaaatttgttcgtaaagaaaattacttctggtatttaggctgtgaatgtaccttgaaggggagagttcatggagagagcatgtgttctctgattgtgaggtcactgtgaatgattaaattggtaagggtaaagta

SEQ ID NO: 285534 - DNA, 2019 bp, Artificial Sequence
  derived and/or modified sequence
aaactcgacgcgccggtgcctgcagccgcacaggttcgctctgggaagccttgggacaacgggagtcactctcgaaaaaggcctcagagaaccatggctactgccaagggaatcgccataggcatcgacctgggcaccacctactcctgtgtgggggtgttccagcacggcaaggtggagatcatcgccaacgaccagggcaaccgcaccacccccagctacgtggccttcacagacaccgagcggctcattggggatgcggccaagaaccaggtagcaatgaatccccagaacactgtttttgatgctaaacgtctgatcggcaggaaatttaatgatcctgttgtacaagcagatatgaaactttggccttttcaagtgattaatgaaggaggcaagcccaaagtccttgtgtcctacaaaggggagaataaagctttctaccctgaggaaatctcttcgatggtattgactaagttgaaggagactgctgaggcctttttgggccaccctgtcaccaatgcagtgattaccgtgccagcctatttcaatgactctcaacgtcaggctactaaggatgcaggtgtgattgctggacttaatgtgctaagaatcatcaatgagcccacggctgctgccattgcctatggtttagataaaggaggtcaaggagaacgacatgtcctgatttttgatctgggtggaggcacatttgatgtgtcaattctgaccatagatgatgggatttttgaggtaaaggccactgctggggacactcacctgggtggggaggactttgacaacaggcttgtgagccacttcgtggaggagttcaagaggaaacacaaaaaggacatcagccagaacaagcgagccgtgaggcggctgcgcaccgcctgcgagagggccaagaggaccctgtcgtccagcacccaggccaacctagaaattgattcactttatgaaggcattgacttctatacatccatcaccagagctcgatttgaagagttgtgtgcagacctgtttaggggtaccctggagcctgtagaaaaagcgcttcgggatgccaagatggataaggctaaaatccatgacattgttttagtagggggctccacccgcatccccaaggtgcagcggctgcttcaggactacttcaatggacgtgatctcaacaagagcatcaaccctgatgaggccgtagcatatggggctgcggtacaagcagccatcctgatgggggacaagtctgagaaggtacaggacctgctgctgctggacgtggctcccctgtccctggggctggagacggctgggggcgtgatgactgccctgataaagcgcaactccaccatccccaccaagcagacacagattttcaccacctactctgacaaccaacccggggtgctgatccaggtgtatgagggcgagagggccatgacaaaggacaacaacctgctggggcggtttgacctgactggaatccctccagcacccaggggagttcctcagatcgaggtgacgtttgacattgatgccaatggtattctcaatgtcacagccatggacaagagcaccggcaaggtgaacaagatcaccatcaccaatgacaagggccgcctgagcaaggaggagattgagcgcatggttctggatgctgagaaatataaagctgaagatgaggtccagagggagaaaattgctgcaaagaatgccttagaatcctatgcttttaacatgaagagtgttgtgagtgatgaaggtttgaagggcaagattagtgagtctgataaaaataaaatattggataaatgcaacgagctcctttcgtggctggaggtcaatcaactggcagagaaagatgagtttgatcataagagaaaggaattgaagcagatgtgtaaccctatcatcacaaaactctaccaaggaggatgcactgggcctgcctgcggaacagggtatgtgcctggaaggcctgccacaggccccacaattgaagaagtagattaa

SEQ ID NO: 285535 - DNA, 1926 bp, Artificial Sequence
  derived and/or modified sequence
atggccacagccaagggcatcgccatcggcatcgacctgggcaccacctacagctgtgtgggcgtcttccagcacggcaaggtggagatcatcgccaatgaccagggcaacagaaccacccccagctatgtggccttcacagacacagagcggctgattggagatgctgccaagaaccaggtggccatgaacccccagaacacagtgtttgatgccaagaggctcatcggcaggaagttcaatgaccctgtggtgcaggccgacatgaagctgtggcccttccaggtgatcaatgaaggaggcaagcccaaggtgctggtgtcctacaagggggagaacaaggccttctacccagaggagatcagctccatggtgctgaccaagctgaaggagacagctgaggccttcctgggccaccctgtgaccaatgctgtgatcaccgtgcctgcctacttcaatgacagccagaggcaggccaccaaggatgctggggtgattgctggcctgaatgtgctgcgcatcatcaatgagcccacagctgctgccatcgcctacggcctggacaagggcggccagggcgagcggcacgtgctgatctttgacctgggcggcggcacctttgatgtgtccatcctgaccattgatgatggcatctttgaggtgaaggccacagctggggacacccacctgggcggagaagattttgacaaccggctggtgagccactttgtggaggagttcaagaggaagcacaagaaggacatcagccagaacaagagagctgtgcggcggctgaggacagcctgtgagcgggccaagaggaccctgagcagcagcacccaggccaacctggagattgacagcctgtatgagggcatcgacttctacaccagcatcacccgggccaggtttgaggagctgtgtgccgacctcttccggggcaccctggagcctgtggagaaggccctgagagatgccaagatggacaaggccaagatccatgacatcgtgctggtgggcggcagcacccgcatccccaaggtgcagaggctgctgcaggactacttcaacggccgggacctgaacaagagcatcaacccagatgaggccgtggcctatggagctgctgtgcaggccgccatcctgatgggagacaagtctgagaaggtgcaggacctgctgctgctggatgtggcccccctgagcctgggcctggagacagctgggggcgtgatgacagccctgatcaagaggaacagcaccatccccaccaagcagacccagatcttcaccacctacagcgacaaccagcccggggtgctgatccaggtgtatgaaggagagcgggccatgaccaaggacaacaacctgctgggccgctttgacctgaccggcatccccccagccccccggggcgtgccccagatcgaggtgacctttgatattgatgccaacggcatcctgaatgtgacagccatggacaagagcacaggcaaggtgaacaagatcaccatcaccaatgacaagggccgcctgagcaaggaggagattgaaagaatggtgctggatgctgagaagtacaaggccgaggatgaggtgcagcgggagaagattgctgccaagaatgccctggagagctatgccttcaacatgaagtctgtggtgtctgatgagggcctgaagggcaagatcagcgagagtgacaagaacaagatcctggacaagtgcaatgagctgctgtcctggctggaggtgaaccagctggccgagaaggatgaatttgaccacaagaggaaggagctgaagcagatgtgcaaccccatcatcaccaagctgtaccagggcggctgcaccggccctgcctgtggcaccggctacgtgcccggccgcccagccaccggccccaccatcgaggaggtggactag

SEQ ID NO: 285536 - DNA, 1926 bp, Artificial Sequence
  derived and/or modified sequence
atggccaccgccaagggcatcgccatcggcatcgacctgggcaccacatactcctgcgtcggggtgtttcagcacggcaaggtggagattattgcaaacgatcagggcaacaggaccacaccgagctacgtggccttcaccgatactgaaaggctgattggagatgcagccaagaatcaggtggctatgaacccacagaataccgtgtttgacgctaaaaggctgattggccgcaagtttaacgacccagtggtgcaggcagatatgaagttgtggccctttcaagtcatcaatgaggggggcaaacccaaggtgctcgttagttacaagggcgaaaacaaggccttttaccctgaagagatctccagtatggtactcaccaagctgaaagaaacagctgaagccttcctcgggcatccagtaacaaacgccgttatcacagtgcccgcctattttaatgacagccagagacaagccactaaggatgcgggggtaatcgcaggcctgaacgtactgagaattattaacgaaccaacagccgctgctattgcatacggcctggataaggggggccaaggcgaaaggcacgtcctgatcttcgacctggggggagggacatttgatgtgtccatacttaccatcgatgatggaatatttgaggtgaaggcaacggccggagacacccacctaggaggcgaggactttgacaaccgcctggtgagccacttcgtggaggagttcaaacgaaagcacaaaaaggacatctctcagaacaagcgcgcagtccggcggctgaggaccgcctgtgagcgcgcaaagaggacattgagcagctccacccaggccaatctggagattgatagtctgtatgagggaatagatttttatacctctatcaccagagcgcgattcgaggaactgtgcgctgatctatttaggggtactttggaacccgtcgagaaggccctgagggacgccaaaatggataaagcaaagatccacgatatagtgctggtgggaggtagtacgcgcatccctaaggttcagagactgctgcaagattatttcaatggtcgagatcttaacaagtccatcaatcctgacgaggcagtggcctatggagctgctgtgcaggctgcaatcctgatgggggataagtctgaaaaggttcaggatctgcttcttctggatgttgcgccacttagtctcgggcttgaaacagctggaggggttatgaccgctctgatcaaacgcaatagcacgatccctacaaaacagacgcagatctttactacttacagcgacaatcaacctggcgtgctcattcaagtttacgagggcgagcgcgcgatgactaaagacaacaacctgctgggccgtttcgacctgactgggatcccaccagcccctagaggcgtgccacagatcgaggttacatttgatattgacgcaaacggcattctcaacgtcacagccatggataaatctactggtaaagtaaacaagataacaataacaaacgacaaagggcgtctctctaaagaggaaattgagaggatggtactcgatgctgaaaagtacaaagctgaagacgaggtccagcgcgagaaaatcgcagccaaaaacgccctggaatcttacgcattcaacatgaagtcagtcgtgtcagacgagggactgaaggggaagatatccgagtccgacaagaataagattttggataaatgcaatgagttgcttagctggctcgaggttaatcagctcgcagagaaagatgaattcgatcacaaaagaaaagaactgaagcagatgtgcaacccaatcatcacaaagctttaccagggagggtgcaccgggccagcctgcgggacagggtatgtcccaggtcgccccgccaccggaccgaccatcgaggaggtcgactag

SEQ ID NO: 285537 - DNA, 1926 bp, Artificial Sequence
  derived and/or modified sequence
atggccaccgccaagggcatcgccatcggcatcgacctgggcaccacctacagttgcgtgggagtcttccagcacggcaaggtcgaaatcattgctaatgaccagggcaacaggaccacccccagctacgtggcattcactgacactgaacggctgatcggtgatgctgctaaaaatcaggtagccatgaatcctcagaatacggtattcgacgcaaaaaggctgatcggacgtaagtttaacgaccccgtggtacaagccgatatgaaattatggcctttccaggtgataaatgaaggggggaagccgaaggtgctggtctcctacaagggcgaaaacaaggctttctaccctgaggaaatctctagtatggtactaacaaagctgaaagagaccgctgaagctttcttgggtcatccagtgactaacgctgtgatcacagttccagcgtactttaacgatagccagcgacaagcgaccaaggacgcgggcgtaatcgctggcttgaatgtgcttagaataataaatgagccaaccgctgctgcaattgcatatgggctcgataagggaggacagggggaaaggcatgtattgattttcgacctcggcggggggacatttgacgtgtcaatactgacaattgatgatggtatatttgaggtgaaagccaccgccggcgatacccatctaggaggcgaagactttgataatcgcctggtaagtcactttgtcgaggaattcaagagaaagcataagaaagacatttcccagaacaagagggctgttcgccgcctaaggaccgcctgtgaaagagccaagcgcacacttagctcgtcaactcaagcaaacctggagatagacagcctctacgagggcatcgatttttataccagtattactcgcgcacgttttgaggaactgtgcgccgacctgtttagaggcaccctggagccagtggagaaggctcttcgggacgcaaagatggataaggcaaagattcatgatattgtgctggttggcggatctacccggattcccaaggtccagaggttactccaggactacttcaacggaagggacttgaacaagtctatcaatccagatgaagctgtggcctatggcgcagcagttcaggcggcaattctgatgggagacaagagcgagaaagtccaagacctcctgctactggacgtcgcacccttgtcgctgggccttgagactgccggaggcgtgatgacagcactgattaagaggaatagtaccattccaaccaagcagacccagatcttcacaacttacagcgataaccagccgggggttctaatccaggtgtacgaaggggaacgcgctatgacgaaggataacaatctcctgggccgattcgatttaactggcattccgcctgccccccggggtgtgccgcagattgaggtgacatttgacattgacgccaatggaatcctaaatgtgacagccatggataagagcacaggcaaagttaacaaaattactattacgaatgataagggaaggcttagcaaggaagaaattgaacggatggtgctggacgcagagaagtataaagctgaagatgaggtccaaagagagaaaattgctgcaaagaatgcactggagtcatacgctttcaacatgaagagtgtcgtgagtgatgagggcctcaaggggaagattagtgaatccgacaaaaacaagatattggataagtgtaatgaactgctcagctggcttgaagtcaatcagttagcagagaaagacgaatttgaccacaagagaaaggagctcaagcagatgtgcaatcctatcattacgaaactttaccaaggcggctgcacaggcccagcctgtggcactggatatgtaccgggaagaccggcaaccggaccaaccatcgaggaggtggattag

SEQ ID NO: 285538 - DNA, 1926 bp, Artificial Sequence
  derived and/or modified sequence
atggcaactgctaaggggattgccattggaatcgacctgggtaccacgtattcatgcgtgggcgtgttccaacacggtaaagttgaaatcatcgccaatgatcaaggcaacaggactacgcctagctatgttgccttcacggacactgaacggctgattggggacgcagcgaagaatcaggttgctatgaacccacagaacactgtgttcgatgccaagagactcattggcaggaaatttaacgatcctgttgtgcaggctgacatgaagttgtggccttttcaagtcatcaacgaaggcggtaagcctaaagtcctggtatcatataaaggtgagaataaggctttttaccccgaagagatcagctctatggtcctcaccaaattgaaagaaacagcagaggcttttctggggcaccccgtcactaacgcggtgattactgtgcccgcttatttcaatgacagccagaggcaggctacaaaggacgccggtgtgattgctggcctgaatgttctgcgaatcatcaatgagccgacagctgccgcaatcgcttacggcctggacaaagggggtcaaggggagagacatgtgctcatcttcgacctggggggtggcacatttgatgtgagtatcctcacgattgatgacgggattttcgaggtgaaagcaaccgctggggacacacacctcgggggagaagacttcgataacaggctggtatcgcactttgtcgaagaattcaaacgcaagcataagaaagacatcagtcaaaataagcgcgctgtgcgacgcctccggacagcatgtgaacgtgctaagagaactctaagctccagtacacaggcaaatctggagattgactctttgtatgagggtatcgatttttatacctctattacccgggcacgcttcgaagagctgtgcgcagatctttttcgtggaaccctcgagcccgtcgaaaaagccctgcgggatgccaaaatggacaaggccaagatacacgacatcgtgctcgtaggaggatcaacaaggatccctaaagtccagcgattactgcaggattactttaacggccgagacttgaacaagagtatcaatcctgacgaagcagtcgcttacggcgcagctgtgcaagcggctatcctcatgggagataagtccgaaaaggttcaggatctgctcctgctggacgtagcaccgctgtcacttggcctggagaccgcaggcggagtcatgacagcactcatcaagcgcaactccactatcccaacgaagcagacacaaatatttacgacgtacagcgataatcagcctggagtcctgatccaggtgtacgagggagagagagccatgactaaagacaacaatctgttaggcaggtttgacctaacagggatcccaccagccccaagaggtgtgccccagatcgaagttacttttgacattgatgctaacggcatactgaacgtgacggcaatggataagtctaccggaaaggttaataaaatcactatcactaacgataaaggcaggctaagcaaggaagaaattgaacgtatggttctcgacgctgagaagtacaaagccgaggatgaggtgcagcgcgaaaaaatcgctgccaaaaatgctttggaatcctacgcatttaacatgaagagcgttgtaagtgatgagggccttaagggaaaaatcagtgaatcggacaagaataagatcctcgataagtgtaatgagttgctgagctggctcgaggtgaatcagttagctgaaaaggacgagttcgatcataagcgcaaagagctgaaacaaatgtgtaatcccatcatcacaaagctgtatcaaggcggttgcactggccctgcgtgtggcacaggctacgtccctgggcgtcccgctaccggacccacaattgaagaggtcgactag

SEQ ID NO: 285539 - DNA, 1926 bp, Artificial Sequence
  derived and/or modified sequence
atggcgaccgccaagggcatcgccatcggcattgacttgggcacaacatactcttgtgtgggtgtgttccagcatggcaaggtggagatcatcgccaacgaccagggaaatagaaccacaccttcttacgtggcatttacagatactgagcggctcatcggtgacgcagccaagaaccaggtggccatgaatccacagaacaccgtgttcgatgctaaacgactcatagggagaaagtttaatgatcccgtggtacaggccgacatgaagctctggccctttcaggtgatcaatgaggggggaaaaccgaaagtcctcgttagctacaagggcgagaataaggctttctaccctgaagagatcagctctatggtgctgaccaaactgaaagaaactgccgaagcattcctgggacatcccgtcactaacgctgttattaccgttccggcttacttcaacgatagccagaggcaggcaaccaaggatgcgggtgtcatagcaggtcttaacgttctccggatcattaacgaacctactgcagcagcaattgcgtacggtttagacaaagggggacaaggagagaggcatgtgcttatctttgatctgggcggaggtacctttgacgtaagcatcttgacaattgacgatggtatttttgaagtaaaggcaaccgccggtgacactcatctgggcggagaggactttgacaatcgtctggtaagtcattttgtggaagaattcaagcgcaagcataagaaggacatttcccagaataagcgagccgtgaggagacttcgcacggcttgcgagcgcgctaaacgaactctgagcagcagcacccaagcaaacctcgagatcgatagcctttacgaaggcattgatttttacactagtattacccgcgctcgcttcgaggaattgtgtgcggacctttttagaggcacgctagagcccgttgaaaaagcactgagggatgcaaagatggacaaagctaagattcatgatatcgtgctggtgggaggaagtacacgcatacccaaggttcagaggttgttgcaagactatttcaacggtcgcgacctgaacaaaagcattaacccggacgaggccgtggcttacggagcagctgtgcaggccgcaattttaatgggcgacaagtctgaaaaggttcaggacctcctgttgctggatgtcgcgcctcttagtcttggtctggaaacagctggaggagtaatgacggctctcattaaacggaactctaccatccccacaaaacaaacccagattttcaccacttacagtgacaaccaacccggtgtgctcatccaggtatatgagggagaaagagccatgaccaaagataacaatctccttggcaggttcgacctgactggcataccccctgctcctcggggagtaccacaaatcgaggtgacctttgacatcgacgcaaacgggatcttgaacgttacagcgatggacaaatctaccggaaaggtaaacaagattactattacgaacgataaggggagacttagcaaggaggagattgaaagaatggtgctggatgcggaaaagtacaaagctgaggacgaagtacagagggaaaagatagctgctaaaaacgctctcgaatcctacgcattcaatatgaagagcgtggtgtcagacgaggggcttaaagggaaaattagtgagagcgataagaacaaaatattagacaaatgcaacgagctgctgagctggcttgaggtgaaccagctcgcggaaaaagacgaatttgatcataagcggaaggagttgaagcagatgtgtaatcccattatcactaagttgtatcaggggggttgtacaggaccagcttgcgggactggctatgtaccaggcagacccgctaccggacccacgattgaggaagtagactag

SEQ ID NO: 285540 - protein, 641 aa, Artificial Sequence
  derived and/or modified sequence
MATAKGIAIGIDLGTTYSCVGVFQHGKVEIIANDQGNRTTPSYVAFTDTERLIGDAAKNQVAMNPQNTVFDAKRLIGRKFNDPVVQADMKLWPFQVINEGGKPKVLVSYKGENKAFYPEEISSMVLTKLKETAEAFLGHPVTNAVITVPAYFNDSQRQATKDAGVIAGLNVLRIINEPTAAAIAYGLDKGGQGERHVLIFDLGGGTFDVSILTIDDGIFEVKATAGDTHLGGEDFDNRLVSHFVEEFKRKHKKDISQNKRAVRRLRTACERAKRTLSSSTQANLEIDSLYEGIDFYTSITRARFEELCADLFRGTLEPVEKALRDAKMDKAKIHDIVLVGGSTRIPKVQRLLQDYFNGRDLNKSINPDEAVAYGAAVQAAILMGDKSEKVQDLLLLDVAPLSLGLETAGGVMTALIKRNSTIPTKQTQIFTTYSDNQPGVLIQVYEGERAMTKDNNLLGRFDLTGIPPAPRGVPQIEVTFDIDANGILNVTAMDKSTGKVNKITITNDKGRLSKEEIERMVLDAEKYKAEDEVQREKIAAKNALESYAFNMKSVVSDEGLKGKISESDKNKILDKCNELLSWLEVNQLAEKDEFDHKRKELKQMCNPIITKLYQGGCTGPACGTGYVPGRPATGPTIEEVD

SEQ ID NO: 285541 - protein, 174 aa, Artificial Sequence
  derived and/or modified sequence
MSTLYVSPHPDAFPSLRALIAARYGEAGEGPGWGGAHPRICLQPPPTSRTSFPPPRLPALEQGPGGLWVWGATAVAQLLWPAGLGGPGGSRAAVLVQQWVSYADTELIPAACGATLPALGLRSSAQDPQAVLGALGRALSPLEEWLRLHTYLAGEAPTLADLAAVTALLLPFRY

SEQ ID NO: 285542 - protein, 297 aa, Artificial Sequence
  derived and/or modified sequence
MPDSYSPRYVEAAWYPWWEQQGFFKPEYGRPNVSAANPRGVFMMCIPPPNVTGSLHLGHALTNAIQDSLTRWHRMRGETTLWNPGCDHAGIATQVVVEKKLWREQGLSRHQLGREAFLQEVWKWKEEKGDRIYHQLKKLGSSLDWDRACFTMDPKLSAAVTEAFVRLHEEGIIYRSTRLVNWSCTLNSAISDIEVDKKELTGRTLLSVPGYKEKVEFGVLVSFAYKVQGSDSDEEVVVATTRIETMLGDVAVAVHPKDTRYQHLKGKNVIHPFLSRSLPIVFDEFVDMDFGTGPAQV

SEQ ID NO: 285543 - protein, 95 aa, Artificial Sequence
  derived and/or modified sequence
  misc_feature (1)..(1): Xaa can be any naturally occurring amino acid
XPAGLGGPGGSRAAVLVQQWVSYADTELIPAACGATLPALGLRSSAQDPQAVLGALGRALSPLEEWLRLHTYLAGEAPTLADLAAVTALLLPFRY

SEQ ID NO: 285544 - protein, 961 aa, Artificial Sequence
  derived and/or modified sequence
MLLLLLLAPLFLRPPGAGGVQTPNATSEGCQIIHPPWEGGIRYRGLTRDQVKAINFLPVDYEIEYVCRGEREVVGPKVRKCLANGSWTDMDTPSRCVRICSKSYLTLENGKVFLTGGDLPALDGARVDFRCDPDFHLVGSSRSICSQGQWSTPKPHCQVNRTPHSERRAVYIGALFPMSGGWPGGQACQPAVEMALEDVNSRRDILPDYELKLIHHDSKCDPGQATKYLYELLYNDPIKIILMPGCSSVSTLVAEAARMWNLIVLSYGSSSPALSNRQRFPTFFRTHPSATLHNPTRVKLFEKWGWKKIATIQQTTEVFTSTLDDLEERVKEAGIEITFRQSFFSDPAVPVKNLKRQDARIIVGLFYETEARKVFCEVYKERLFGKKYVWFLIGWYADNWFKIYDPSINCTVDEMTEAVEGHITTEIVMLNPANTRSISNMTSQEFVEKLTKRLKRHPEETGGFQEAPLAYDAIWALALALNKTSGGGGRSGVRLEDFNYNNQTITDQIYRAMNSSSFEGVSGHVVFDASGSRMAWTLIEQLQGGSYKKIGYYDSTKDDLSWSKTDKWIGGSPPADQTLVIKTFRFLSQKLFISVSVLSSLGIVLAVVCLSFNIYNSHVRYIQNSQPNLNNLTAVGCSLALAAVFPLGLDGYHIGRNQFPFVCQARLWLLGLGFSLGYGSMFTKIWWVHTVFTKKEEKKEWRKTLEPWKLYATVGLLVGMDVLTLAIWQIVDPLHRTIETFAKEEPKEDIDVSILPQLEHCSSRKMNTWLGIFYGYKGLLLLLGIFLAYETKSVSTEKINDHRAVGMAIYNVAVLCLITAPVTMILSSQQDAAFAFASLAIVFSSYITLVVLFVPKMRRLITRGEWQSEAQDTMKTGSSTNNNEEEKSRLLEKENRELEKIIAEKEERVSELRHQLQSRQQLRSRRHPPTPPEPSGGLPRGPPEPPDRLSCDGSRVHLLYK

SEQ ID NO: 285545 - protein, 578 aa, Artificial Sequence
  derived and/or modified sequence
MLLLLLLAPLFLRPPGAGGVQTPNATSEGCQIIHPPWEGGIRYRGLTRDQVKAINFLPVDYEIEYVCRGEREVVGPKVRKCLANGSWTDMDTPSRCVRICSKSYLTLENGKVFLTGGDLPALDGARVDFRCDPDFHLVGSSRSICSQGQWSTPKPHCQVNRTPHSERRAVYIGALFPMSGGWPGGQACQPAVEMALEDVNSRRDILPDYELKLIHHDSKCDPGQATKYLYELLYNDPIKIILMPGCSSVSTLVAEAARMWNLIVLSYGSSSPALSNRQRFPTFFRTHPSATLHNPTRVKLFEKWGWKKIATIQQTTEVFTSTLDDLEERVKEAGIEITFRQSFFSDPAVPVKNLKRQDARIIVGLFYETEARKVFCEVYKERLFGKKYVWFLIGWYADNWFKIYDPSINCTVDEMTEAVEGHITTEIVMLNPANTRSISNMTSQEFVEKLTKRLKRHPEETGGFQEAPLAYDAIWALALALNKTSGGGGRSGVRLEDFNYNNQTITDQIYRAMNSSSFEGVSGHVVFDASGSRMAWTLIEQLQGGSYKKIGYYDSTKDDLSWSKTDKWIVISRTHSPT

SEQ ID NO: 285546 - DNA, 2886 bp, Artificial Sequence
  derived and/or modified sequence
atgctgctgctgctgctgctggcccccctgttcctgagaccccccggcgccggcggcgtgcagacccccaacgccaccagcgagggctgccagatcatccaccccccctgggagggcggcatcagatacagaggcctgaccagagaccaggtgaaggccatcaacttcctgcccgtggactacgagatcgagtacgtgtgcagaggcgagagagaggtggtgggccccaaggtgagaaagtgcctggccaacggcagctggaccgacatggacacccccagcagatgcgtgagaatctgcagcaagagctacctgaccctggagaacggcaaggtgttcctgaccggcggcgacctgcccgccctggacggcgccagagtggacttcagatgcgaccccgacttccacctggtgggcagcagcagaagcatctgcagccagggccagtggagcacccccaagccccactgccaggtgaacagaaccccccacagcgagagaagagccgtgtacatcggcgccctgttccccatgagcggcggctggcccggcggccaggcctgccagcccgccgtggagatggccctggaggacgtgaacagcagaagagacatcctgcccgactacgagctgaagctgatccaccacgacagcaagtgcgaccccggccaggccaccaagtacctgtacgagctgctgtacaacgaccccatcaagatcatcctgatgcccggctgcagcagcgtgagcaccctggtggccgaggccgccagaatgtggaacctgatcgtgctgagctacggcagcagcagccccgccctgagcaacagacagagattccccaccttcttcagaacccaccccagcgccaccctgcacaaccccaccagagtgaagctgttcgagaagtggggctggaagaagatcgccaccatccagcagaccaccgaggtgttcaccagcaccctggacgacctggaggagagagtgaaggaggccggcatcgagatcaccttcagacagagcttcttcagcgaccccgccgtgcccgtgaagaacctgaagagacaggacgccagaatcatcgtgggcctgttctacgagaccgaggccagaaaggtgttctgcgaggtgtacaaggagagactgttcggcaagaagtacgtgtggttcctgatcggctggtacgccgacaactggttcaagatctacgaccccagcatcaactgcaccgtggacgagatgaccgaggccgtggagggccacatcaccaccgagatcgtgatgctgaaccccgccaacaccagaagcatcagcaacatgaccagccaggagttcgtggagaagctgaccaagagactgaagagacaccccgaggagaccggcggcttccaggaggcccccctggcctacgacgccatctgggccctggccctggccctgaacaagaccagcggcggcggcggcagaagcggcgtgagactggaggacttcaactacaacaaccagaccatcaccgaccagatctacagagccatgaacagcagcagcttcgagggcgtgagcggccacgtggtgttcgacgccagcggcagcagaatggcctggaccctgatcgagcagctgcagggcggcagctacaagaagatcggctactacgacagcaccaaggacgacctgagctggagcaagaccgacaagtggatcggcggcagcccccccgccgaccagaccctggtgatcaagaccttcagattcctgagccagaagctgttcatcagcgtgagcgtgctgagcagcctgggcatcgtgctggccgtggtgtgcctgagcttcaacatctacaacagccacgtgagatacatccagaacagccagcccaacctgaacaacctgaccgccgtgggctgcagcctggccctggccgccgtgttccccctgggcctggacggctaccacatcggcagaaaccagttccccttcgtgtgccaggccagactgtggctgctgggcctgggcttcagcctgggctacggcagcatgttcaccaagatctggtgggtgcacaccgtgttcaccaagaaggaggagaagaaggagtggagaaagaccctggagccctggaagctgtacgccaccgtgggcctgctggtgggcatggacgtgctgaccctggccatctggcagatcgtggaccccctgcacagaaccatcgagaccttcgccaaggaggagcccaaggaggacatcgacgtgagcatcctgccccagctggagcactgcagcagcagaaagatgaacacctggctgggcatcttctacggctacaagggcctgctgctgctgctgggcatcttcctggcctacgagaccaagagcgtgagcaccgagaagatcaacgaccacagagccgtgggcatggccatctacaacgtggccgtgctgtgcctgatcaccgcccccgtgaccatgatcctgagcagccagcaggacgccgccttcgccttcgccagcctggccatcgtgttcagcagctacatcaccctggtggtgctgttcgtgcccaagatgagaagactgatcaccagaggcgagtggcagagcgaggcccaggacaccatgaagaccggcagcagcaccaacaacaacgaggaggagaagagcagactgctggagaaggagaacagagagctggagaagatcatcgccgagaaggaggagagagtgagcgagctgagacaccagctgcagagcagacagcagctgagaagcagaagacacccccccaccccccccgagcccagcggcggcctgcccagaggcccccccgagccccccgacagactgagctgcgacggcagcagagtgcacctgctgtacaagtag

SEQ ID NO: 285547 - DNA, 4510 bp, Artificial Sequence
  derived and/or modified sequence
cccttgcaccctccttcttccctccgcccgggagctctccctggtccccggcgccgcctccttccctcccggctccccgctccccgctcccgtggctgccgccgccccggggaagaagagacaggggtggggtttgggggaagcgagagaggaggggagagaccctggccaggctggagcctggattcgaggggaggagggacgggaggaggagaaaggtggaggagaagggaggggggagcggggaggagcggccgggcctggggccttgaggcccggggagagccggggagccgggcccgcgcgccgagatgttgctgctgctgctactggcgccactcttcctccgccccccgggcgcgggcggggtgcagacccccaacgccacctcagaaggttgccagatcatacacccgccctgggaagggggcatcaggtaccggggcctgactcgggaccaggtgaaggctatcaacttcctgccagtggactatgagattgagtatgtgtgccggggggagcgcgaggtggtggggcccaaggtccgcaagtgcctggccaacggctcctggacagatatggacacacccagccgctgtgtccgaatctgctccaagtcttatttgaccctggaaaatgggaaggttttcctgacgggtggggacctcccagctctggacggagcccgggtggatttccggtgtgaccccgacttccatctggtgggcagctcccggagcatctgtagtcagggccagtggagcacccccaagccccactgccaggtgaatcgaacgccacactcagaacggcgcgcagtgtacatcggggcactgtttcccatgagcgggggctggccagggggccaggcctgccagcccgcggtggagatggcgctggaggacgtgaatagccgcagggacatcctgccggactatgagctcaagctcatccaccacgacagcaagtgtgatccaggccaagccaccaagtacctatatgagctgctctacaacgaccctatcaagatcatccttatgcctggctgcagctctgtctccacgctggtggctgaggctgctaggatgtggaacctcattgtgctttcctatggctccagctcaccagccctgtcaaaccggcagcgtttccccactttcttccgaacgcacccatcagccacactccacaaccctacccgcgtgaaactctttgaaaagtggggctggaagaagattgctaccatccagcagaccactgaggtcttcacttcgactctggacgacctggaggaacgagtgaaggaggctggaattgagattactttccgccagagtttcttctcagatccagctgtgcccgtcaaaaacctgaagcgccaggatgcccgaatcatcgtgggacttttctatgagactgaagcccggaaagttttttgtgaggtgtacaaggagcgtctctttgggaagaagtacgtctggttcctcattgggtggtatgctgacaattggttcaagatctacgacccttctatcaactgcacagtggatgagatgactgaggcggtggagggccacatcacaactgagattgtcatgctgaatcctgccaatacccgcagcatttccaacatgacatcccaggaatttgtggagaaactaaccaagcgactgaaaagacaccctgaggagacaggaggcttccaggaggcaccgctggcctatgatgccatctgggccttggcactggccctgaacaagacatctggaggaggcggccgttccggcgtgcgcctggaggacttcaactacaacaaccagaccattaccgaccaaatctaccgggcaatgaactcctcgtcctttgagggtgtctctggccatgtggtgtttgatgccagcggctctcggatggcatggacgcttatcgagcagcttcagggtggcagctacaagaagattggctactatgacagcaccaaggatgatctttcctggtccaaaacagataaatggattggagggtcccccccagctgaccagaccctggtcatcaagacattccgcttcctgtcacagaaactctttatctccgtctcagttctctccagcctgggcattgtcctagctgttgtctgtctgtcctttaacatctacaactcacatgtccgttatatccagaactcacagcccaacctgaacaacctgactgctgtgggctgctcactggctttagctgctgtcttccccctggggctcgatggttaccacattgggaggaaccagttccctttcgtctgccaggcccgcctctggctcctgggcctgggctttagtctgggctacggttccatgttcaccaagatttggtgggtccacacggtcttcacaaagaaggaagaaaagaaggagtggaggaagactctggaaccctggaagctgtatgccacagtgggcctgctggtgggcatggatgtcctcactctcgccatctggcagatcgtggaccctctgcaccggaccattgagacatttgccaaggaggaacctaaggaagatattgacgtctctattctgccccagctggagcattgcagctccaggaagatgaatacatggcttggcattttctatggttacaaggggctgctgctgctgctgggaatcttccttgcttatgagaccaagagtgtgtccactgagaagatcaatgatcaccgggctgtgggcatggctatctacaatgtggcagtcctgtgcctcatcactgctcctgtcaccatgattctgtccagccagcaggatgcagcctttgcctttgcctctcttgccatagttttctcctcctatatcactcttgttgtgctctttgtgcccaagatgcgcaggctgatcacccgaggggaatggcagtcggaggcgcaggacaccatgaagacagggtcatcgaccaacaacaacgaggaggagaagtcccggctgttggagaaggagaaccgtgaactggaaaagatcattgctgagaaagaggagcgtgtctctgaactgcgccatcaactccagtctcggcagcagctccgctcccggcgccacccaccgacacccccagaaccctctgggggcctgcccaggggaccccctgagccccccgaccggcttagctgtgatgggagtcgagtgcatttgctttataagtgagggtagggtgagggaggacaggccagtagggggagggaaagggagaggggaagggcaggggactcaggaagcagggggtccccatccccagctgggaagaacatgctatccaatctcatctcttgtaaatacatgtccccctgtgagttctgggctgatttgggtctctcatacctctgggaaacagacctttttctctcttactgcttcatgtaattttgtatcacctcttcacaatttagttcgtacctggcttgaagctgctcactgctcacacgctgcctcctcagcagcctcactgcatctttctcttcccatgcaacaccctcttctagttaccacggcaacccctgcagctcctctgcctttgtgctctgttcctgtccagcaggggtctcccaacaagtgctctttccaccccaaaggggcctctccttttctccactgtcataatctctttccatcttacttgcccttctatactttctcacatgtggctccccctgaattttgcttcctttgggagctcattcttttcgccaaggctcacatgctccttgcctctgctctgtgcactcacgctcagcacacatgcatcctcccctctcctgcgtgtgcccactgaacatgctcatgtgtacacacgcttttcccatatgctttcttcatgttcagtcacatgtgctctcgggtgccctgcattcacagctacgtgtgcccctctcatggtcatgggtctgcccttgagcgtgtttgggtaggcatgtgcaatttgtctagcatgctgagtcatgtctttcctatttgcacacgtccatgtttatccatgtactttccctgtgtaccctccatgtaccttgtgtactttcttcccttaaatcatggtattcttctgacagagccatatgtaccctaccctgcacattgttatgcacttttccccaattcatgtttggtggggccatccacaccctctccttgtcacagaatctccatttctgctcagattccccccatctccattgcattcatgtactaccctcagtctacactcacaatcatcttctcccaagactgctcccttttgttttgtgtttttttgaggggaattaaggaaaaataagtgggggcaggtttggagagctgcttccagtggatagttgatgagaatcctgaccaaaggaaggcacccttgactgttgggatagacagatggacctatggggtgggaggtggtgtccctttcacactgtggtgtctcttggggaaggatctccccgaatctcaataaaccagtgaacagtgtgactcgg

SEQ ID NO: 285548 - DNA, 2886 bp, Artificial Sequence
  derived and/or modified sequence
atgctgctgctgctcctgttagcccccctgtttttgaggcccccgggcgctgggggcgtgcagacacctaacgccactagcgaggggtgccagatcatccaccccccgtgggaggggggaattagatacaggggacttactagggaccaagtaaaggccatcaatttcttacccgtcgattatgagattgagtacgtgtgcagaggcgagcgcgaggtggttggtcctaaggtgcgcaaatgtctcgccaatgggtcttggacagatatggatacaccaagtcggtgtgtccggatctgcagcaaatcatatcttaccctagaaaacggcaaggtgtttctgactggcggcgacctccctgcgttagacggcgctcgtgtggactttagatgcgacccggacttccatttggtggggtcaagccgctcgatttgcagtcagggacaatggtctactcccaagccccactgccaggtcaatcgtactcctcacagcgaacggcgcgcagtctatattggcgcacttttccctatgtctggcggctggcccgggggccaggcctgtcagcccgcggtggaaatggcactggaagacgtgaattccagaagagacatcctgccagattatgagctgaagctgatacaccatgattcaaaatgcgatccgggccaggctactaaatacctgtatgagttgttgtataatgatcccatcaagattattctcatgcctgggtgctcgagtgtctccaccctcgtagctgaggctgccagaatgtggaacctgatcgtgctttcctacggctcttcttctcctgccctgtccaacagacagaggtttccaacattttttagaacccacccgagtgctacactgcacaacccaacacgcgtgaagttatttgagaagtggggctggaaaaagatcgctacaattcaacaaacaaccgaggtgtttacttctactttggacgacctcgaagagcgtgtgaaagaagctggaatcgagattacatttaggcagtccttctttagcgatcctgcggtgccggtgaaaaatttgaagaggcaggatgcacgcataatcgtcggactattttacgagaccgaggctcgcaaggtcttctgcgaggtgtacaaggaaaggctgttcggaaaaaagtacgtctggttcctgattggctggtacgccgacaactggtttaagatatacgaccctagcattaactgtaccgtggacgaaatgaccgaggcagtggaaggccatatcaccacagaaatcgtcatgctgaatcctgcgaacaccagaagtattagtaacatgactagtcaggagtttgtcgaaaagttgacaaaaaggcttaagaggcaccctgaggagaccggtggtttccaagaggctccacttgcatacgatgccatttgggctttagccctggccctaaacaagacaagcggcggcggtggaaggtcaggtgtgagattagaggattttaactataataaccagaccattacggaccagatttatcgggctatgaatagttctagcttcgaaggtgtgtccggccacgtagtcttcgatgcctccggctccaggatggcatggacacttatcgagcagcttcagggcggatcatataagaaaatcgggtattatgattctacgaaagacgatttgtcctggagcaagaccgataaatggattggtggctcccctccggccgaccagacactggtgattaagacttttcgatttctaagccagaaattatttatttccgtgagcgtactgagctccctcggaatcgtgctcgcagtcgtgtgtctctcctttaacatatacaacagccatgtcagatatatacagaattcccagcccaacctgaacaacctcactgcagtggggtgctccttggccctggcagcggtcttccctctcgggttagatggataccacattgggagaaatcaattcccttttgtatgccaggctcgtttgtggcttttgggcctgggtttttccctggggtacgggtcgatgttcacgaaaatttggtgggtgcacaccgtgtttacaaaaaaggaggagaaaaaagagtggcgcaaaaccttggagccctggaagctttatgcgacagtgggcctgctcgtgggaatggacgtcctgacactggcaatatggcagatagtagatcccttacatcggactattgagacgttcgccaaagaggaaccaaaggaggacatcgacgtgagcattcttcctcagctcgagcattgtagcagcaggaaaatgaatacctggctcgggatattttacgggtacaagggactgttactcctgttggggatctttctcgcctatgagactaagtcagtgagtaccgagaagatcaatgaccaccgcgcggtcggaatggccatttacaatgttgcggtgctgtgtctgatcacggcacctgtcacaatgattctgtcgagccagcaggatgcagcttttgctttcgcctctctggcgatcgtgttttcatcctacatcacgttggtggtgctgtttgtccccaaaatgaggaggctcatcacccgtggtgagtggcagagtgaggcacaggatacaatgaagaccggttcatcaacaaataataacgaggaggagaaatctagactgctcgaaaaggaaaaccgagagttagagaagataatcgcagaaaaggaagagcgagttagcgagcttagacatcagctgcagagcagacaacagcttcggtctcggaggcatcccccaactcctcctgagccctccgggggcctgcccagaggacctcccgagcccccagatcggctcagttgcgatgggtctagagtgcacctgctgtataaatag

SEQ ID NO: 285549 - DNA, 2886 bp, Artificial Sequence
  derived and/or modified sequence
atgctgctgctgctgctgctggcccccctcttcctgcggcccccaggagctggaggagtgcagaccccaaatgccaccagcgagggctgccagatcatccaccccccctgggagggcggcatccgctaccggggcctgacccgggaccaggtgaaggccatcaacttcctgcctgtggactatgaaattgaatatgtgtgccgcggggagcgggaggtggtgggccccaaggtgaggaagtgcctggccaacggctcctggacagacatggacacccccagccgctgtgtgcgcatctgcagcaagagctacctgaccctggagaatggcaaggtgttcctgactggaggagacctgcctgccctggatggagcccgggtggacttccgctgtgaccctgacttccacctggtgggcagcagccgcagcatctgcagccagggccagtggagcacccccaagccccactgccaggtgaacagaacaccccacagcgagaggagagctgtgtacatcggggccctcttccccatgtctgggggctggccaggcggccaggcctgccagcctgctgtggagatggccctggaggatgtgaacagccggcgggacatcctgcctgactatgagctgaagctgatccaccacgacagcaaatgtgaccccggccaggccaccaagtacctgtatgagctgctgtacaatgaccccatcaagatcatcctgatgcctggctgcagctctgtgtccaccctggtggccgaggccgccaggatgtggaacctgattgtgctgtcctatggcagcagcagccctgccctgagcaaccggcagcgcttccccaccttcttccgcacccaccccagcgccaccctgcacaaccccaccagggtgaagctgtttgagaagtggggctggaagaagatcgccaccatccagcagaccacagaggtgttcaccagcaccctggatgacctggaggagcgggtgaaggaggccggcatcgagatcaccttccggcagagcttcttcagtgaccctgctgtgcctgtgaagaacctgaagaggcaggatgcccgcatcatcgtgggcctcttctatgaaacagaggccaggaaggtgttctgtgaggtgtacaaggagcggctgtttgggaagaagtatgtgtggttcctgattggctggtatgctgacaactggttcaagatctatgaccccagcatcaactgcaccgtggatgagatgacagaggccgtggagggccacatcaccacagaaattgtgatgctgaacccagccaacaccaggagcatcagcaacatgaccagccaggagtttgtggagaagctgaccaagaggctgaagaggcaccctgaggagactggaggcttccaggaggcccccctggcctatgatgccatctgggccctggccctggccctgaacaagaccagcggcggcggcggccgctctggagtgcggctggaggacttcaactacaacaaccagaccatcacagaccagatctaccgggccatgaacagcagcagctttgagggcgtgtctggccacgtggtgtttgatgccagcggcagcaggatggcctggaccctgattgagcagctgcagggcggcagctacaagaagattggctactatgacagcaccaaggatgacctgtcctggagcaagacagacaagtggattggaggcagccccccagctgaccagaccctggtgatcaagaccttccgcttcctgagccagaagctgttcatctctgtgtctgtgctgagcagcctgggcatcgtgctggccgtggtgtgcctgtccttcaacatctacaacagccacgtgcgctacatccagaacagccagcccaacctgaacaacctgacagctgtgggctgcagcctggccctggccgctgtgttccccctgggcctggatggctaccacatcggcaggaaccagttcccctttgtgtgccaggcccggctgtggctgctgggcctgggcttcagcctgggctacggctccatgttcaccaagatctggtgggtgcacacagtgttcaccaagaaggaggagaagaaggagtggaggaagaccctggagccctggaagctgtatgccaccgtgggcctgctggtgggcatggatgtgctgaccctggccatctggcagatcgtggaccccctgcacaggaccatcgagacctttgccaaggaggagcccaaggaggacattgatgtgtccatcctgccccagctggagcactgcagcagcaggaagatgaacacctggctgggcatcttctacggctacaagggcctgctgctgctgctgggcatcttcctggcctatgagaccaagtctgtgtccacagagaagatcaatgaccacagagctgtgggcatggccatctacaacgtggccgtgctgtgcctgatcacagcccctgtgaccatgatcctgagcagccagcaggatgctgcctttgcctttgccagcctggccatcgtgttcagcagctacatcaccctggtggtgctgtttgtgcccaagatgaggaggctcatcaccagaggagagtggcagagcgaggcccaggacaccatgaagacaggcagcagcaccaacaacaatgaggaggagaagagccggctgctggagaaggagaaccgggagctggagaagatcatcgccgagaaggaggagcgggtgtctgagctgcggcaccagctgcagagccggcagcagctgcggagcagaagacacccccccaccccacctgagcccagcggcggcctgccccggggccccccagagcccccagaccggctgagctgtgatggcagccgggtgcacctgctgtacaagtag

SEQ ID NO: 285550 - DNA, 2886 bp, Artificial Sequence
  derived and/or modified sequence
atgctgctgctgctgctgctggcccccctgttcctgcggccccccggagctggtggcgtacagaccccaaatgctaccagcgaaggctgtcaaatcatccacccaccatgggaggggggcatccggtatcgaggcctgacacgggatcaggtaaaagctatcaacttcctgcccgtcgattacgagatagagtacgtttgccgtggggagcgcgaggtggtgggccctaaagtgcggaaatgcctcgccaatggaagctggaccgatatggataccccatcccgctgcgtccgcatttgctccaaaagttatcttaccctcgaaaatggaaaggttttcctaaccggaggcgatctgcctgcactggatggcgcccgggtggattttcgatgcgatcccgacttccatttagttggaagctcacggtcaatctgttcacagggccagtggtccacacccaagccccactgccaggtgaacaggactcctcatagtgaaagaagagccgtgtacattggtgccctcttcccgatgagtggcgggtggccagggggccaagcatgccagcctgctgtagagatggcgttggaagacgtcaatagcagacgggatatcctccccgattatgagcttaagctgatccaccatgattccaagtgtgacccaggccaggccacaaaatacctgtatgagttgctgtataacgatcctattaaaataattctcatgccaggctgctcatccgtttctaccctcgtcgccgaagctgccaggatgtggaacctgatcgtgctctcttacggtagctcttctcccgctctgtctaacagacagcgctttccaacgttcttccgcacacacccatctgcgacactgcacaaccctacaagagtcaaattgtttgaaaagtggggctggaagaagatcgcaacgatccaacaaactaccgaagtgtttactagcactcttgatgacctcgaggagagagttaaagaagccggaattgaaatcacctttcgccagtcgtttttctccgatcctgccgtccctgtcaagaaccttaaacggcaggacgctcggatcattgtaggactattctacgagacagaggctcgaaaagtattttgcgaggtgtacaaggagaggctgtttggtaaaaagtacgtatggttcctaattgggtggtatgccgataactggtttaaaatctacgatccgagtattaactgcacagtggatgaaatgaccgaagccgtggagggtcatatcactactgagattgtaatgttaaaccccgccaacactagatccatcagtaacatgactagccaagagttcgttgaaaaacttaccaaacgactgaagcgacacccggaggagaccgggggcttccaggaggccccgctcgcttacgacgcaatctgggctttggccctggcattgaataaaacaagtggaggtgggggccgcagcggagtgaggctcgaagacttcaattacaacaatcagacaataactgatcagatctaccgggcaatgaatagctccagtttcgaaggcgtgtccggacacgtcgtatttgacgcctccgggtcccgtatggcttggacactcatagagcagctccaaggcggttcctacaagaaaatcgggtactacgacagcaccaaggatgatcttagctggagcaaaacagacaagtggattggtgggtcacctcctgctgatcagacacttgtgataaaaaccttcagattcctctcccagaagttgttcataagcgtttccgtgctttcttcgttgggcatcgttctggccgttgtctgcctgtctttcaatatctataacagccacgtgcgctacatccagaattcccagcccaatctaaacaacttgactgccgtgggctgtagccttgctctggccgcggtgtttccactagggcttgatggctaccacattggcagaaaccagtttccctttgtctgtcaggcccgtctgtggttactaggcctggggttctcgctgggctacggctcaatgtttacaaaaatctggtgggtccatactgtgtttactaaaaaggaggagaaaaaagaatggcgcaaaacacttgagccctggaagttgtatgctaccgtgggactgctggtaggtatggacgtgcttaccctcgccatatggcagatcgtggatcctctccacaggacgatcgaaaccttcgcaaaggaagaaccgaaagaggacattgatgtctctatactgccacaactcgagcactgcagtagtcggaagatgaatacttggcttggcatcttttatggatacaaaggacttctgctgctcttagggattttcttagcttatgaaactaagtcagtcagtacagagaaaatcaacgaccaccgcgccgtggggatggccatctacaacgttgcagtgctttgccttatcacggcccctgtgaccatgatcctaagctctcaacaggacgcagcatttgccttcgcctctttggccatagtctttagttcttacatcacgctggtggtgctgttcgtgccgaagatgaggagattgattacgcgcggggagtggcagagcgaggcgcaggacactatgaaaaccggttcttccacgaacaacaacgaggaggagaagtcccgactactggaaaaagaaaatagggagcttgagaaaataattgctgagaaggaagaaagggtgagcgagctgagacaccagttacagtcccggcagcagctccgcagccgtagacaccctcctacccctccggaaccgagcggagggctgcccaggggccctcctgaaccacctgatagactgtcctgtgacggttctagggtccatctcttatacaagtag

SEQ ID NO: 285551 - DNA, 2886 bp, Artificial Sequence
  derived and/or modified sequence
atgctgctgctcctcctccttgcgccattgttccttaggcctccaggtgctggcggagtgcagacaccgaacgcaacaagcgaggggtgtcagattatccaccccccatgggagggcggtattcgatatcgcggacttacaagggatcaggtgaaggcaatcaactttctgcccgtggattatgaaatcgagtatgtgtgtaggggggaacgggaagtggtaggtcctaaagttaggaaatgtctggcaaatggaagctggacagacatggacacaccaagtcgctgcgtccgcatttgctccaagtcttacctcactttagagaatggtaaagtcttcctgacgggaggcgacttgcccgcactggacggagcccgagttgactttcgctgcgaccccgactttcacttagtgggctccagtcgcagcatctgttctcaagggcagtggtccacgcccaaacctcattgccaagtcaatcggacacctcactcagaaagacgcgctgtgtatattggcgctctgtttcctatgtctggcggttggccaggcggacaggcatgtcagccagccgtcgagatggccctggaggatgtcaacagcaggcgagatatactgccggattatgaactaaaactaatccatcatgatagtaagtgtgatcccggacaggccaccaaatatctgtatgaattgttatataatgaccccattaagattattctgatgccaggctgctcctctgtctctactcttgttgccgaggctgctaggatgtggaacctgattgtccttagctacggctctagtagtcctgcgctgtcaaatcgacagcggttcccaaccttttttcgaactcacccttcagccactctccacaatccgacccgagtgaaactctttgaaaagtggggctggaaaaaaattgctacaatccaacagacaacagaggtctttacctcaaccttggacgacttggaggagagggtcaaggaggcgggtattgagatcacatttcgccagtccttcttcagtgaccctgcggtccctgttaaaaacctgaagcgtcaagacgctagaattatcgtcggcttgttctacgagacagaggccagaaaggtgttttgtgaggtctacaaggagagactgtttgggaaaaaatacgtgtggttcctcataggctggtatgctgataactggttcaagatttacgacccaagcatcaattgtacggtagacgaaatgaccgaagccgtggaaggacatatcactactgagattgtgatgctgaaccccgcaaacacacgctcaatcagtaacatgacctcccaagagtttgtggaaaagctgacaaagcgcctaaaacgccaccctgaagagacagggggattccaagaggctcctcttgcctacgacgccatttgggctctcgctttagccctgaataaaacaagcggtggcggaggaaggtccggagtcagactggaggatttcaattataacaaccagactattaccgaccagatctatagagctatgaactcttccagtttcgagggggtgtccgggcatgtggtgttcgacgcctcgggctctcggatggcctggacattgatcgaacagctccaagggggttcttacaagaagatcggctattatgacagtacaaaggacgacctatcgtggtccaagacagacaaatggattggcggatctcctccagccgatcagacactagttattaaaacatttcgttttcttagccaaaagctgttcatatctgtgagcgtgctctcctccctgggcatcgtgcttgcggttgtttgcttgtctttcaacatttataacagccatgtaagatatattcagaactcccagcccaacctgaacaacttgaccgctgtggggtgttctctggccctggcggcagtattccctttggggctggacggatatcatatcggaagaaaccaatttccctttgtgtgtcaggcaagactgtggttgttagggctggggttcagcttaggctacggttcgatgttcacaaagatctggtgggtccataccgtgttcactaaaaaagaggagaaaaaggaatggcgaaaaacactcgagccctggaaactctacgctacggtgggccttctggtggggatggacgtgctcaccctcgccatttggcagatcgtcgatcccctgcaccggaccatagagacttttgccaaggaagagcctaaggaagatattgacgtctcaatcctcccccagctggaacactgctccagtagaaagatgaatacgtggctggggatcttttacgggtataaaggcctcctgttgctgctgggcatctttctcgcatacgagaccaagtctgtctctacagaaaaaatcaacgaccacagggccgtcggtatggccatctacaacgtggctgtgttgtgcctaatcacagctcctgtgaccatgattctgtcgtcgcagcaagacgcagcctttgcctttgccagtttagccatagtgttcagctcgtacattactctcgtggtgctgttcgtacctaaaatgcgacggctgatcacacgcggagagtggcaatcagaagcacaagacacgatgaagacaggcagctcaactaataacaatgaagaggagaagtcaaggttgctggagaaagaaaacagggagctggagaagataatcgcagagaaagaagagagagttagtgagctccggcatcagcttcagagccgccagcagttacggtctaggcggcatccgcctacacctccagagccctccggaggcctaccccgtggcccacctgagccaccagaccgcttatcttgtgatggctcccgagtgcacctgttatacaagtag

SEQ ID NO: 285552 - protein, 246 aa, Artificial Sequence
  derived and/or modified sequence
MASVGRREGTAGGGAGPGEPRREEGRAGLSPSSPPGSHSMRYFYTAMSRPGRGEPRFITVGYVDDTLFVRFDSDATSPRKEPRAPWIEQEGPEYWDRETQISKTNTQTYRENLRTALRYYNQSEAGSHIIQRMYGCDVGPDGRLLRGYDQDAYDGKDYIALNEDLSSWTAADTAAQITQRKWEAARVAEQLRAYLEGLCVESLRRYLENGKETLQRADPPKTHVTHHPISDHEVTLRCWALGFYPA

SEQ ID NO: 285553 - protein, 241 aa, Artificial Sequence
  derived and/or modified sequence
  misc_feature (1)..(1): Xaa can be any naturally occurring amino acid
XPDGRLLRGYDQDAYDGKDYIALNEDLSSWTAADTAAQITQRKWEAARVAEQLRAYLEGLCVESLRRYLENGKETLQRADPPKTHVTHHPISDHEVTLRCWALGFYPAEITLTWQRDGEDQTQDTELVETRPAGDRTFQKWAAVVVPSGEEQRYTCHVQHEGLPKPLTLRWEPSSQSTVPIVGIVAGLAVLAVVVIGAVVAAVMCRRKSSGHFLPTGGKGGSYSQAACSDSAQGSDVSLTA

SEQ ID NO: 285554 - protein, 433 aa, Artificial Sequence
  derived and/or modified sequence
MRVTAPRTLLLLLWGAVALTETWAGSHSMRYFYTAMSRPGRGEPRFITVGYVDDTLFVRFDSDATSPRKEPRAPWIEQEGPEYWDRETQISKTNTQTYRENLRTALRYYNPGRRSRLPIPHVRPGSPRVSGSEIRPRGRGTRPDPRPARAPGAFTRFHFQLRPKSPRVGRGGAGLGTGLTAGPGPGSHIIQRMYGCDVGPDGRLLRGYDQDAYDGKDYIALNEDLSSWTAADTAAQITQRKWEAARVAEQLRAYLEGLCVESLRRYLENGKETLQRADPPKTHVTHHPISDHEVTLRCWALGFYPAEITLTWQRDGEDQTQDTELVETRPAGDRTFQKWAAVVVPSGEEQRYTCHVQHEGLPKPLTLRWEPSSQSTVPIVGIVAGLAVLAVVVIGAVVAAVMCRRKSSGGKGGSYSQAACSDSAQGSDVSLTA

SEQ ID NO: 285555 - DNA, 1089 bp, Artificial Sequence
  derived and/or modified sequence
atgagagtgaccgcccccagaaccctgctgctgctgctgtggggcgccgtggccctgaccgagacctgggccggcagccacagcatgagatacttctacaccgccatgagcagacccggcagaggcgagcccagattcatcaccgtgggctacgtggacgacaccctgttcgtgagattcgacagcgacgccaccagccccagaaaggagcccagagccccctggatcgagcaggagggccccgagtactgggacagagagacccagatcagcaagaccaacacccagacctacagagagaacctgagaaccgccctgagatactacaaccagagcgaggccggcagccacatcatccagagaatgtacggctgcgacgtgggccccgacggcagactgctgagaggctacgaccaggacgcctacgacggcaaggactacatcgccctgaacgaggacctgagcagctggaccgccgccgacaccgccgcccagatcacccagagaaagtgggaggccgccagagtggccgagcagctgagagcctacctggagggcctgtgcgtggagagcctgagaagatacctggagaacggcaaggagaccctgcagagagccgacccccccaagacccacgtgacccaccaccccatcagcgaccacgaggtgaccctgagatgctgggccctgggcttctaccccgccgagatcaccctgacctggcagagagacggcgaggaccagacccaggacaccgagctggtggagaccagacccgccggcgacagaaccttccagaagtgggccgccgtggtggtgcccagcggcgaggagcagagatacacctgccacgtgcagcacgagggcctgcccaagcccctgaccctgagatgggagcccagcagccagagcaccgtgcccatcgtgggcatcgtggccggcctggccgtgctggccgtggtggtgatcggcgccgtggtggccgccgtgatgtgcagaagaaagagcagcggcggcaagggcggcagctacagccaggccgcctgcagcgacagcgcccagggcagcgacgtgagcctgaccgcctag

SEQ ID NO: 285556 - DNA, 726 bp, Artificial Sequence
  derived and/or modified sequence
tgacccgacggcagactgctgagaggctacgaccaggacgcctacgacggcaaggactacatcgccctgaacgaggacctgagcagctggaccgccgccgacaccgccgcccagatcacccagagaaagtgggaggccgccagagtggccgagcagctgagagcctacctggagggcctgtgcgtggagagcctgagaagatacctggagaacggcaaggagaccctgcagagagccgacccccccaagacccacgtgacccaccaccccatcagcgaccacgaggtgaccctgagatgctgggccctgggcttctaccccgccgagatcaccctgacctggcagagagacggcgaggaccagacccaggacaccgagctggtggagaccagacccgccggcgacagaaccttccagaagtgggccgccgtggtggtgcccagcggcgaggagcagagatacacctgccacgtgcagcacgagggcctgcccaagcccctgaccctgagatgggagcccagcagccagagcaccgtgcccatcgtgggcatcgtggccggcctggccgtgctggccgtggtggtgatcggcgccgtggtggccgccgtgatgtgcagaagaaagagcagcggccacttcctgcccaccggcggcaagggcggcagctacagccaggccgcctgcagcgacagcgcccagggcagcgacgtgagcctgaccgcctag

SEQ ID NO: 285557 - DNA, 1302 bp, Artificial Sequence
  derived and/or modified sequence
atgagagtgaccgcccccagaaccctgctgctgctgctgtggggcgccgtggccctgaccgagacctgggccggcagccacagcatgagatacttctacaccgccatgagcagacccggcagaggcgagcccagattcatcaccgtgggctacgtggacgacaccctgttcgtgagattcgacagcgacgccaccagccccagaaaggagcccagagccccctggatcgagcaggagggccccgagtactgggacagagagacccagatcagcaagaccaacacccagacctacagagagaacctgagaaccgccctgagatactacaaccccggcagaagaagcagactgcccatcccccacgtgagacccggcagccccagagtgagcggcagcgagatcagacccagaggcagaggcaccagacccgaccccagacccgccagagcccccggcgccttcaccagattccacttccagctgagacccaagagccccagagtgggcagaggcggcgccggcctgggcaccggcctgaccgccggccccggccccggcagccacatcatccagagaatgtacggctgcgacgtgggccccgacggcagactgctgagaggctacgaccaggacgcctacgacggcaaggactacatcgccctgaacgaggacctgagcagctggaccgccgccgacaccgccgcccagatcacccagagaaagtgggaggccgccagagtggccgagcagctgagagcctacctggagggcctgtgcgtggagagcctgagaagatacctggagaacggcaaggagaccctgcagagagccgacccccccaagacccacgtgacccaccaccccatcagcgaccacgaggtgaccctgagatgctgggccctgggcttctaccccgccgagatcaccctgacctggcagagagacggcgaggaccagacccaggacaccgagctggtggagaccagacccgccggcgacagaaccttccagaagtgggccgccgtggtggtgcccagcggcgaggagcagagatacacctgccacgtgcagcacgagggcctgcccaagcccctgaccctgagatgggagcccagcagccagagcaccgtgcccatcgtgggcatcgtggccggcctggccgtgctggccgtggtggtgatcggcgccgtggtggccgccgtgatgtgcagaagaaagagcagcggcggcaagggcggcagctacagccaggccgcctgcagcgacagcgcccagggcagcgacgtgagcctgaccgcctag

SEQ ID NO: 285558 - DNA, 1089 bp, Artificial Sequence
  derived and/or modified sequence
atgagggtgacggcaccaagaactctcctgctactgctgtggggcgccgtggcacttacagagacatgggccggttcacacagtatgcgatatttctatactgccatgtctcggccggggagaggggagccccggttcatcaccgttggctatgtagacgatacactcttcgtcagattcgactccgatgcgacatcccctagaaaggaaccccgagcgccttggatagaacaagagggaccagagtactgggacagagagacacaaatatctaagactaatacacaaacttatagggagaacctcaggacagcactaaggtattataaccagagcgaggccggaagccacatcattcagcgcatgtatgggtgcgacgtcgggcctgacggtaggctgttacgggggtatgaccaagatgcatatgacgggaaggactacatcgctcttaacgaggacctgtcaagttggaccgctgctgataccgcagctcagattacacagcggaaatgggaagccgcccgggtcgcagagcagctcagggcgtatttggagggcttgtgcgtagaaagcctcaggcgatatctggagaatgggaaggaaactctgcagcgggctgatcctcctaagactcatgtcactcatcatccaataagcgaccatgaagtgactctacgctgttgggccctggggttttatccagcagagatcacactgacgtggcagagggacggagaagaccagactcaggacaccgaactggtcgagacccggcccgcaggagatcgcacgttccagaaatgggcagccgttgtagtgccctccggcgaggaacaaagatatacttgtcacgtgcagcacgaggggctgcccaagcccctgaccttgcggtgggagccttcatctcagtctaccgtcccaatagtcggcattgtcgccggcctcgcggtgctagccgtggtcgttatcggcgctgttgtcgcagccgtcatgtgtcgcagaaagtccagcggcggcaaagggggcagctattctcaggcagcctgcagtgattcggcacaggggagcgatgtctctctaactgcgtag

SEQ ID NO: 285559 - DNA, 726 bp, Artificial Sequence
  derived and/or modified sequence
tgacctgacgggcggctactgagaggatatgaccaggacgcttacgatggtaaggactacatcgcactgaacgaggacctgtccagttggacagcagctgataccgctgcccagatcactcagcgcaaatgggaagcggcccgcgtggctgaacagcttcgggcttatctcgaagggctgtgcgtggaatcgcttcggagatatttggaaaacgggaaagagaccttgcaacgggctgatccccccaaaactcatgtgacccaccatccgatatccgatcacgaggtaaccctgcggtgttgggctttaggattctaccccgcggagatcaccctcacctggcaaagagatggagaggatcaaacgcaggatacagaacttgtcgagacaaggccagccggggaccgcaccttccagaagtgggccgccgtggtggtgcctagtggtgaagagcagcgatacacctgtcacgttcagcatgaaggattgcctaaacccctgaccctgagatgggagccaagtagccagtccacggtccccatcgtgggaattgttgccggtttggcagtcctcgctgtggtggtgattggcgcagtagtcgctgcagtcatgtgtaggcggaaatcatcaggccatttccttcctactggcggaaaaggagggagttatagccaagccgcctgcagtgacagtgcccagggctcagatgtgtcccttaccgcttag

SEQ ID NO: 285560 - DNA, 1302 bp, Artificial Sequence
  derived and/or modified sequence
atgagggtgactgctccaagaactctgttgcttcttttgtggggagccgttgctcttactgaaacctgggccgggtcccattccatgcgatatttttacacagctatgagtagacccggcagaggcgagccacgattcatcaccgtcggatacgtcgatgacacgctgtttgttaggtttgactccgacgccaccagtccgcgtaaagaacctagggcaccctggattgaacaggaggggcctgagtactgggatagagagacgcagatatctaagacaaacacacagacttaccgcgaaaatctgaggactgctttgcgttattataatccagggcggcgctcccgtctacctataccacatgtaagaccaggatcaccccgtgtgagtggatccgaaatcaggccgcgcggacggggtaccaggccagacccgcgacctgcccgggcccctggagccttcactcggtttcacttccagctccgccctaaatcacctagagtgggccgtgggggggcgggactcggcacaggccttaccgccggaccaggtcctgggagtcacatcattcagcgcatgtatggctgtgatgtgggacccgatgggcgccttcttcggggctatgaccaagatgcttacgacggcaaagattacatcgcacttaatgaggacctgagcagttggacggctgcagacaccgcagctcagattacccagagaaagtgggaggcagcccgtgtggccgaacagctgcgtgcatacttggaaggactctgcgtcgagtccttgaggagatatcttgagaatgggaaggagaccctccagagggccgacccccccaagacgcatgttacccaccatccaatatccgatcacgaggtgacactgagatgttgggccctgggattctaccccgcagagataaccctgacgtggcaacgagacggtgaggaccagacacaggacactgaactcgtggaaaccaggcctgccggcgatagaacttttcagaagtgggcagctgtggtggtgccttccggggaggagcagcgatacacgtgccacgtgcagcatgaagggttaccaaaaccattgacacttagatgggaaccgagttcccaatccaccgttcccatcgtgggcatcgttgcgggcctggctgtcctggctgtggtagtcatcggtgctgtggtcgccgctgtcatgtgtcgccgcaagtcgagcggggggaaaggaggttcctactctcaggctgcctgttcagattccgctcaggggagcgacgtgagcctcacagcttag

SEQ ID NO: 285561 - DNA, 820 bp, Artificial Sequence
  derived and/or modified sequence
gccccgaaccctcctcctgctgctctggggggcagtggccctgaccgagacctgggccggtgagtgcggggtcgggagggaaatggcctctgtggggaggagagaggggaccgcaggcgggggcgcaggacccggggagccgcgccgggaggagggtcgggcgggtctcagcccctcctcgcccccaggctcccactccatgaggtatttctacaccgccatgtcccggcccggccgcggggagccccgcttcatcaccgtgggctacgtggacgacacgctgttcgtgaggttcgacagcgacgccacgagtccgaggaaggagccgcgggcgccatggatagagcaggaggggccggagtattgggaccgggagacacagatctccaagaccaacacacagacttaccgagagaacctgcgcaccgcgctccgctactacaaccagagcgaggccgggtctcacatcatccagaggatgtacggctgcgacgtggggccggacgggcgcctcctccgcgggtatgaccaggacgcctacgacggcaaggattacatcgccctgaacgaggacctgagctcctggaccgcggcggacaccgcggctcagatcacccagcgcaagtgggaggcggcccgtgtggcggagcagctgagagcctacctggagggcctgtgcgtggagtcgctccgcagatacctggagaacgggaaggagacgctgcagcgcgcggaccccccaaagacacatgtgacccaccaccccatctctgaccatgaggtcaccctgaggtgctgggccctgggcttctaccctgcg

SEQ ID NO: 285562 - DNA, 1605 bp, Artificial Sequence
  derived and/or modified sequence
tctagagaagccaatcagtgtcgccggggtcccagttctaaagtccccacgcacccacccggactcagaatctcctcagacgccgagatgcgggtcacggcgccccgaaccctcctcctgctgctctggggggcagtggccctgaccgagacctgggccggctcccactccatgaggtatttctacaccgccatgtcccggcccggccgcggggagccccgcttcatcaccgtgggctacgtggacgacacgctgttcgtgaggttcgacagcgacgccacgagtccgaggaaggagccgcgggcgccatggatagagcaggaggggccggagtattgggaccgggagacacagatctccaagaccaacacacagacttaccgagagaacctgcgcaccgcgctccgctactacaaccagagcgaggccgggtctcacatcatccagaggatgtacggctgcgacgtggggccggacgggcgcctcctccgcgggtatgaccaggacgcctacgacggcaaggattacatcgccctgaacgaggacctgagctcctggaccgcggcggacaccgcggctcagatcacccagcgcaagtgggaggcggcccgtgtggcggagcagctgagagcctacctggagggcctgtgcgtggagtcgctccgcagatacctggagaacgggaaggagacgctgcagcgcgcggaccccccaaagacacatgtgacccaccaccccatctctgaccatgaggtcaccctgaggtgctgggccctgggcttctaccctgcggagatcacactgacctggcagcgggatggcgaggaccaaactcaggacaccgagcttgtggagaccagaccagcaggagatagaaccttccagaagtgggcagctgtggtggtgccttctggagaagagcagagatacacatgccatgtacagcatgaggggctgccgaagcccctcaccctgagatgggagccgtcttcccagtccaccgtccccatcgtgggcattgttgctggcctggctgtcctagcagttgtggtcatcggagctgtggtcgctgctgtgatgtgtaggaggaagagctcaggtggaaaaggagggagctactctcaggctgcgtgcagcgacagtgcccagggctctgatgtgtctctcacagcttgaaaagcctgagacagctgtcttgtgagggactgagatgcaggatttcttcacgcctcccctttgtgacttcaagagcctctggcatctctttctgcaaaggcacctgaatgtgtctgcgtccctgttagcataatgtgaggaggtggagagacagcccacccccgtgtccaccgtgacccctgttcccatgctgacttgtgtttcctccccagtcatctttcctgttccagagaggtggggctggatgtctccatctctgtctcaactttatgtgcactgagctgcaacttcttacttccctactgaaaataagaatctgaatataaatttgttttctcaaatatttgctatgagaggttgatggattaattaaataagtcaattcctggaatttgagagagcaaataaagacctgagaaccttccagaa

SEQ ID NO: 285563 - DNA, 1154 bp, Artificial Sequence
  derived and/or modified sequence
ggccggacgggcgcctcctccgcgggtatgaccaggacgcctacgacggcaaggattacatcgccctgaacgaggacctgagctcctggaccgcggcggacaccgcggctcagatcacccagcgcaagtgggaggcggcccgtgtggcggagcagctgagagcctacctggagggcctgtgcgtggagtcgctccgcagatacctggagaacgggaaggagacgctgcagcgcgcggaccccccaaagacacatgtgacccaccaccccatctctgaccatgaggtcaccctgaggtgctgggccctgggcttctaccctgcggagatcacactgacctggcagcgggatggcgaggaccaaactcaggacaccgagcttgtggagaccagaccagcaggagatagaaccttccagaagtgggcagctgtggtggtgccttctggagaagagcagagatacacatgccatgtacagcatgaggggctgccgaagcccctcaccctgagatgggagccgtcttcccagtccaccgtccccatcgtgggcattgttgctggcctggctgtcctagcagttgtggtcatcggagctgtggtcgctgctgtgatgtgtaggaggaagagctcagggcattttcttcccacaggtggaaaaggagggagctactctcaggctgcgtgcagcgacagtgcccagggctctgatgtgtctctcacagcttgaaaagcctgagacagctgtcttgtgagggactgagatgcaggatttcttcacgcctcccctttgtgacttcaagagcctctggcatctctttctgcaaaggcacctgaatgtgtctgcgtccctgttagcataatgtgaggaggtggagagacagcccacccccgtgtccaccgtgacccctgttcccatgctgacttgtgtttcctccccagtcatctttcctgttccagagaggtggggctggatgtctccatctctgtctcaactttatgtgcactgagctgcaacttcttacttccctactgaaaataagaatctgaatataaatttgttttctcaaatatttgctatgagaggttgatggattaattaaataagtcaattcctggaatttgagagagcaaataaagacctgagaaccttccagaa

SEQ ID NO: 285564 - DNA, 1750 bp, Artificial Sequence
  derived and/or modified sequence
agaatctcctcagacgccgagatgcgggtcacggcgccccgaaccctcctcctgctgctctggggggcagtggccctgaccgagacctgggccggctcccactccatgaggtatttctacaccgccatgtcccggcccggccgcggggagccccgcttcatcaccgtgggctacgtggacgacacgctgttcgtgaggttcgacagcgacgccacgagtccgaggaaggagccgcgggcgccatggatagagcaggaggggccggagtattgggaccgggagacacagatctccaagaccaacacacagacttaccgagagaacctgcgcaccgcgctccgctactacaacccggggcgcaggtcacgactccccatcccccacgtacggcccgggtcgccccgagtctccgggtccgagatccgcccccgaggccgcgggacccgcccagaccctcgaccggcgagagccccaggcgcgtttacccggtttcattttcagttgaggccaaaatccccgcgggttggtcggggcggggcggggctcgggacggggctgaccgcggggccggggccagggtctcacatcatccagaggatgtacggctgcgacgtggggccggacgggcgcctcctccgcgggtatgaccaggacgcctacgacggcaaggattacatcgccctgaacgaggacctgagctcctggaccgcggcggacaccgcggctcagatcacccagcgcaagtgggaggcggcccgtgtggcggagcagctgagagcctacctggagggcctgtgcgtggagtcgctccgcagatacctggagaacgggaaggagacgctgcagcgcgcggaccccccaaagacacatgtgacccaccaccccatctctgaccatgaggtcaccctgaggtgctgggccctgggcttctaccctgcggagatcacactgacctggcagcgggatggcgaggaccaaactcaggacaccgagcttgtggagaccagaccagcaggagatagaaccttccagaagtgggcagctgtggtggtgccttctggagaagagcagagatacacatgccatgtacagcatgaggggctgccgaagcccctcaccctgagatgggagccgtcttcccagtccaccgtccccatcgtgggcattgttgctggcctggctgtcctagcagttgtggtcatcggagctgtggtcgctgctgtgatgtgtaggaggaagagctcaggtggaaaaggagggagctactctcaggctgcgtgcagcgacagtgcccagggctctgatgtgtctctcacagcttgaaaagcctgagacagctgtcttgtgagggactgagatgcaggatttcttcacgcctcccctttgtgacttcaagagcctctggcatctctttctgcaaaggcacctgaatgtgtctgcgtccctgttagcataatgtgaggaggtggagagacagcccacccccgtgtccaccgtgacccctgttcccatgctgacttgtgtttcctccccagtcatctttcctgttccagagaggtggggctggatgtctccatctctgtctcaactttatgtgcactgagctgcaacttcttacttccctactgaaaataagaatctgaatataaatttgttttctcaaatatttgctatgagaggttgatggattaattaaataagtcaattcctggaatttgagagagcaaataaagacctgagaaccttccag

SEQ ID NO: 285565 - DNA, 1089 bp, Artificial Sequence
  derived and/or modified sequence
atgagggtgacagcccccaggaccctgctgctgctgctgtggggcgctgtggccctgacagagacctgggccggcagccacagcatgagatacttctacacagccatgagcaggcctggccgcggggagccccgcttcatcaccgtgggctacgtggatgacaccctgtttgtgcgctttgacagtgatgccaccagccccaggaaggagccccgggccccctggattgagcaggagggccctgagtactgggaccgggagacccagatcagcaagaccaacacccagacctaccgggagaacctgaggacagccctgcgctactacaaccagagcgaggccggcagccacatcatccagaggatgtatggctgtgatgtgggcccagatggccgcctgctgcggggctatgaccaggatgcctatgatggcaaggactacatcgccctgaatgaagacctgagctcctggacagctgctgacacagctgcccagatcacccagaggaagtgggaggccgcccgggtggccgagcagctgcgggcctacctggagggcctgtgtgtggagagcctgcggcgctacctggagaatggcaaggagaccctgcagagagctgacccccccaagacccacgtgacccaccaccccatcagtgaccacgaggtgaccctgcgctgctgggccctgggcttctacccagctgagatcaccctgacctggcagagagatggagaggaccagacccaggacacagagctggtggagaccaggcctgctggggacaggaccttccagaagtgggccgctgtggtggtgcccagcggggaggagcagcgctacacctgccacgtgcagcacgagggcctgcccaagcccctgaccctgcgctgggagcccagcagccagagcacagtgcccatcgtgggcatcgtggccggcctggccgtgctggccgtggtggtgattggagctgtggtggccgctgtgatgtgcaggaggaagagcagcggcggcaagggcggcagctacagccaggccgcctgcagcgacagcgcccagggcagtgatgtgtccctgacagcctag

SEQ ID NO: 285566 - DNA, 726 bp, Artificial Sequence
  derived and/or modified sequence
tgaccagatggccgcctgctgcggggctatgaccaggatgcctatgatggcaaggactacatcgccctgaatgaagacctgagctcctggacagctgctgacacagctgcccagatcacccagaggaagtgggaggccgcccgggtggccgagcagctgcgggcctacctggagggcctgtgtgtggagagcctgcggcgctacctggagaatggcaaggagaccctgcagagagctgacccccccaagacccacgtgacccaccaccccatcagtgaccacgaggtgaccctgcgctgctgggccctgggcttctacccagctgagatcaccctgacctggcagagagatggagaggaccagacccaggacacagagctggtggagaccaggcctgctggggacaggaccttccagaagtgggccgctgtggtggtgcccagcggggaggagcagcgctacacctgccacgtgcagcacgagggcctgcccaagcccctgaccctgcgctgggagcccagcagccagagcacagtgcccatcgtgggcatcgtggccggcctggccgtgctggccgtggtggtgattggagctgtggtggccgctgtgatgtgcaggaggaagagcagcggccacttcctgcccaccggcggcaaaggaggcagctacagccaggccgcctgcagcgacagcgcccagggcagtgatgtgtccctgacagcctag

SEQ ID NO: 285567 - DNA, 1302 bp, Artificial Sequence
  derived and/or modified sequence
atgagggtgacagcccccaggaccctgctgctgctgctgtggggcgctgtggccctgacagagacctgggccggcagccacagcatgagatacttctacacagccatgagcaggcctggccgcggggagccccgcttcatcaccgtgggctacgtggatgacaccctgtttgtgcgctttgacagtgatgccaccagccccaggaaggagccccgggccccctggattgagcaggagggccctgagtactgggaccgggagacccagatcagcaagaccaacacccagacctaccgggagaacctgaggacagccctgcgctactacaaccctggaagaagaagccggctgcccatcccccacgtgcggcccggcagcccccgggtgtctggcagcgagatccggccccggggccggggcaccaggccagaccccaggcctgcccgggcccctggggccttcacccgcttccacttccagctgcggcccaagagcccccgggtgggccggggcggggccggcctgggcaccggcctgacagctggccctggccctggcagccacatcatccagaggatgtatggctgtgatgtgggcccagatggccgcctgctgcggggctatgaccaggatgcctatgatggcaaggactacatcgccctgaatgaagacctgagctcctggacagctgctgacacagctgcccagatcacccagaggaagtgggaggccgcccgggtggccgagcagctgcgggcctacctggagggcctgtgtgtggagagcctgcggcgctacctggagaatggcaaggagaccctgcagagagctgacccccccaagacccacgtgacccaccaccccatcagtgaccacgaggtgaccctgcgctgctgggccctgggcttctacccagctgagatcaccctgacctggcagagagatggagaggaccagacccaggacacagagctggtggagaccaggcctgctggggacaggaccttccagaagtgggccgctgtggtggtgcccagcggggaggagcagcgctacacctgccacgtgcagcacgagggcctgcccaagcccctgaccctgcgctgggagcccagcagccagagcacagtgcccatcgtgggcatcgtggccggcctggccgtgctggccgtggtggtgattggagctgtggtggccgctgtgatgtgcaggaggaagagcagcggcggcaaaggaggcagctacagccaggccgcctgcagcgacagcgcccagggcagtgatgtgtccctgacagcctag

SEQ ID NO: 285568 - DNA, 1089 bp, Artificial Sequence
  derived and/or modified sequence
atgcgggtgaccgccccccggaccctgctgctgctgctgtggggcgcagtagcattaacagaaacttgggcgggaagtcattctatgagatacttctacacagccatgagccgccccggaaggggcgagcctcggtttatcaccgttgggtatgtggatgatactctgtttgttcgcttcgattctgatgcgacatccccccgtaaagaacctcgcgccccctggatagagcaagaggggccagagtattgggaccgggagacgcagatttccaagacaaatacccagacgtatcgcgagaatttacggacagccctgcggtactacaatcagtctgaggccgggagtcatataatccagcggatgtacggatgtgacgttggacccgatgggcgcctgctacggggctacgaccaggacgcctacgacggaaaggactacatcgctctgaacgaagacctatccagctggaccgcagccgacaccgccgcacagatcacccagcgaaaatgggaagcagctagggtggcggaacagttgagggcctacttagagggcttatgcgtggagtcactgaggagatatctcgaaaatggcaaagagactttgcaacgagctgacccccctaaaactcacgtcactcatcacccaatcagcgatcacgaggtgacattgcgttgttgggccctaggattctaccctgcagaaatcactttgacttggcagcgggacggggaagatcagacccaggacacagaactggtagagacacgcccggctggggatcggacttttcagaagtgggccgcagtggtcgtgccttctggcgaagagcagagatacacatgccacgtgcagcatgagggattaccaaagccattgacacttcggtgggaaccatcttctcagagcaccgttcctatcgttggcatcgtcgctggcctcgccgttcttgcagtcgtggtgatcggggccgtggtggccgctgtaatgtgccgccgcaaaagtagtggaggcaaaggcgggtcctattcccaggctgcctgttccgattctgcacagggctcggatgtcagtctgacagcatag

SEQ ID NO: 285569 - DNA, 726 bp, Artificial Sequence
  derived and/or modified sequence
tgacccgacggccggctgctgcggggctacgaccaggacgcctacgacgggaaggactacattgcccttaacgaggatctttccagctggactgctgccgataccgcagcacagatcactcagagaaaatgggaagctgcccgcgttgcagagcagctgcgggcctacctggagggcttatgtgttgagtctctcagaaggtacctggaaaacggcaaggaaacactgcagcgcgcggatcctcctaaaacccacgtgacacatcaccctatcagtgatcatgaagtgaccctgcgttgttgggctttgggcttttatccggccgaaataaccctaacttggcagcgcgatggtgaggaccagactcaagacacagagctggttgagacccgaccagccggtgacaggaccttccagaaatgggcagcagtggtggtcccttcaggcgaggagcagcgctacacttgtcacgtccagcatgagggattgcccaagccactgacgctgcggtgggaaccttccagtcaaagcacagtcccaatagtgggcattgtggcaggcctggcagtgcttgccgttgttgtgatcggggcagtggtggccgcagtgatgtgccgacgaaagtctagtgggcatttcctaccaacaggcggcaaaggaggatcctactctcaagccgcgtgtagtgattccgcccagggcagcgatgtatccctgacagcctag

SEQ ID NO: 285570 - DNA, 1302 bp, Artificial Sequence
  derived and/or modified sequence
atgcgggtgaccgccccccggaccctgctgctgctgctgtggggcgcggtcgccttaaccgagacatgggccgggtcacattccatgagatatttttataccgcaatgtctcggcctggacgaggagagccgagatttattactgtgggctacgttgacgacaccttgtttgtacgcttcgactcagacgctacgtcccctagaaaagagccacgggccccctggatagaacaagagggacccgagtactgggatcgtgagactcagatctcgaaaacgaatacccagacatatagggaaaatctgagaaccgcactgaggtactacaatcccggccgcagaagccgtctgccaatcccccatgtgcggccaggtagccccagggtgtccggcagtgaaataaggccaaggggtagaggcacccgacctgacccgaggcccgcccgcgcccccggtgctttcacgagatttcactttcaactgaggccgaagtcaccccgtgtaggtagagggggtgcaggcctcggcactgggctgactgctggacccggcccgggatcccacatcatccagcgcatgtacggttgtgacgtcggccctgacggccgcctcttgaggggctatgaccaggacgcctatgatggcaaagattatatcgctcttaatgaagacctgtcatcctggaccgccgctgataccgccgctcagattactcagcgaaaatgggaggctgcccgggtcgccgagcagcttagggcataccttgaagggttatgcgttgaatctctgagacgctatctggagaatggaaaagagacactccagcgcgccgacccccccaaaacgcatgtaacgcaccaccccatatcagatcacgaggtgactttaaggtgctgggcgctaggcttctaccccgcagaaataaccttgacatggcagcgcgacggcgaggaccagacgcaggatacggagttggtggaaacgcgccccgccggagataggacgtttcagaagtgggcggctgtcgttgtacccagcggcgaagagcaacgctacacatgccacgtgcagcatgaggggctgccaaaaccattgactcttcggtgggagccatccagccagtctacagtccccatagtcgggatcgtcgctggactggccgtgttggctgtagtagtcatcggggccgtagttgctgccgtcatgtgcaggcgcaagagctctggaggcaagggaggctcctattcacaggcagcctgttcagactctgcacagggatccgatgtcagcctgaccgcatag

SEQ ID NO: 285571 - DNA, 1089 bp, Artificial Sequence
  derived and/or modified sequence
atgcgcgtaactgcacccagaacgctcctgttactactctggggcgcagttgcactgacagagacttgggccggtagccattccatgcggtacttttatacagcaatgtcacggcctggcaggggtgagccccgttttattactgtgggttatgtcgacgacacactgttcgtgaggttcgactctgacgctacctcacctcggaaggaaccacgcgcaccgtggatcgaacaggagggcccagaatattgggatcgcgagacccagatctccaaaaccaacactcagacttatcgtgaaaatctcagaactgctctgaggtactataatcagtcagaggccggaagccacattatacaaaggatgtacggatgcgacgttgggcctgacggccgtttgctgcgaggctacgaccaagacgcttatgatggtaaggattacatagccctgaatgaggacctgagctcttggaccgccgctgacaccgccgctcagatcacacaaaggaagtgggaagctgctagagtggcagaacagctccgcgcatacttagagggactctgtgttgaaagtttgcgacgataccttgaaaatgggaaggaaactctgcagagggcagatccacccaagactcatgtgacacaccatccgattagcgatcacgaagttaccttacggtgttgggccctgggcttctaccctgctgagatcaccctgacatggcagcgcgacggggaggatcagacgcaggacaccgaactggttgagacccgacccgctggagacaggaccttccagaaatgggctgctgtcgttgtgccctccggcgaggaacagagatacacctgccatgtgcagcacgaagggttgcccaaacccctgaccttacggtgggaaccctcttcacagagcaccgtgcccatcgtggggatcgtggcgggactcgccgttctagctgtggttgttattggcgcagttgtggcggctgtcatgtgccgcaggaagagctcgggaggcaagggaggctcttattctcaagccgcttgttccgatagcgctcagggtagcgacgtgagcctgacagcttag

SEQ ID NO: 285572 - DNA, 726 bp, Artificial Sequence
  derived and/or modified sequence
taaccagatggtcgtcttctgcgaggatacgatcaggatgcatatgatggtaaagattatattgcccttaacgaggatcttagctcttggactgctgccgacaccgcagcacagataactcagaggaagtgggaagccgcaagagtcgccgagcagctgcgcgcatatcttgagggcctttgcgttgagtcactccgacgctacctcgagaatggaaaggagactttacagcgggcagacccccctaaaacccacgtaactcaccaccctatcagtgaccatgaggtaacactgagatgttgggcgcttgggttctaccctgcggaaatcaccctgacttggcagcgggatggagaggaccagacgcaggacaccgaactggtcgagacacgaccggctggggaccgaaccttccagaaatgggccgcagttgtggtcccaagtggcgaagagcagcggtatacttgtcatgtacaacacgaaggcttgccaaagccgctgactcttagatgggagcctagttctcagtctaccgtaccgatagttggaatcgtcgccggattggccgttttagccgtggttgtgatcggagcagttgtcgctgcagttatgtgccggagaaagtcctcgggacattttcttcccactgggggtaagggaggcagctattcacaagctgcttgtagcgattctgcccagggatccgacgtgtccctgaccgcctag

SEQ ID NO: 285573 - DNA, 1302 bp, Artificial Sequence
  derived and/or modified sequence
atgagggtcaccgccccacggaccctcctactgctgctgtggggcgctgtggcccttacggagacctgggcagggtcccactctatgcggtacttttataccgcaatgagccgacccggaagaggagagccacggttcatcactgttggctacgtagacgacactttgtttgttcggttcgatagcgacgccacttctccacgtaaggaacctcgcgcaccatggattgaacaagaaggacctgaatactgggaccgagaaactcagatcagcaagaccaatacccaaacgtaccgagagaacctgcgtactgccctgcggtactataatcccggtaggcgttcacgtttgcctatcccgcatgttcgccctggaagtccgagggtgtccggctctgagattcggccaaggggacgcggaaccaggccagacccacgtcctgctagagcacccggagccttcaccagattccacttccagctgaggcctaagagtccgagggtcggccgagggggagctggacttgggaccggattaaccgctggacccggacctggtagtcatatcattcagcggatgtacgggtgtgatgtagggccagatggcagactgctgcggggatatgaccaagatgcctacgacggaaaggactatatcgctctgaacgaagatctgagtagctggaccgctgccgacactgccgctcagattactcaaagaaagtgggaagccgcacgcgttgccgaacagctccgcgcatatctcgaaggtctctgcgtggagtctcttagaaggtatctggagaatgggaaggagactctccagcgggcagatccacccaagacacacgtgactcatcatcccatttccgatcatgaggtgacactccggtgttgggcattaggcttctatcccgcagaaattacactgacatggcagcgggatggagaagaccagactcaggacaccgaattagtggagacacggccagccggagatcggaccttccagaaatgggctgccgtggtggtgccaagcggggaagagcaaaggtatacatgccacgtgcagcacgaggggttaccgaagccacttaccctaagatgggaaccatctagtcaatcgacagttccaatagtaggaattgttgcaggcctggcagttttggccgtcgtggtcatcggagcagtggttgccgctgtgatgtgtagacgtaagtcatccggaggtaagggcggaagctactctcaggcagcctgtagtgatagtgcccagggctcagacgtgagcctgactgcctag

SEQ ID NO: 285574 - protein, 86 aa, Artificial Sequence
  derived and/or modified sequence
MALRAGLVLGFHTLMTLLSPQEAGATKGWAGRHRRNQSPSGHPGGALQPQQSHQRASTGDRAPQVSGGAGPAQHPHLHRGQHLPPC

SEQ ID NO: 285575 - protein, 254 aa, Artificial Sequence
  derived and/or modified sequence
MILNKALMLGALALTTVMSPCGGEDIVADHVASYGVNLYQSYGPSGQFTHEFDGDEEFYVDLERKETVWKLPLFHRLRFDPQFALTNIAVLKHNLNILIKRSNSTAATNEVPEVTVFSKSPVTLGQPNTLICLVDNIFPPVVNITWLSNGHSVTEGVSETSFLSKSDHSFFKISYLTFLPSADEIYDCKVEHWGLDEPLLKHWEPEIPAPMSELTETVVCALGLSVGLVGIVVGTVLIIRGLRSVGASRHQGPL

SEQ ID NO: 285576 - DNA, 765 bp, Artificial Sequence
  derived and/or modified sequence
atgatccttaacaaagcacttatgctcggtgctctcgcattgaccactgtgatgtccccctgtgggggggaagatatcgtggcagaccatgtggcaagctacggagtgaatttataccaatcctacggaccaagcgggcagttcacacacgagtttgacggcgacgaggaattttatgttgatttggagagaaaggagacggtgtggaagcttccactcttccacaggttgcgttttgatcctcagttcgccctaacgaacatcgctgtgttaaagcacaacctgaacatcctgattaaacggtctaattctactgcagccactaacgaggttccagaagttacagtgttctctaagtcacccgtgacccttggtcagcctaacaccctgatttgtctcgtggacaacatttttccccccgtcgtaaacatcacctggctcagcaatggccactctgtaacggagggcgtgagcgagacatcttttctgagtaaatccgaccattcgttcttcaaaatctcttacctgacatttcttccatcggccgacgagatttatgattgtaaagttgagcactgggggcttgacgaacccctgttaaagcattgggaaccagagattccggcacctatgtcggaactcacggaaacagtggtctgcgccctcggtctctctgtaggattggtcggcatcgttgtagggacagtgcttattattcgagggctgagaagcgttggcgctagtcggcaccagggacccctgtag

SEQ ID NO: 285577 - DNA, 765 bp, Artificial Sequence
  derived and/or modified sequence
atgattctgaataaagcgttgatgttaggcgccctagcacttaccactgttatgtccccctgcggaggcgaagacatagtcgccgaccatgtcgcatcttacggagtcaacttgtaccagtcctacggcccatccggacagttcacccatgaatttgacggtgatgaggaattctatgtcgacctcgaacggaaagaaacggtttggaagctccccctttttcacaggctccgcttcgaccctcagtttgctcttaccaatattgcagtgctgaaacacaacctgaatatccttatcaagaggtctaattctactgctgcgacaaatgaagttcctgaggtaaccgtttttagcaagagcccagtcaccctgggacagccgaatactcttatctgcctggtagacaatatttttccaccagtggttaatataacatggctgtcaaatggccattcagttactgaaggtgtctctgaaacgtctttcctgtccaagagcgatcactcattctttaagatcagctatttgacctttctgccctccgctgatgaaatttatgattgcaaggtggagcactggggcttggacgagcctttattgaagcactgggagccagaaattccagccccaatgagtgagctgaccgaaacggtcgtatgtgcgctgggactgagcgtgggactggtaggaattgttgtcgggacagtgctgattataagagggctgagatcagtgggtgctagcaggcatcaggggccgctttag

SEQ ID NO: 285578 - DNA, 765 bp, Artificial Sequence
  derived and/or modified sequence
atgatcctcaacaaagcactgatgctcggagccctggcactgacaacagtgatgtcgccctgtgggggcgaggacatcgttgcagatcacgttgccagctatggcgtgaacctgtaccaatcttacggtccttcaggacagttcacccatgagttcgatggtgacgaggagttctatgtagacctggagcgcaaggagaccgtttggaaattaccactctttcaccggctgcgctttgatcctcagttcgcattaacaaacatagctgtgcttaaacacaacttaaacattttgatcaaacgctccaattctacagctgcaactaacgaagttcctgaggtgaccgtgttttcgaagtctcctgtgacactcggacagcctaatactttgatttgtttggtcgataacatttttccgccagtcgtcaacatcacctggttgtcaaatgggcattcagtaactgagggagtgtccgagacttccttcctgtcgaaatctgaccattcattcttcaaaattagctacctgacttttctccctagtgccgatgagatatatgactgtaaagtcgagcactggggtttagacgagcctctccttaaacattgggaacccgagatcccggccccaatgagcgagttaactgaaactgtggtgtgcgcccttggcctgtccgtgggtctggtgggtatagtggtgggcaccgttctaatcatcagaggcctgcgatccgtaggcgcctcccggcaccagggcccactgtag

SEQ ID NO: 285579 - DNA, 765 bp, Artificial Sequence
  derived and/or modified sequence
atgatccttaacaaggctctgatgttgggcgcacttgccctgaccacagttatgtccccttgcggaggggaagacattgtggccgatcacgtggcctcatatggcgtgaacctctaccagtcctacgggcctagcggccagtttacccacgaattcgacggagacgaggaattttatgtggatttggagcggaaggagaccgtttggaaattaccattattccatagacttcgcttcgatccacagtttgcgctgacaaacatcgcggtgctcaaacacaacctcaacattctgattaagcgcagcaatagcacagccgcgacgaacgaggtcccggaagtgaccgtgttcagtaagagtcctgttaccttgggccagccaaacacattaatctgcctggtggacaacatatttcccccagtggtgaacatcacgtggctatctaacggtcacagcgtgacagagggggtgtctgagacttccttccttagtaagtcagatcatagcttctttaaaataagctacctgaccttcctgccatccgctgatgagatttacgactgtaaagttgaacactgggggcttgatgaaccactgttgaaacactgggaacctgagatccctgcaccgatgtctgaactcaccgagacagttgtgtgtgccctgggcctctctgtgggactcgttgggattgtggtgggcacagtcctaataatcagaggactacgcagcgtcggcgcttccaggcaccaaggcccactctag

SEQ ID NO: 285580 - DNA, 765 bp, Artificial Sequence
  derived and/or modified sequence
atgatactgaataaagcactcatgttaggtgcattggccctgactaccgtgatgtccccttgtggcggcgaggacattgtggccgatcatgtggccagctatggtgttaatctctaccagtcgtacgggcccagcggacaatttacgcacgagtttgacggggatgaagagttttacgtggacctggaacgcaaggaaaccgtctggaaactcccactctttcatcggctgaggtttgatccgcaatttgccctgactaatattgcagtcctgaaacacaacctcaatatcctgatcaagaggtccaactcaacggctgccaccaatgaagtcccagaggtgactgtgttctccaagagccctgtgacacttggccagccaaatacactgatttgtctggtagacaatatctttccgccagttgtaaatatcacctggctcagtaatggacactctgtgacagaaggcgtgtcagagactagtttcttaagcaagtccgatcactcattcttcaagatcagttacctgaccttcctcccttcagcagatgagatctatgattgcaaggtcgagcactgggggttggatgaaccgttgttgaagcactgggagccggagatccctgctcccatgtcagaactaacagaaacagtagtgtgcgcgttgggcctgtctgtggggctggtgggtatcgtggtgggaaccgtcctcataatcaggggtctcagaagcgtcggggcatccagacaccaaggacctctgtag

SEQ ID NO: 285581 - DNA, 765 bp, Artificial Sequence
  derived and/or modified sequence
atgatcctgaataaggctcttatgctgggtgccttagcactgacgactgtcatgagcccttgcggtggcgaagacatcgttgctgaccacgtggctagttacggggtgaatttgtaccagagctacggtccaagcggccagttcactcatgagtttgatggcgatgaggaattttatgttgatttagaacgaaaggaaaccgtatggaagctacctttgttccaccgcctgcgcttcgatccgcagttcgcgctcacaaacatagcagtattaaaacacaatctgaacatcctgatcaagcggtccaactcaacagctgccactaacgaggtgcctgaagtgactgtcttttcaaaatccccagtcaccctgggccagccaaacacattgatttgcttggtggacaatatcttcccacccgtggtcaacatcacgtggcttagtaacggtcatagcgtcaccgagggggtctcggagacaagttttctttcaaagtctgatcacagtttcttcaagataagctatttgacattcctgccctccgccgacgagatctacgactgcaaggtagaacattggggattggacgaacccctcctgaagcattgggaacccgaaatcccagccccaatgtccgaactgactgagacggtagtgtgtgcgctcgggctcagcgtgggactggtgggaatagtcgtgggcaccgtcttgatcataaggggcctgaggtccgtgggtgctagcagacatcaaggacccctgtag

SEQ ID NO: 285582 - DNA, 765 bp, Artificial Sequence
  derived and/or modified sequence
atgatattgaataaggctctcatgctcggagccctcgcactcacaacagtgatgtctccctgtggaggggaggatattgtggcagatcacgtggcttcgtacggagtaaacctgtatcagtcttacgggcccagcgggcagtttacccacgagttcgacggagatgaagaattctatgttgatcttgagaggaaggagacggtgtggaagctgcccctgttccacagattgaggttcgacccacagtttgccctgaccaatatcgccgtcctgaaacataatttgaatattctgattaaacggagcaatagcaccgccgcgactaacgaggtgccagaggtgacggtcttcagtaagtcccccgtcacattgggccagccaaatactctgatttgtctggtcgataatatctttccgcccgtggtgaacatcacctggctgtctaacggtcactccgtgacggagggggtgagtgagacttcattcctgtctaaaagtgatcactccttctttaagatcagttacttgacctttcttccctcagccgacgaaatttatgattgtaaagttgagcattggggactggatgaaccactgcttaagcattgggagcctgaaattcccgcaccaatgtccgaattgacagagacagtcgtgtgcgctctggggctgtccgtcggtctggtgggcatcgttgtggggaccgtgctaattatcagaggcctgaggtccgtaggggcctctagacaccaaggcccactgtag

SEQ ID NO: 285583 - DNA, 765 bp, Artificial Sequence
  derived and/or modified sequence
atgattctgaacaaggcgttgatgctcggcgcgctggcattaaccacagtcatgtcaccatgcggaggcgaggacatcgtcgccgaccacgtggcatcatacggagtgaatttgtatcagtcttatggcccttctggccagttcactcatgaattcgatggagatgaggagttttatgtggatctcgaaagaaaagagacggtgtggaagctccctctgttccatcggcttcgttttgatcctcaattcgcattaaccaatatcgctgttctaaagcataatctaaatattctgatcaagcggtctaatagcacagcggctacaaatgaggttcctgaggtcacagtgttctcaaaatcccctgttacactgggccaacctaacacactgatatgcctggttgacaacatcttccctccggtggtcaatattacatggctctccaatggacattcggtgacagagggagtttccgaaacatcttttcttagcaaatctgatcactccttttttaagattagctacctgacattcctaccaagtgctgatgagatttacgactgcaaggtggagcactggggactcgatgagcccctgctgaaacattgggagcctgaaatccccgcccctatgtccgagttaaccgaaactgtggtgtgtgctctgggcctctccgtgggcctggtcggcattgtcgtgggcacagtgcttatcattcgagggctgcggagcgttggcgcctctcgccaccaaggcccgctgtag

SEQ ID NO: 285584 - DNA, 765 bp, Artificial Sequence
  derived and/or modified sequence
atgatcctgaacaaggccctgatgctgggcgccctggccctgaccaccgtgatgagcccctgtggcggggaggacatcgtggccgaccacgtggccagctatggagtgaacctgtaccagagctatggccccagcggccagttcacccatgaatttgatggagatgaggagttctacgtggacctggagaggaaggagaccgtgtggaagctgcccctcttccaccggctgcgctttgacccccagtttgccctgaccaacattgctgtgctgaagcacaacctgaacatcctgatcaagaggagcaacagcacagctgccaccaatgaggtgcctgaggtgacagtgttcagcaagagccctgtgaccctgggccagcccaacaccctcatctgcctggtggacaacatcttcccccctgtggtgaacatcacctggctgagcaatggccacagcgtgacagagggcgtgtctgagaccagcttcctgagcaagagtgaccacagcttcttcaagatctcctacctgaccttcctgcccagcgcagatgagatctatgactgcaaggtggagcactggggcctggatgagcccctgctgaagcactgggagcctgagatcccagcccccatgtctgagctgacagaaacagtggtgtgtgccctgggcctgtctgtgggcctggtgggcatcgtggtgggcaccgtgctgatcatccggggcctgcggtctgtgggcgccagccgccaccagggccccctgtag

SEQ ID NO: 285585 - DNA, 1203 bp, Artificial Sequence
  derived and/or modified sequence
tcctcacaattactctacagctcagaacagcaactgctgaggctgccttgggaagaagatgatcctaaacaaagctctgatgctgggggccctcgccctgaccaccgtgatgagcccttgtggaggtgaagacattgtggctgaccacgttgcctcttacggtgtaaacttgtaccagtcttacggtccctctggccagttcacccatgaatttgatggagacgaggagttctatgtggacctggagaggaaggagactgtctggaagttgcctctgttccacagacttagatttgacccgcaatttgcactgacaaacatcgctgtgctaaaacataacttgaacatcctgattaaacgctccaactctaccgctgctaccaatgaggttcctgaggtcacagtgttttccaagtctcccgtgacactgggtcagcccaacaccctcatctgtcttgtggacaacatctttcctcctgtggtcaacatcacctggctgagcaatgggcactcagtcacagaaggtgtttctgagaccagcttcctctccaagagtgatcattccttcttcaagatcagttacctcaccttcctcccttctgctgatgagatttatgactgcaaggtggagcactggggcctggatgagcctcttctgaaacactgggagcctgagattccagcacctatgtcagagctcacagagactgtggtctgtgccctggggttgtctgtgggcctcgtgggcattgtggtggggaccgtcttgatcatccgaggcctgcgttcagttggtgcttccagacaccaagggcccttgtgaatcccatcctgaaaaagaagggctgactgaacctatggctaagaattgggacactctcatgtttcaagccaatttcatctcatttcccagatcatatttcatatccagtaacacagaagcaaccaagtacaatatagcctgataatatgttgatttcttagctgacattaatatttctttcttctttgtgttctcacccttggcactgccgcccatccctcaattcaggcaacaatgaagttaatggatactctctgccctttgctcagaattgttatagcaaaaattttaaaaccaaaaaataagtttgtactaatttcaatatggcttttaaaagtatgatggagaaataaattaggataaaggaactttgaatcaca

SEQ ID NO: 285586 - DNA, 1049 bp, Artificial Sequence
  derived and/or modified sequence
gctcagaacagcaactgctgaggctgccttgggaagaagatgatcctaaacaaagctctgatgctgggggccctcgccctgaccaccgtgatgagcccttgtggaggtgaagacattgtggctgaccacgttgcctcttacggtgtaaacttgtaccagtcttacggtccctctggccagttcacccatgaatttgatggagacgaggagttctatgtggacctggagaggaaggagactgtctggaagttgcctctgttccacagacttagatttgacccgcaatttgcactgacaaacatcgctgtgctaaaacataacttgaacatcctgattaaacgctccaactctaccgctgctaccaatgaggttcctgaggtcacagtgttttccaagtctcccgtgacactgggtcagcccaacaccctcatctgtcttgtggacaacatctttcctcctgtggtcaacatcacctggctgagcaatgggcactcagtcacagaaggtgtttctgagaccagcttcctctccaagagtgatcattccttcttcaagatcagttacctcaccttcctcccttctgctgatgagatttatgactgcaaggtggagcactggggcctggatgagcctcttctgaaacactgggagcctgagattccagcacctatgtcagagctcacagagactgtggtctgtgccctggggttgtctgtgggcctcgtgggcattgtggtggggaccgtcttgatcatccgaggcctgcgttcagttggtgcttccagacaccaagggcccttgtgaatcccatcctgaaaaagaaggtaagtttgagatttgttagagctgaagctgcaggaaggaaagtgggaggaggctgtggacatgaatgtggttgaaagttgtaggggaattgggaagtggcatgatgatgacacaggagcccccttggacccatcgatctcatgtctgtcctgttgcaggtgcatcaccatctacagcagcggaagagtggacttgctacatgacctagcactattctctggccc

SEQ ID NO: 285587 - DNA, 1594 bp, Artificial Sequence
  derived and/or modified sequence
ggcagggtttggtttgggtgtcttcagatttccttgtcttgaggtcctcacaattactctacagctcagaacagcaactgctgaggctgccttgggaagaagatgatcctaaacaaagctctgatgctgggggccctcgccctgaccaccgtgatgagcccttgtggaggtgaagacattgtggctgaccacgttgcctcttacggtgtaaacttgtaccagtcttacggtccctctggccagttcacccatgaatttgatggagacgaggagttctatgtggacctggagaggaaggagactgtctggaagttgcctctgttccacagacttagatttgacccgcaatttgcactgacaaacatcgctgtgctaaaacataacttgaacatcctgattaaacgctccaactctaccgctgctaccaatgaggttcctgaggtcacagtgttttccaagtctcccgtgacactgggtcagcccaacaccctcatctgtcttgtggacaacatctttcctcctgtggtcaacatcacctggctgagcaatgggcactcagtcacagaaggtgtttctgagaccagcttcctctccaagagtgatcattccttcttcaagatcagttacctcaccttcctcccttctgctgatgagatttatgactgcaaggtggagcactggggcctggatgagcctcttctgaaacactgggagcctgagattccagcacctatgtcagagctcacagagactgtggtctgtgccctggggttgtctgtgggcctcgtgggcattgtggtggggaccgtcttgatcatccgaggcctgcgttcagttggtgcttccagacaccaagggcccttgtgaatcccatcctgaaaaagaaggtgcatcaccatctacagcagcggaagagtggacttgctacatgacctagcactattctctggcccgatttatcataccctttttctcctgcaaatgtttctcctcttaccttttctctgcttttttttccttaagcttctgtatcccctcagagctcacaaatgcctttgaattctttccctgacctcctgatttttttttcttttctcaggtgttacctactaagagatgcctggggtaagccgcccagctacctaattcctcagtaacatcgatctaaaatctccatggaagcaataaattccctttaagagatctatgtcaaatttttccatctttcatccggggctgactgaacctatggctaagaattgggacactctcatgtttcaagccaatttcatctcatttcccagatcatatttcatatccagtaacacagaagcaaccaagtacaatatagcctgataatatgttgatttcttagctgacattaatatttctttcttctttgtgttctcacccttggcactgccgcccatccctcaattcaggcaacaatgaagttaatggatactctctgccctttgctcagaattgttatagcaaaaattttaaaaccaaaaaataagtttgtactaatttcaatatggcttttaaaagtatgatggagaaataaattaggataaaggaactttgaatcaca

SEQ ID NO: 285588 - DNA, 1382 bp, Artificial Sequence
  derived and/or modified sequence
ggcagggtttggtttgggtgtcttcagatttccttgtcttgaggtcctcacaattactctacagctcagaacagcaactgctgaggctgccttgggaagaagatgatcctaaacaaagctctgatgctgggggccctcgccctgaccaccgtgatgagcccttgtggaggtgaagacattgtggctgaccacgttgcctcttacggtgtaaacttgtaccagtcttacggtccctctggccagttcacccatgaatttgatggagacgaggagttctatgtggacctggagaggaaggagactgtctggaagttgcctctgttccacagacttagatttgacccgcaatttgcactgacaaacatcgctgtgctaaaacataacttgaacatcctgattaaacgctccaactctaccgctgctaccaatgaggttcctgaggtcacagtgttttccaagtctcccgtgacactgggtcagcccaacaccctcatctgtcttgtggacaacatctttcctcctgtggtcaacatcacctggctgagcaatgggcactcagtcacagaaggtgtttctgagaccagcttcctctccaagagtgatcattccttcttcaagatcagttacctcaccttcctcccttctgctgatgagatttatgactgcaaggtggagcactggggcctggatgagcctcttctgaaacactgggagcctgagattccagcacctatgtcagagctcacagagactgtggtctgtgccctggggttgtctgtgggcctcgtgggcattgtggtggggaccgtcttgatcatccgaggcctgcgttcagttggtgcttccagacaccaagggcccttgtgaatcccatcctgaaaaagaaggtgttacctactaagagatgcctggggtaagccgcccagctacctaattcctcagtaacatcgatctaaaatctccatggaagcaataaattccctttaagagatctatgtcaaatttttccatctttcatccggggctgactgaacctatggctaagaattgggacactctcatgtttcaagccaatttcatctcatttcccagatcatatttcatatccagtaacacagaagcaaccaagtacaatatagcctgataatatgttgatttcttagctgacattaatatttctttcttctttgtgttctcacccttggcactgccgcccatccctcaattcaggcaacaatgaagttaatggatactctctgccctttgctcagaattgttatagcaaaaattttaaaaccaaaaaataagtttgtactaatttcaatatggcttttaaaagtatgatggagaaataaattaggataaaggaactttgaatcaca

SEQ ID NO: 285589 - DNA, 765 bp, Artificial Sequence
  derived and/or modified sequence
atgatcctgaacaaggccctgatgctgggcgccctggccctgaccactgtgatgtcaccatgcggcggggaggacatcgtggcagaccacgtggcttcctatggggttaacttgtatcagagctatgggccaagtgggcaatttactcacgagtttgacggcgacgaagagttttacgtcgacctggagcgaaaagagaccgtatggaaacttccactgtttcatcgtctgcggttcgacccccagttcgccctgacaaatatcgcagtattgaagcataacttaaatatactgattaagagatccaattcaactgccgcaacaaacgaagttccagaagtgacagtcttttccaaaagcccagtaacacttggacagccaaataccttgatctgcctggtcgataacatcttcccccctgttgtgaacataacctggctttccaatgggcattccgtgactgagggagtcagtgagacctccttcttatccaagagcgatcattcgttctttaaaataagctaccttacattccttccttcggcagacgaaatctacgactgcaaggtcgagcactggggattagacgagccgcttctcaaacactgggaacccgaaattcccgcaccaatgagtgaactaaccgagaccgtcgtttgcgcccttggactctcagtgggtctggtcggaattgtcgtgggaacagtgttgatcattcgaggcctgaggtccgtgggagcctcccggcatcaaggccccctctag

SEQ ID NO: 285590 - DNA, 765 bp, Artificial Sequence
  derived and/or modified sequence
atgatcctgaacaaggccctgatgctgggcgccctggccctgaccaccgtcatgtcgccctgtgggggtgaagacattgtcgccgatcacgtcgcgtcgtacggcgtgaatctgtatcagtcctacggtccttcaggccaattcactcacgagtttgatggagacgaagagttctatgttgacctcgagcgaaaggaaactgtgtggaaactgcctcttttccaccggttacgcttcgacccacaattcgcacttactaatattgcggttcttaagcataacctgaatatactcatcaaacggagtaattccacagccgctactaacgaagtccccgaagtcactgtgttcagcaaatccccagtgactctggggcagcccaatacgctgatctgccttgtggataacatattcccccccgtagtaaacattacatggctctcaaacgggcattccgtgaccgagggcgtctcagagacaagtttcctttcaaaatcggaccacagctttttcaagattagctatctgacctttctgcctagcgctgacgagatatacgactgcaaagtggagcactggggattggacgaaccacttttaaaacactgggagcctgagatccctgctccaatgagcgaattgactgagaccgttgtgtgcgccctgggcctctcagttgggttggttggcattgtggtgggaaccgttctgatcattagggggctgagatctgtcggcgctagccggcatcaagggccactgtag

SEQ ID NO: 285591 - DNA, 765 bp, Artificial Sequence
  derived and/or modified sequence
atgatcctgaacaaggccctgatgctgggcgccctggccctgaccacagtgatgtctccatgcgggggtgaagatattgtcgccgatcatgtggccagctacggcgtaaatctctatcagagctatggaccctccgggcagtttacgcacgagttcgatggggatgaggagttttacgttgacttggaacgtaaggagaccgtatggaaactgccattgtttcatcggttgcgctttgaccctcaatttgccctgaccaatatagcggttctcaaacacaacctgaatatcctgattaagcgtagcaattctactgctgcgaccaatgaggtccctgaagtgaccgtcttttcaaagtcacctgttacgctgggccaacccaacacccttatttgtttagtcgataatatctttccacctgtggtcaacattacatggctctcgaacggtcacagtgttacagaaggcgtcagcgagacaagttttttaagcaagagtgaccactcattctttaagattagttatctcacctttttgccgagtgctgacgagatctatgactgtaaggtggagcactggggtcttgatgagccactgctgaagcattgggagccagaaatacctgccccaatgagtgagcttaccgagacagtggtttgcgctctcggcctatcagttggtcttgtgggcatcgtcgtggggaccgtgctgatcatcagaggactgcggagtgttggggccagtagacaccaggggccattgtag

SEQ ID NO: 285592 - DNA, 765 bp, Artificial Sequence
  derived and/or modified sequence
atgatcctgaacaaggccctgatgctgggcgccctggccctgaccactgtgatgtcgccatgcggaggggaggatattgtggccgatcacgttgccagctatggggtgaatttataccaatcctatgggccatccggccagttcacacacgaattcgatggcgacgaggagttttatgtcgacctcgaacgcaaagagactgtgtggaagctgccgctgtttcatagactgaggtttgatccacagtttgccttgaccaacattgctgttctcaagcacaatctgaatatactcatcaagagatcaaacagcactgcggctaccaacgaggttccagaagtgacggtattttcaaagagcccagttaccttgggccagccgaacaccctgatatgtctggtggataacatcttcccacctgtggtgaatataacctggttaagcaatggtcacagcgtgactgaaggagtgagtgaaacttcattcctaagcaagtctgaccactctttcttcaaaatcagctacctcaccttcctgccgtccgcagacgaaatttacgattgtaaagtggagcactggggtctggacgagcctctgcttaaacattgggaacctgaaatccccgcccctatgagcgagttgactgaaactgttgtgtgcgcactgggtttgagcgttggccttgtgggaattgtcgtgggtactgtgctgatcattagggggctgcgcagtgttggagcatccagacaccagggccctctgtag

SEQ ID NO: 285593 - DNA, 765 bp, Artificial Sequence
  derived and/or modified sequence
atgatcctgaacaaggccctgatgctgggcgccctggccctgaccacagtgatgtccccctgcgggggcgaagatatagtggcagatcacgtggcaagctacggcgtaaacctgtaccagagctacggaccctctggacagttcacccatgagtttgatggtgacgaagaattttacgtggacctggagcggaaggagacggtgtggaaactaccattgttccaccgtctcaggttcgatcctcagttcgccctgactaacatagctgtgctcaagcacaatttgaacatcttgatcaaaagaagtaactcgacagccgccaccaatgaggtgcccgaagtcaccgtctttagcaagtcaccagtgaccttaggacagccaaataccctgatctgtctggtcgacaatatttttccgccagttgtcaacattacctggttgtctaacgggcactctgtgactgagggagtgagtgagacaagttttcttagcaaaagcgatcacagtttttttaagataagctacttaacatttctccccagtgcggacgagatctacgattgtaaagtcgagcactggggactagacgaaccgcttcttaaacattgggagcccgagataccggctccaatgtcagagctcacagaaacagtggtctgcgctctgggcttgtctgtcgggctcgtgggtattgtcgtggggacagtgctgatcatccgcgggctgcgctcagtaggggcgtctaggcatcagggtcccctatag

SEQ ID NO: 285594 - DNA, 765 bp, Artificial Sequence
  derived and/or modified sequence
atgatcctgaacaaggccctgatgctgggcgccctggccctgaccaccgtcatgagtccatgcggaggggaggacatcgtggcagaccatgtggcatcatacggggtgaacctctatcagtcgtatgggccgagtgggcagttcacacatgagttcgatggcgacgaggaattttacgtagatctcgaaaggaaggaaacggtttggaaattgcctctctttcatagactgaggtttgaccctcaatttgccctgacgaacatagccgtgctgaaacataatttgaatatattaatcaagaggagcaactctaccgcagccaccaacgaggtccccgaggtgaccgtgttttctaagagcccagtgaccctgggtcagccaaataccctcatctgtctcgtggataacattttccccccagttgttaatatcacatggctctctaatggacacagtgtcacagagggagtctccgagacttcctttttatcgaaaagcgatcattccttttttaaaataagctatcttacctttctcccctctgccgatgaaatttacgattgtaaagtggaacactggggcctggatgagcctttactgaagcactgggagcccgaaatccctgccccaatgagcgagctcacagaaactgtggtgtgcgccctggggctatccgtcgggctggtggggattgtggttgggactgtcttgattatcaggggcctccggtccgtgggcgctagtcgacaccaaggtcctttatag

SEQ ID NO: 285595 - DNA, 765 bp, Artificial Sequence
  derived and/or modified sequence
atgatcctgaacaaggccctgatgctgggcgccctggccctgaccaccgttatgtccccgtgcggaggggaggatattgtcgcggaccacgtggcttcttatggagttaatctgtatcagtcttatggacccagcggccaattcacgcatgaattcgatggggatgaagagttttatgtggacctggaacgcaaagagacggtgtggaaactcccgttgttccaccgcctgaggttcgacccacaatttgccttgactaatatagctgtgctaaagcataatttaaatatactaatcaagaggtcgaactccactgccgcaacaaatgaggtcccagaagtgacagtgttttccaagtcacccgtcaccttaggacagccaaacacactgatctgcttagtggataacatttttccgcccgttgtcaatatcacctggctgtccaatgggcacagcgttactgagggagtgtccgaaacctcattcctgagtaaatcagaccactcgtttttcaagattagctacctcaccttcttaccatctgccgatgaaatatatgattgcaaagtggagcactggggcctggatgaacctttgctgaagcactgggaacccgaaatccctgcgcccatgtctgagctgacagagactgttgtgtgcgcactgggtctttctgtcggactcgttgggattgtggtcggaacagtgctgatcatcagaggcctgcgtagtgtgggggctagtcggcatcagggcccgttatag

SEQ ID NO: 285596 - DNA, 765 bp, Artificial Sequence
  derived and/or modified sequence
atgatcctgaacaaggccctgatgctgggcgccctggccctgaccactgtgatgtctccatgtggaggggaagatatcgtcgctgatcatgtggcttcctatggggtcaatttgtatcaatcctacggcccctcgggacagttcacccacgaatttgatggagacgaggaattctatgtcgatctggagcgcaaggagacggtatggaagttgccgctcttccacaggctgcggtttgacccccagtttgcgcttactaacattgccgtcctcaaacacaacctcaatatcctgattaaacgcagtaactctaccgcagctaccaacgaagtcccagaagttaccgtgttctccaagtcacctgtgaccttaggtcagccgaacaccctaatctgcctggtggacaacattttccccccagtcgttaacattacttggctttctaatggccactccgtcacagaaggagtgagcgagaccagttttttgtctaaatccgaccactcgttcttcaagataagctatctaacatttctgccttccgcagacgaaatatacgactgtaaggtagaacactggggcctagatgaaccactgctaaaacactgggagcccgagatccccgcacctatgtccgagttgactgagactgtggtttgtgcactgggcttatcagtgggtttagttgggatagtggttggtaccgtgctaataatccgtggtctgaggtctgtgggggccagtagacaccagggacctttgtag

SEQ ID NO: 285597 - DNA, 765 bp, Artificial Sequence
  derived and/or modified sequence
atgattctaaacaaggctctaatgttaggcgcattggcactgactaccgttatgtctccctgcggtggcgaggatattgtagcagatcacgtcgctagctacggagtcaatttgtaccagagctacggcccaagcggacagttcacgcatgaatttgacggggacgaggagttctacgtggacctggagcgaaaggaaactgtgtggaagctccccctattccacagactcagatttgacccccagtttgcgctaactaatatcgcagtcctcaaacacaatctgaacatcctcatcaaacgcagtaacagcacagccgctacgaacgaagtcccagaggtcacagtctttagtaaatcacctgtcaccctcggacagcccaacaccttgatttgtttggtggacaatatcttcccccctgtcgtgaacataacttggctgagtaacgggcatagtgtgacggaaggagtgagtgaaacgtcttttctgagcaaaagcgaccacagctttttcaagatttcgtatctaacctttttgcctagtgctgacgagatttatgattgcaaggtggagcactggggtctggacgagcccctcctgaaacattgggaaccagagatccccgcacccatgtctgagctcaccgaaactgtggtctgcgcgttgggcttgtctgtcggactcgtggggattgtggttggcaccgtgctaatcatcagaggcctgcggtccgtcggagcgtctcggcatcaaggtcctctgtag

SEQ ID NO: 285598 - DNA, 765 bp, Artificial Sequence
  derived and/or modified sequence
atgatcttgaataaagctcttatgctcggagcgctcgccctgaccactgtgatgtccccatgtggaggtgaagatattgtggcggaccacgtggcttcgtatggggtcaatttgtaccaatcttatggtccatcaggccagttcacacacgagtttgacggggatgaagagttttacgtggaccttgagcgtaaagaaaccgtctggaaactcccccttttccataggctaagatttgatccccagttcgcattgacaaacatagccgttttaaagcacaatttgaatattttgattaagcgcagtaattcaacagcggctacaaacgaggtaccagaggttacagtgtttagtaagtcccccgtcacccttggccagcccaacaccctcatatgcctggtcgacaacattttcccacctgtagtgaatatcacatggttgtctaacggccacagcgttacagaaggtgtctctgagacctccttcctgagcaagagtgaccatagctttttcaaaatcagctacctcacattccttccttctgcagacgaaatctacgattgtaaggtggagcactgggggctggatgaaccactgctaaaacattgggagccagaaattccagcccctatgagtgaactgaccgagactgtggtttgtgcactggggctctctgttggcctcgtaggaattgtggttggtacggtccttattatacggggactgagatcagtcggagcttcccgccaccaaggtccactttag

SEQ ID NO: 285599 - DNA, 765 bp, Artificial Sequence
  derived and/or modified sequence
atgattctgaacaaggctttgatgttaggcgctctcgcccttacaactgttatgtcgccttgcgggggagaagatatcgtcgcagaccatgtggcatcctatggcgtcaatctttatcagtcgtatggtcccagtggccagttcactcacgagttcgacggagatgaggagttctacgttgacctcgagcgtaaggaaaccgtttggaaactcccattattccacaggctgaggtttgatccccagttcgcactcaccaacatcgcggtgttaaaacataatctaaacatcctcatcaaaagatctaatagcactgctgctacaaatgaagtgccggaggtgacagtgttcagcaagtcgccggtgactctcggacagcccaacacacttatctgtctggtggataatattttcccccctgtcgttaacattacctggttgtctaatggacatagcgtgacagaaggcgtctccgagacctccttcttgtctaaatcggatcactccttctttaaaatcagctacctcacattcttaccctccgctgatgagatctatgactgtaaagtggagcactgggggctcgatgagccgcttctcaagcattgggagccagagatccccgctccaatgagcgagttgaccgaaaccgttgtgtgcgctctaggcctctcagttggcttggtcgggatcgtagtgggtacagtcctgattatacggggtctgagatccgtgggagcaagcagacaccagggtccgctgtag

SEQ ID NO: 285600 - DNA, 765 bp, Artificial Sequence
  derived and/or modified sequence
atgattttgaataaggctctcatgctgggggctcttgctcttacgaccgtgatgtctccttgcggcggagaggatatcgtggccgaccacgtggctagctacggggtgaacctatatcagagctacggaccctctgggcaatttacacacgagttcgacggggacgaggaattttacgtagatttggagaggaaggaaaccgtctggaagttacccctctttcaccgactgaggtttgacccgcagtttgccctgaccaatattgcagtgctgaagcacaacctgaatatcttgataaaacggtcaaattccaccgcggcaaccaacgaagtgcctgaagtgacagtgttctcaaaaagtcccgttacattgggacaaccaaatactctgatctgcctcgtggacaatatattcccacccgtagtcaacattacttggctgtctaatgggcacagcgtgaccgagggagtatcggagacatcctttctgagcaaaagcgaccacagcttttttaaaatctcgtatctgaccttcctgccgtccgcagatgagatctacgattgtaaggttgagcactggggtctagacgagcctctcctcaagcactgggagccagagattcccgctccaatgagcgagctgaccgagacggtagtgtgtgcattgggcctcagcgtggggcttgtgggtatagtcgtgggaactgtcctgattatccggggtttaaggtctgtgggagcgagccgacaccagggacctctgtag

SEQ ID NO: 285601 - DNA, 765 bp, Artificial Sequence
  derived and/or modified sequence
atgattctcaacaaggcgctgatgttgggcgctctggcgctgaccaccgtgatgtccccttgtgggggagaggacattgtggccgatcatgtggcaagctacggggtcaacctctatcagagctacgggccttcaggtcagtttacccacgagtttgatggggacgaggagttttatgtggacttagagagaaaagagacagtctggaagctcccgctctttcataggctgaggttcgatcctcagtttgcattgactaacattgctgttctgaaacataatctaaacattctcattaagaggagtaactccaccgccgcaaccaacgaggtgcccgaggtaacagtttttagcaaaagccccgtcaccctgggccaacccaatacgttgatttgtctggtcgataatatttttcctcccgtcgtcaatattacatggctcagcaacggacacagtgtgactgagggggtgtctgagacatccttcctgagcaaatcggaccattcctttttcaagattagttaccttactttcctcccaagcgctgatgaaatttacgactgtaaagtggagcattggggattagatgagcctctgctgaaacactgggaaccagaaattcctgcccctatgtctgaactcaccgaaacagtagtgtgtgcattgggcctctccgtgggcttggttggtatcgtcgtgggcacagtcttaatcattaggggtctgcgcagcgtgggcgctagtcgacaccaaggtccactatag

SEQ ID NO: 285602 - DNA, 765 bp, Artificial Sequence
  derived and/or modified sequence
atgatccttaataaagcactgatgctgggggcactggcgttgaccacagttatgagtccatgtggcggagaggatattgtggccgaccacgtcgccagctatggtgtgaacctgtaccagtcttacggcccaagcgggcagttcacacacgagttcgatggtgatgaagagttttatgtggacctggagaggaaagagaccgtgtggaaactacccctttttcataggctccgattcgatccccagtttgctctgacgaacattgccgtgctgaaacataaccttaatatactgatcaaacgtagtaactccactgccgctacaaacgaggtacctgaagtcacggtgttctccaaatcacccgttacattgggtcaacctaacacccttatctgtttggtcgacaacattttccctccagttgtgaatatcacttggctgtcaaatggacatagcgtgacggaaggagtctcagagacatcctttctcagcaaaagcgaccacagtttctttaagatcagctacctcacattccttccctctgctgacgaaatctacgattgcaaagttgagcattgggggctggacgagccacttctgaagcattgggagcctgagatccctgcaccaatgagcgaactgactgaaaccgtagtatgcgcgcttggactctccgttggactagtggggatcgtggtggggaccgttctgattatccgcggactccgaagcgttggtgcaagtcggcaccagggccctctgtag

SEQ ID NO: 285603 - DNA, 765 bp, Artificial Sequence
  derived and/or modified sequence
atgattctgaacaaagcacttatgctaggcgcactagctttgacaactgtaatgtcaccgtgcggcggagaagatattgtggccgaccacgtagcttcctacggtgtgaacctttaccagtcctatggcccttccgggcagtttactcatgaattcgatggtgatgaagagttctatgtggacttggaaaggaaagaaactgtttggaaactgccgctgtttcatcggctacgattcgacccccagttcgcgctgactaacatcgccgtacttaaacacaatttgaacatcctgataaagaggtccaattccactgccgctaccaacgaagtgccagaggtcactgtcttctccaaatcccccgtgaccctgggccagcccaatactctgatctgcctggtggataacatctttcccccagtggtcaacattacttggctgagtaatgggcacagtgtgacggaaggcgtgagtgagacctccttcttaagtaaaagcgaccactctttttttaaaataagttacctgacttttctgccaagtgcagacgagatttacgactgtaaggtcgaacactggggtctggatgagcccttacttaaacactgggaacctgagatacctgctccgatgtccgagcttactgaaacggtggtgtgtgccctgggcttgtcagtcggtcttgtagggatcgtggtgggaactgtactgatcatccggggactccgcagtgtaggagcaagtaggcatcaagggcctctctag

SEQ ID NO: 285604 - DNA, 765 bp, Artificial Sequence
  derived and/or modified sequence
atgatcctgaacaaagccctgatgcttggggcattggctctcactaccgtgatgtcgccatgcggcggagaagatattgtcgccgaccatgtggcttcttacggagtcaacttataccagagttatggcccttccggacagttcactcacgagtttgatggggatgaggagttttacgtcgacctcgaaaggaaagagaccgtctggaaactaccactatttcacaggttgcgatttgatccacagtttgccctcacaaacattgccgtcctgaagcacaacctgaatatactgatcaagcggtccaactcgacagctgctacaaacgaggtacccgaagtgactgtgttctctaaatctcctgtgactctcggacagcccaacacactgatctgcctcgttgacaatattttcccccctgtggtaaatattacatggctgagcaacgggcactctgtcacagagggagtctcagagacctcatttctttccaaatcggaccatagtttcttcaaaattagctatctcacctttcttccctctgcagacgagatttacgattgtaaagtggagcactggggcctggatgaaccactgctcaaacactgggagccagagatacctgcccctatgtccgagctgaccgagactgtggtgtgtgctttgggtctgagcgtgggtttagtgggaatcgtggtaggaaccgtgctcattataaggggactccgctcggtgggagctagtcggcaccagggacctctttag

SEQ ID NO: 285605 - DNA, 765 bp, Artificial Sequence
  derived and/or modified sequence
atgatcctgaacaaggccctgatgctgggcgccctggccctgaccaccgtgatgagcccctgcggcggcgaggacatcgtggccgaccacgtggccagctacggcgtgaacctgtaccagagctacggccccagcggccagttcacccacgagttcgacggcgacgaggagttctacgtggacctggagagaaaggagaccgtgtggaagctgcccctgttccacagactgagattcgacccccagttcgccctgaccaacatcgccgtgctgaagcacaacctgaacatcctgatcaagagaagcaacagcaccgccgccaccaacgaggtgcccgaggtgaccgtgttcagcaagagccccgtgaccctgggccagcccaacaccctgatctgcctggtggacaacatcttcccccccgtggtgaacatcacctggctgagcaacggccacagcgtgaccgagggcgtgagcgagaccagcttcctgagcaagagcgaccacagcttcttcaagatcagctacctgaccttcctgcccagcgccgacgagatctacgactgcaaggtggagcactggggcctggacgagcccctgctgaagcactgggagcccgagatccccgcccccatgagcgagctgaccgagaccgtggtgtgcgccctgggcctgagcgtgggcctggtgggcatcgtggtgggcaccgtgctgatcatcagaggcctgagaagcgtgggcgccagcagacaccagggccccctgtag

SEQ ID NO: 285606 - protein, 416 aa, Artificial Sequence
  derived and/or modified sequence
MKMQKGNVLLMFGLLLHLEAATNSNETSTSANTGSSVISSGASTATNSGSSVTSSGVSTATISGSSVTSNGVSIVTNSEFHTTSSGISTATNSEFSTVSSGISIATNSESSTTSSGASTATNSESSTPSSGASTATNSDSSTTSSGASTATNSDSSTTSSEASTATNSESSTTSSGASTATNSESSTTSSGASTATNSESSTTSSGASTATNSGSSTTSSGTSTATNSESSTVSSGASTATTSESSTTSSGASTATNSESSTVSSGASTATNSESSTTSSGANTATNSGSSVTSAGSGTAALTGMHTTSHSASTAVSEAKPGGSLVPWEIFLITLVSVVAAVGLFAGLFFCVRNSLSLRNTFNTAVYHPHGLNHGLGPGPGGNHGAPHRPRWSPNWFWRRPVSSIAMEMSGRNSGP

SEQ ID NO: 285607 - protein, 416 aa, Artificial Sequence
  derived and/or modified sequence
MKMQKGNVLLMFGLLLHLEAATNSNETSTSANTGSSVISSGASTATNSGSSVTSSGVSTATISGSSVTSNGVSIVTNSEFHTTSSGISTATNSEFSTASSGISIATNSESSTTSSGASTATNSESSTPSSGASTATNSDSSTTSSGASTATNSDSSTTSSEASTATNSESSTTSSGASTATNSESSTTSSGASTATNSESSTTSSGASTATNSGSSTTSSGTSTATNSESSTVSSGASTATTSESSTTSSGASTATNSESSTVSSGASTATNSESSTTSSGANTATNSGSSVTSAGSGTAALTGMHTTSHSASTAVSEAKPGGSLVPWEIFLITLVSVVAAVGLFAGLFFCVRNSLSLRNTFNTAVYHPHGLNHGLGPGPGGNHGAPHRPRWSPNWFWRRPVSSIAMEMSGRNSGP

SEQ ID NO: 285608 - protein, 596 aa, Artificial Sequence
  derived and/or modified sequence
MKMQKGNVLLMFGLLLHLEAATNSNETSTSANTGSSVISSGASTATNSGSSVTSSGVSTATISGSSVTSNGVSIVTNSEFHTTSSGISTATNSEFSTASSGISIATNSESSTTSSGASTATNSESSTPSSGASTVTNSGSSVTSSGASTATNSESSTVSSRASTATNSESSTLSSGASTATNSDSSTTSSGASTATNSESSTTSSGASTATNSESSTVSSRASTATNSESSTTSSGASTATNSESRTTSNGAGTATNSESSTTSSGASTATNSDSSTVSSGASTATNSESSTTSSGASTATNSESSTTSSGASTATNSDSSTTSSGAGTATNSESSTVSSGISTVTNSESSTPSSGANTATNSESSTTSSGANTATNSESSTVSSGASTATNSESSTTSSGVSTATNSESSTTSSGASTATNSDSSTTSSEASTATNSESSTVSSGISTVTNSESSTTSSGANTATNSGSSVTSAGSGTAALTGMHTTSHSASTAVSEAKPGGSLVPWEIFLITLVSVVAAVGLFAGLFFCVRNSLSLRNTFNTAVYHPHGLNHGLGPGPGGNHGAPHRPRWSPNWFWRRPVSSIAMEMSGRNSGP

SEQ ID NO: 285609 - protein, 295 aa, Artificial Sequence
  derived and/or modified sequence
MASLSRPSLPSCLCSFLLLLLLQVSSSYAGQFRVIGPRHPIRALVGDEVELPCRISPGKNATGMEVGWYRPPFSRVVHLYRNGKDQDGDQAPEYRGRTELLKDAIGEGKVTLRIRNVRFSDEGGFTCFFRDHSYQEEAAMELKVEDPFYWVSPGVLVLLAVLPVLLLQITLGLVFLCLQYRLRGKLRAEIENLHRTFDPHFLRVPCWKITLFVIVPVLGPLVALIICYNWLHRRLAGQFLEELRKFSSLCYKQRIKSQERETEATRGRGGLLRDHIPRGKEELESLGGGKTPPGR

SEQ ID NO: 285610 - protein, 626 aa, Artificial Sequence
  derived and/or modified sequence
MKMQKGNVLLMFGLLLHLEAATNSNETSTSANTGSSVISSGASTATNSGSSVTSSGVSTATISGSSVTSNGVSIVTNSEFHTTSSGISTATNSEFSTASSGISIATNSESSTTSSGASTATNSESSTPSSGASTVTNSGSSVTSSGASTATNSESSTVSSRASTATNSESSTLSSGASTATNSDSSTTSSGASTATNSESSTTSSGASTATNSESSTVSSRASTATNSESSTTSSGASTATNSESRTTSNGAGTATNSESSTTSSGASTATNSDSSTVSSGASTATNSESSTTSSGASTATNSDSSTTSSGAGTATNSESSTTSSGASTATNSESSTTSSGASTATNSDSSTTSSGAGTATNSESSTVSSGISTVTNSESSTPSSGANTATNSESSTTSSGANTATNSESSTVSSGASTATNSESSTTSSGVSTATNSESSTTSSGASTATNSDSSTTSSEASTATNSESSTVSSGISTVTNSESSTTSSGANTATNSGSSVTSAGSGTAALTGMHTTSHSASTAVSEAKPGGSLVPWEIFLITLVSVVAAVGLFAGLFFCVRNSLSLRNTFNTAVYHPHGLNHGLGPGPGGNHGAPHRPRWSPNWFWRRPVSSIAMEMSGRNSGP

SEQ ID NO: 285611 - protein, 566 aa, Artificial Sequence
  derived and/or modified sequence
MKMQKGNVLLMFGLLLHLEAATNSNETSTSANTGSSVISSGASTATNSGSSVTSSGVSTATISGSSVTSNGVSIVTNSEFHTTSSGISTATNSEFSTASSGISIATNSESSTTSSGASTATNSESSTPSSGASTATNSESSTLSSGASTATNSDSSTTSSGASTATNSESSTTSSGASTATNSESSTVSSRASTATNSESSTTSSGASTATNSESRTTSNGAGTATNSESSTTSSGASTATNSDSSTVSSGASTATNSESSTTSSGASTATNSESSTTSSGASTATNSDSSTTSSGAGTATNSESSTVSSGISTVTNSESSTPSSGANTATNSESSTTSSGANTATNSESSTVSSGASTATNSESSTTSSGVSTATNSESSTTSSGASTATNSDSSTTSSEASTATNSESSTVSSGISTVTNSESSTTSSGANTATNSGSSVTSAGSGTAALTGMHTTSHSASTAVSEAKPGGSLVPWEIFLITLVSVVAAVGLFAGLFFCVRNSLSLRNTFNTAVYHPHGLNHGLGPGPGGNHGAPHRPRWSPNWFWRRPVSSIAMEMSGRNSGP

SEQ ID NO: 285612 - protein, 566 aa, Artificial Sequence
  derived and/or modified sequence
MKMQKGNVLLMFGLLLHLEAATNSNETSTSANTGSSVISSGASTATNSGSSVTSSGVSTATISGSSVTSNGVSIVTNSEFHTTSSGISTATNSEFSTASSGISIATNSESSTTSSGASTATNSESSTPSSGASTATNSESSTLSSGASTATNSDSSTTSSGASTATNSESSTTSSGASTATNSESSTVSSRASTATNSESSTTSSGASTATNSESRTTSNGAGTATNSESSTTSSGASTATNSDSSTTSSGAGTATNSESSTTSSGASTATNSESSTTSSGASTATNSDSSTTSSGAGTATNSESSTVSSGISTVTNSESSTPSSGANTATNSESSTTSSGANTATNSESSTVSSGASTATNSESSTTSSGVSTATNSESSTTSSGASTATNSDSSTTSSEASTATNSESSTVSSGISTVTNSESSTTSSGANTATNSGSSVTSAGSGTAALTGMHTTSHSASTAVSEAKPGGSLVPWEIFLITLVSVVAAVGLFAGLFFCVRNSLSLRNTFNTAVYHPHGLNHGLGPGPGGNHGAPHRPRWSPNWFWRRPVSSIAMEMSGRNSGP

SEQ ID NO: 285613 - DNA, 7576 bp, Artificial Sequence
  derived and/or modified sequence
ttggatttaagaaaatgacctcaaaatgtccgtcagagacgtattcccaggaagaaagatattacttctactacaaaccaaatcaaaaggaaatgaaattccaatgcaacaggagtgaactgccacgcctacgggctgttctccaaactgcagcctccagccacgactgcaacgcgcaacccactttcatttctcatgagtcagcggacaccatgtctaggaggaccgaggaaaggcgctctggccttaccagacacgtcggacgtctatgacacagcccctctatccgttgccggcagctggcgccagactctctggtcgcggtttggaactgcgcgggaagtgggtggtgggcgggcaagcggtagtgggttgtcccttggagctgcccaatcgacgtgcattattctgttggcgcacggcggccttcaattaccgtctcattaactgatctcagcagcctgggagacaccacctatttgaactctaagggggcggggctttgggtgtgcctccgctcgactggctgcggttgtgaaagacagcggcagaagccaatcagcaaataagctctttttcggcacacgcagtcgctccacccgggtcgcgaccgttactggtggcgcgcgcggggacttaaagtagatcatggaggacacccaggctattgactgggatgttgaagaagaggaggagacagagcaatccagtgaatccttgaggtgtaacgtggagccagtagggcggctacatatctttagtggtgcccatggaccagaaaaagatttcccactacacctcgggaagaatgtggtaggccgaatgcctgactgctctgtggccctgccctttccatctatctccaaacaacatgcagagattgaaatcttagcctgggacaaggcacctatcctccgagactgtgggagccttaatggtactcaaatcctgagacctcctaaggttttgagccctggggtgagtcaccgtctgagggaccaggaattgattctctttgctgacttgctctgccagtaccatcgcctggatgtctctctgccctttgtctcccggggccctctgacagtagaagagacacccagagtacagggagaaactcaaccccagaggcttctgttggctgaggactcggaggaggaagtagattttctttctgaaaggcgtatggtaaaaaaatcaaggaccacatcttcctctgtgatagttccagagagtgatgaagaggggcattccccggtcctgggcggccttgggccgccttttgccttcaatttgaacagtgacacagatgtggaagaaggtcagcaaccagccacagaggaggcctcctcagctgccagaagaggtgccactgtagaggcaaagcagtctgaagctgaagttgtaactgaaatccagcttgaaaaggatcagcctttagtgaaggagaaggacaatgatacaaaagtcaagaggggtgcagggaatggggtggttccagctggggtgattctggagaggagccaacctcctggagaggacagtgacacagatgtggatgatgacagcaggcctcctggaaggccagctgaggtccatttggaaagggctcagccttttggcttcatcgacagcgacactgatgcggaagaagagaggatcccagcaaccccagttgtcattcctatgaagaagaggaagatcttccatggagtaggtacaaggggtcctggagcaccaggcctggcccatctgcaggagagccaggctggtagtgatacagatgtggaagaaggcaaggccccacaggctgtccctctggagaaaagccaagcttccatggttatcaacagcgatacagatgacgaggaagaagtctcagcagcgctgactttggcacatctgaaagagagccagcctgctatatggaacagagatgcagaagaggacatgccccaacgtgtggtccttctgcagcgaagccaaaccaccactgagagagacagtgacacagacgtggaggaggaagagctcccagtggaaaatagagaagctgtcctcaaggatcacacaaagattagagcccttgttagagcacattcagaaaaggaccaacctccttttggggacagtgatgacagtgtggaagcagataagagctcacctgggatccacctggagagaagccaagcctccaccacagtggacatcaacacacaagtggagaaggaagtcccgccagggtcagccattatacatataaagaagcatcaggtgtctgtggaggggacaaatcaaacagatgtgaaagcagttgggggaccagcaaagctgcttgtggtatctctagaggaagcctggcctctgcatggggactgtgaaacagatgcagaggagggcacctccctaacagcctcagtagttgcagatgtaagaaagagccagcttccagcagaaggggatgctggggcagagtgggctgcagctgttcttaagcaggagagagctcatgaggtgggggcccagggtgggccacctgtggcacaagtggagcaggacctccctatctcaagagagaacctcacagatctggtggtggacacagacactctaggggaatccacccagccacagagagagggagcccaggtccccacaggaagggagagagaacaacatgtgggtgggaccaaggactctgaagacaactatggtgattctgaagatctggacctacaagctacccagtgctttctggagaatcagggcctggaagcagtccagagcatggaggatgaacctacccaggccttcatgttgactccaccccaagagcttggcccttcccattgcagcttccagacaacaggtaccctagatgaaccatgggaggtcctggctacacagccattctgtctgagagagtctgaggactctgagacccagccttttgacacgcaccttgaggcctatggaccttgcctgtctccacctagggcaataccaggagaccaacatccagagagcccagttcacacagagccaatggggattcaaggcagagggaggcagactgtggataaagtcatgggtataccaaaagaaacagcagagagggtgggccctgagagagggccattggagagagaaactgagaaactgctaccagaaagacagacagatgtgacaggagaggaagaattaaccaaggggaaacaggacagagaacaaaaacagttgttagctagagacacccagagacaagaatctgacaaaaatggggaaagtgcaagtcctgaaagagatagggagagtttgaaggtagaaattgagacatctgaggaaatacaagagaaacaagtacagaagcagacccttccaagcaaagcatttgagagagaagtagagagaccagtagcaaacagagagtgcgatccagccgagttagaagagaaggtgcccaaagtgatcctggagagagatacacagagaggggagccagagggagggagccaggaccagaaagggcaggcctccagcccaacaccagagcctggggtgggggcgggggaccttccgggacctacctcagcccccgtaccttctgggagccagtcaggtggaaggggatccccagtgagccccaggaggcatcagaaaggcctcctgaattgcaagatgccacctgctgagaaggcttccaggatcagagctgctgagaaggtttccaggggcgatcaggaatctccagatgcttgtctgcctcctacagtacctgaagccccagccccaccccaaaagccccttaactctcagagccagaaacatcttgcacctccgccccttctttctccccttttaccttctatcaagccaaccgttcgtaagaccaggcaagatgggagtcaggaagctccagaggctcccttgtcctcagagctggagcctttccacccaaagcctaaaattagaactcggaagtcctccagaatgacaccctttccagctacctctgctgcccctgagccccacccttccacctccacagcccagccagtcactcccaagcccacatctcaggccactaggagcaggacaaataggtcctctgtcaagacccctgaaccagttgtccccacagcccctgagctccagccttccacctccacagaccagcctgtcacctctgagcccacatctcaggttactaggggaagaaaaagtagatcctctgtcaagacccctgaaacagttgtgcccacagcccttgagctccagccttccacctccaccgaccgacctgtcacctctgaacccacctctcaggctactaggggaagaaaaaatagatcctctgtcaagacccctgaaccagttgtccccacagcccctgagctccagccttccacctccacagaccagcctgtcacttctgagcccacatatcaggctactaggggaagaaaaaatagatcctctgtcaagacccctgaaccagttgtgcccacagcccctgagctccggccttccacctccacagaccgacctgtcacccccaagcccacatctcggaccactaggagcaggacaaatatgtcctctgtcaagacccctgaaacagttgtccccacagcccctgagctccagatttccacctccacagaccaacctgtcacccctaagcccacatctcggaccactaggagcaggacaaatatgtcctctgtgaagaaccctgaatcaactgtccctatagcccctgagctcccaccttccacctccacagagcagcctgtcacccctgagcccacatctcgggctactaggggaagaaaaaatagatcctctggcaagacccctgaaacacttgtccccacagcccctaagctcgagccttccacttccacagaccaacctgtcactcctgagcccacatctcaggccaccaggggcaggacaaataggtcctctgtgaagacccctgaaacagttgtccccacagcccctgagctccagccttccacctccacagaccagcctgttacccctgagcctacgtctcaggctactaggggaagaacagatagatcctctgtcaagactcctgaaacagttgtccccacagcccctgagctacaggcttccgcctccacagaccagcctgtcacctctgagcccacatctcggaccactaggggaagaaaaaatcggtcctctgtcaagacccctgaaacagttgtgcccgcagcccctgagctccagccttccacctccacagaccaacctgtcacccctgagcccacatctcgggccactaggggcaggacaaataggtcctctgtcaagacccctgaatcaattgtccctatagcccctgagcttcagccttccacctccagaaaccagcttgtcacccctgagcccacatctcgggccactaggtgcaggacaaataggtcctctgtcaagacccctgagccagttgtccccacagcccctgagccccatcctaccacctccacagaccagcctgtcacccccaagctcacatctagggccactaggagaaagacaaataggtcctctgtcaagactcccaaaccagttgaaccagcagcctctgatcttgagccttttacccccacagaccagtccgtcacccctgaggccatagctcagggtggtcagagcaaaacactgaggtcttccacagtaagagctatgccggttcctaccacccctgaattccaatctcctgtcaccacagaccagcctatttcccctgagcctattactcaacccagttgcatcaagaggcagagagccgctgggaaccctggctccctcgcagctcccattgaccataagccttgctctgcacccttggaacctaaatcccaggcctcaaggaaccaaagatggggagcagtgagagcagctgaatcccttacagccattcctgagcctgcctctccccagcttcttgagacaccaattcatgcctcccagatccaaaaggtggaaccagcaggtagatctaggttcaccccggagctccagcctaaggcctctcaaagccgcaagaggtctttagctaccatggattcaccaccacatcaaaaacagccccaaagaggggaagtctcccagaagacagtgattatcaaggaagaggaagaagatactgcagagaagccagggaaggaagaggatgtcgtgactccaaaaccaggcaagagaaagagagaccaggcagaggaggagcccaacagaataccaagccgcagcctccgacggaccaaacttaaccaagaatcaacagcccccaaagtgctcttcacaggagtggtggatgctcggggagagcgggctgtgctggcactggggggaagtctggctggttcagcggcagaggcttcccacctggtcactgatcgcatccgccggacagtcaagttcctgtgtgccctggggcggggaatccccattctgtccctggactggctgcatcagtcccgcaaggctggtttcttcttacccccggatgaatatgtggtgaccgaccctgagcaagagaagaactttggctttagccttcaagacgcactgagcagggctcgggagcgaaggctgctagagggctatgagatctatgtgacccctggagtccagccaccaccacctcagatgggagagattattagctgctgtggaggcacatacctacccagcatgcctcggtcctataagcctcagagagttgtgatcacatgccctcaggacttccctcattgctccattccactacgggttgggctgcccctcctctcgcctgagttcctgctgactggagtgctgaagcaggaagccaagccagaggcctttgtcctctcccctttggagatgtcatccacctgagaactccactacccttttccctcccagaccacgaattagaagatatgtggaagaaagaactcagggcgttagaaaggattggggtatattgatacaacttgtcctggaacatgggtgggaccagaaatctttatgaataaatgaaaagataagggatttggaagccacaggttgttttttgtttgtttgtttgtttttttaatggccattttattttatttgtatttatagttttttatttgtatagatttaggggatacaagatttcttacatgcatgtattaaatggccattttaaaattagctagtttcatgctcagatgtcataagtggcagctatctttagccagactgttgcagttattgctcgatgccactcatggtgtcctacctcctatttggaaaccatctctatttttttcttactgagattcttactttggggtcaggaacttgaagggatgcttggagtgagtagatttgagggtccagttatggagtgctactaaaacattttcttctctcctggcctctggaagcatctttagctttgactttgggcaagtctctgtacttttctggccagcttttccaggatttataaaattagagcttcggcttgacctctgtgataaataaatattcactctgtgcctta

SEQ ID NO: 285614 - DNA, 6506 bp, Artificial Sequence
  derived and/or modified sequence
caccatgtctaggaggaccgaggaaaggcgctctggccttaccagacacgtcggacgtctatgacacagcccctctatccgttgccggcagctggcgccagactctctggtcgcggtttggaactgcgcgggaagtgggtggtgggcgggcaagcggtagtgggttgtcccttggagctgcccaatcgacgtgcattattctgttggcgcacggcggccttcaattaccgtctcattaactgatctcagcagcctgggagacaccacctatttgaactctaagggggcggggctttgggtgtgcctccgctcgactggctgcggttgtgaaagacagcggcagaagccaatcagcaaataagctctttttcggcacacgcagtcgctccacccgggtcgcgaccgttactggtggcgcgcgcggggacttaaagtagatcatggaggacacccaggctattgactgggatgttgaagaagaggaggagacagagcaatccagtgaatccttgaggtgtaacgtggagccagtagggcggctacatatctttagtggtgcccatggaccagaaaaagatttcccactacacctcgggaagaatgtggtaggccgaatgcctgactgctctgtggccctgccctttccatctatctccaaacaacatgcagagattgaaatcttagcctgggacaaggcacctatcctccgagactgtgggagccttaatggtactcaaatcctgagacctcctaaggttttgagccctggggtgagtcaccgtctgagggaccaggaattgattctctttgctgacttgctctgccagtaccatcgcctggatgtctctctgccctttgtctcccggggccctctgacagtagaagagacacccagagtacagggagaaactcaaccccagaggcttctgttggctgaggactcggaggaggaagtagattttctttctgaaaggcgtatggtaaaaaaatcaaggaccacatcttcctctgtgatagttccagagagtgatgaagaggggcattccccggtcctgggcggccttgggccgccttttgccttcaatttgaacagtgacacagatgtggaagaaggtcagcaaccagccacagaggaggcctcctcagctgccagaagaggtgccactgtagaggcaaagcagtctgaagctgaagttgtaactgaaatccagcttgaaaaggatcagcctttagtgaaggagaaggacaatgatacaaaagtcaagaggggtgcagggaatggggtggttccagctggggtgattctggagaggagccaacctcctggagaggacagtgacacagatgtggatgatgacagcaggcctcctggaaggccagctgaggtccatttggaaagggctcagccttttggcttcatcgacagcgacactgatgcggaagaagagaggatcccagcaaccccagttgtcattcctatgaagaagaggaagatcttccatggagtaggtacaaggggtcctggagcaccaggcctggcccatctgcaggagagccaggctggtagtgatacagatgtggaagaaggcaaggccccacaggctgtccctctggagaaaagccaagcttccatggttatcaacagcgatacagatgacgaggaagaagtctcagcagcgctgactttggcacatctgaaagagagccagcctgctatatggaacagagatgcagaagaggacatgccccaacgtgtggtccttctgcagcgaagccaaaccaccactgagagagacagtgacacagacgtggaggaggaagagctcccagtggaaaatagagaagctgtcctcaaggatcacacaaagattagagcccttgttagagcacattcagaaaaggaccaacctccttttggggacagtgatgacagtgtggaagcagataagagctcacctgggatccacctggagagaagccaagcctccaccacagtggacatcaacacacaagtggagaaggaagtcccgccagggtcagccattatacatataaagaagcatcaggtgtctgtggaggggacaaatcaaacagatgtgaaagcagttgggggaccagcaaagctgcttgtggtatctctagaggaagcctggcctctgcatggggactgtgaaacagatgcagaggagggcacctccctaacagcctcagtagttgcagatgtaagaaagagccagcttccagcagaaggggatgctggggcagagtgggctgcagctgttcttaagcaggagagagctcatgaggtgggggcccagggtgggccacctgtggcacaagtggagcaggacctccctatctcaagagagaacctcacagatctggtggtggacacagacactctaggggaatccacccagccacagagagagggagcccaggtccccacaggaagggagagagaacaacatgtgggtgggaccaaggactctgaagacaactatggtgattctgaagatctggacctacaagctacccagtgctttctggagaatcagggcctggaagcagtccagagcatggaggatgaacctacccaggccttcatgttgactccaccccaagagcttggcccttcccattgcagcttccagacaacaggtaccctagatgaaccatgggaggtcctggctacacagccattctgtctgagagagtctgaggactctgagacccagccttttgacacgcaccttgaggcctatggaccttgcctgtctccacctagggcaataccaggagaccaacatccagagagcccagttcacacagagccaatggggattcaaggcagagggaggcagactgtggataaagtcatgggtataccaaaagaaacagcagagagggtgggccctgagagagggccattggagagagaaactgagaaactgctaccagaaagacagacagatgtgacaggagaggaagaattaaccaaggggaaacaggacagagaacaaaaacagttgttagctagagacacccagagacaagaatctgacaaaaatggggaaagtgcaagtcctgaaagagatagggagagtttgaaggtagaaattgagacatctgaggaaatacaagagaaacaagtacagaagcagacccttccaagcaaagcatttgagagagaagtagagagaccagtagcaaacagagagtgcgatccagccgagttagaagagaaggtgcccaaagtgatcctggagagagatacacagagaggggagccagagggagggagccaggaccagaaagggcaggcctccagcccaacaccagagcctggggtgggggcgggggaccttccgggacctacctcagcccccgtaccttctgggagccagtcaggtggaaggggatccccagtgagccccaggaggcatcagaaaggcctcctgaattgcaagatgccacctgctgagaaggcttccaggatcagagctgctgagaaggtttccaggggcgatcaggaatctccagatgcttgtctgcctcctacagtacctgaagccccagccccaccccaaaagccccttaactctcagagccagaaacatcttgcacctccgccccttctttctccccttttaccttctatcaagccaaccgttcgtaagaccaggcaagatgggagtcaggaagctccagaggctcccttgtcctcagagctggagcctttccacccaaagcctaaaattagaactcggaagtcctccagaatgacaccctttccagctacctctgctgcccctaagctcgagccttccacttccacagaccaacctgtcactcctgagcccacatctcaggccaccaggggcaggacaaataggtcctctgtgaagacccctgaaacagttgtccccacagcccctgagctccagccttccacctccacagaccagcctgttacccctgagcctacgtctcaggctactaggggaagaacagatagatcctctgtcaagactcctgaaacagttgtccccacagcccctgagctacaggcttccgcctccacagaccagcctgtcacctctgagcccacatctcggaccactaggggaagaaaaaatcggtcctctgtcaagacccctgaaacagttgtgcccgcagcccctgagctccagccttccacctccacagaccaacctgtcacccctgagcccacatctcgggccactaggggcaggacaaataggtcctctgtcaagacccctgaatcaattgtccctatagcccctgagcttcagccttccacctccagaaaccagcttgtcacccctgagcccacatctcgggccactaggtgcaggacaaataggtcctctgtcaagacccctgagccagttgtccccacagcccctgagccccatcctaccacctccacagaccagcctgtcacccccaagctcacatctagggccactaggagaaagacaaataggtcctctgtcaagactcccaaaccagttgaaccagcagcctctgatcttgagccttttacccccacagaccagtccgtcacccctgaggccatagctcagggtggtcagagcaaaacactgaggtcttccacagtaagagctatgccggttcctaccacccctgaattccaatctcctgtcaccacagaccagcctatttcccctgagcctattactcaacccagttgcatcaagaggcagagagccgctgggaaccctggctccctcgcagctcccattgaccataagccttgctctgcacccttggaacctaaatcccaggcctcaaggaaccaaagatggggagcagtgagagcagctgaatcccttacagccattcctgagcctgcctctccccagcttcttgagacaccaattcatgcctcccagatccaaaaggtggaaccagcaggtagatctaggttcaccccggagctccagcctaaggcctctcaaagccgcaagaggtctttagctaccatggattcaccaccacatcaaaaacagccccaaagaggggaagtctcccagaagacagtgattatcaaggaagaggaagaagatactgcagagaagccagggaaggaagaggatgtcgtgactccaaaaccaggcaagagaaagagagaccaggcagaggaggagcccaacagaataccaagccgcagcctccgacggaccaaacttaaccaagaatcaacagcccccaaagtgctcttcacaggagtggtggatgctcggggagagcgggctgtgctggcactggggggaagtctggctggttcagcggcagaggcttcccacctggtcactgatcgcatccgccggacagtcaagttcctgtgtgccctggggcggggaatccccattctgtccctggactggctgcatcagtcccgcaaggctggtttcttcttacccccggatgaatatgtggtgaccgaccctgagcaagagaagaactttggctttagccttcaagacgcactgagcagggctcgggagcgaaggctgctagagggctatgagatctatgtgacccctggagtccagccaccaccacctcagatgggagagattattagctgctgtggaggcacatacctacccagcatgcctcggtcctataagcctcagagagttgtgatcacatgccctcaggacttccctcattgctccattccactacgggttgggctgcccctcctctcgcctgagttcctgctgactggagtgctgaagcaggaagccaagccagaggcctttgtcctctcccctttggagatgtcatccacctgagaactccactacccttttccctcccagaccacgaattagaagatatgtggaagaaagaactcagggcgttagaaaggattggggtatattgatacaacttgtcctggaacatgggtgggaccagaaatctttatgaataaatgaaaagataagggatttggaagccacaggttgttttttgtttgtttgtttgtttttttaatggccattttattttatttgtatttatagttttttatttgtatagatttaggggatacaagatttcttacatgcatgtattaaatggccattttaaaattagctagtttcatgctcagatgtcataagtggcagctatctttagccagactgttgcagttattgctcgatgccactcatggtgtcctacctcctatttggaaaccatctctatttttttcttactgagattcttactttggggtcaggaacttgaagggatgcttggagtgagtagatttgagggtccagttatggagtgctactaaaacattttcttctctcctggcctctggaagcatctttagctttgactttgggcaagtctctgtacttttctggccagcttttccaggatttataaaattagagcttcggcttgacctctgtgataaataaatattcactctgtgcctt

SEQ ID NO: 285615 - protein, 1655 aa, Artificial Sequence
  derived and/or modified sequence
MYHRLDVSLPFVSRGPLTVEETPRVQGETQPQRLLLAEDSEEEVDFLSERRMVKKSRTTSSSVIVPESDEEGHSPVLGGLGPPFAFNLNSDTDVEEGQQPATEEASSAARRGATVEAKQSEAEVVTEIQLEKDQPLVKEKDNDTKVKRGAGNGVVPAGVILERSQPPGEDSDTDVDDDSRPPGRPAEVHLERAQPFGFIDSDTDAEEERIPATPVVIPMKKRKIFHGVGTRGPGAPGLAHLQESQAGSDTDVEEGKAPQAVPLEKSQASMVINSDTDDEEEVSAALTLAHLKESQPAIWNRDAEEDMPQRVVLLQRSQTTTERDSDTDVEEEELPVENREAVLKDHTKIRALVRAHSEKDQPPFGDSDDSVEADKSSPGIHLERSQASTTVDINTQVEKEVPPGSAIIHIKKHQVSVEGTNQTDVKAVGGPAKLLVVSLEEAWPLHGDCETDAEEGTSLTASVVADVRKSQLPAEGDAGAEWAAAVLKQERAHEVGAQGGPPVAQVEQDLPISRENLTDLVVDTDTLGESTQPQREGAQVPTGREREQHVGGTKDSEDNYGDSEDLDLQATQCFLENQGLEVQSMEDEPTQAFMLTPPQELGPSHCSFQTTGLLNCKMPPAEKASRIRAAEKVSRGDQESPDACLPPTVPEAPAPPQKPLNSQSQKHLAPPPLLSPLLPSIKPTVRKTRQDGSQEAPEAPLSSELEPFHPKPKIRTRKSSRMTPFPATSAAPEPHPSTSTAQPVTPKPTSQATRSRTNRSSVKTPEPVVPTAPELQPSTSTDQPVTSEPTSQVTRGRKSRSSVKTPETVVPTALELQPSTSTDRPVTSEPTSQATRGRKNRSSVKTPEPVVPTAPELQPSTSTDQPVTSEPTYQATRGRKNRSSVKTPEPVVPTAPELRPSTSTDRPVTPKPTSRTTRSRTNMSSVKNPESTVPIAPELPPSTSTEQPVTPEPTSRATRGRKNRSSGKTPETLVPTAPKLEPSTSTDQPVTPEPTSQATRGRTNRSSVKTPETVVPTAPELQPSTSTDQPVTPEPTSQATRGRTDRSSVKTPETVVPTAPELQASASTDQPVTSEPTSRTTRGRKNRSSVKTPETVVPAAPELQPSTSTDQPVTPEPTSRATRGRTNRSSVKTPESIVPIAPELQPSTSRNQLVTPEPTSRATRCRTNRSSVKTPEPVVPTAPEPHPTTSTDQPVTPKLTSRATRRKTNRSSVKTPKPVEPAASDLEPFTPTDQSVTPEAIAQGGQSKTLRSSTVRAMPVPTTPEFQSPVTTDQPISPEPITQPSCIKRQRAAGNPGSLAAPIDHKPCSAPLEPKSQASRNQRWGAVRAAESLTAIPEPASPQLLETPIHASQIQKVEPAGRSRFTPELQPKASQSRKRSLATMDSPPHQKQPQRGEVSQKTVIIKEEEEDTAEKPGKEEDVVTPKPGKRKRDQAEEEPNRIPSRSLRRTKLNQESTAPKVLFTGVVDARGERAVLALGGSLAGSAAEASHLVTDRIRRTVKFLCALGRGIPILSLDWLHQSRKAGFFLPPDEYVVTDPEQEKNFGFSLQDALSRARERRLLEGYEIYVTPGVQPPPPQMGEIISCCGGTYLPSMPRSYKPQRVVITCPQDFPHCSIPLRVGLPLLSPEFLLTGVLKQEAKPEAFVLSPLEMSST

SEQ ID NO: 285616 - DNA, 5478 bp, Artificial Sequence
  derived and/or modified sequence
atggaggacacccaggccatcgactgggacgtggaggaggaggaggagaccgagcagagcagcgagagcctgagatgcaacgtggagcccgtgggcagactgcacatcttcagcggcgcccacggccccgagaaggacttccccctgcacctgggcaagaacgtggtgggcagaatgcccgactgcagcgtggccctgcccttccccagcatcagcaagcagcacgccgagatcgagatcctggcctgggacaaggcccccatcctgagagactgcggcagcctgaacggcacccagatcctgagaccccccaaggtgctgagccccggcgtgagccacagactgagagaccaggagctgatcctgttcgccgacctgctgtgccagtaccacagactggacgtgagcctgcccttcgtgagcagaggccccctgaccgtggaggagacccccagagtgcagggcgagacccagccccagagactgctgctggccgaggacagcgaggaggaggtggacttcctgagcgagagaagaatggtgaagaagagcagaaccaccagcagcagcgtgatcgtgcccgagagcgacgaggagggccacagccccgtgctgggcggcctgggcccccccttcgccttcaacctgaacagcgacaccgacgtggaggagggccagcagcccgccaccgaggaggccagcagcgccgccagaagaggcgccaccgtggaggccaagcagagcgaggccgaggtggtgaccgagatccagctggagaaggaccagcccctggtgaaggagaaggacaacgacaccaaggtgaagagaggcgccggcaacggcgtggtgcccgccggcgtgatcctggagagaagccagccccccggcgaggacagcgacaccgacgtggacgacgacagcagaccccccggcagacccgccgaggtgcacctggagagagcccagcccttcggcttcatcgacagcgacaccgacgccgaggaggagagaatccccgccacccccgtggtgatccccatgaagaagagaaagatcttccacggcgtgggcaccagaggccccggcgcccccggcctggcccacctgcaggagagccaggccggcagcgacaccgacgtggaggagggcaaggccccccaggccgtgcccctggagaagagccaggccagcatggtgatcaacagcgacaccgacgacgaggaggaggtgagcgccgccctgaccctggcccacctgaaggagagccagcccgccatctggaacagagacgccgaggaggacatgccccagagagtggtgctgctgcagagaagccagaccaccaccgagagagacagcgacaccgacgtggaggaggaggagctgcccgtggagaacagagaggccgtgctgaaggaccacaccaagatcagagccctggtgagagcccacagcgagaaggaccagccccccttcggcgacagcgacgacagcgtggaggccgacaagagcagccccggcatccacctggagagaagccaggccagcaccaccgtggacatcaacacccaggtggagaaggaggtgccccccggcagcgccatcatccacatcaagaagcaccaggtgagcgtggagggcaccaaccagaccgacgtgaaggccgtgggcggccccgccaagctgctggtggtgagcctggaggaggcctggcccctgcacggcgactgcgagaccgacgccgaggagggcaccagcctgaccgccagcgtggtggccgacgtgagaaagagccagctgcccgccgagggcgacgccggcgccgagtgggccgccgccgtgctgaagcaggagagagcccacgaggtgggcgcccagggcggcccccccgtggcccaggtggagcaggacctgcccatcagcagagagaacctgaccgacctggtggtggacaccgacaccctgggcgagagcacccagccccagagagagggcgcccaggtgcccaccggcagagagagagagcagcacgtgggcggcaccaaggacagcgaggacaactacggcgacagcgaggacctggacctgcaggccacccagtgcttcctggagaaccagggcctggaggccgtgcagagcatggaggacgagcccacccaggccttcatgctgacccccccccaggagctgggccccagccactgcagcttccagaccaccggcctgctgaactgcaagatgccccccgccgagaaggccagcagaatcagagccgccgagaaggtgagcagaggcgaccaggagagccccgacgcctgcctgccccccaccgtgcccgaggcccccgcccccccccagaagcccctgaacagccagagccagaagcacctggcccccccccccctgctgagccccctgctgcccagcatcaagcccaccgtgagaaagaccagacaggacggcagccaggaggcccccgaggcccccctgagcagcgagctggagcccttccaccccaagcccaagatcagaaccagaaagagcagcagaatgacccccttccccgccaccagcgccgcccccgagccccaccccagcaccagcaccgcccagcccgtgacccccaagcccaccagccaggccaccagaagcagaaccaacagaagcagcgtgaagacccccgagcccgtggtgcccaccgcccccgagctgcagcccagcaccagcaccgaccagcccgtgaccagcgagcccaccagccaggtgaccagaggcagaaagagcagaagcagcgtgaagacccccgagaccgtggtgcccaccgccctggagctgcagcccagcaccagcaccgacagacccgtgaccagcgagcccaccagccaggccaccagaggcagaaagaacagaagcagcgtgaagacccccgagcccgtggtgcccaccgcccccgagctgcagcccagcaccagcaccgaccagcccgtgaccagcgagcccacctaccaggccaccagaggcagaaagaacagaagcagcgtgaagacccccgagcccgtggtgcccaccgcccccgagctgagacccagcaccagcaccgacagacccgtgacccccaagcccaccagcagaaccaccagaagcagaaccaacatgagcagcgtgaagacccccgagaccgtggtgcccaccgcccccgagctgcagatcagcaccagcaccgaccagcccgtgacccccaagcccaccagcagaaccaccagaagcagaaccaacatgagcagcgtgaagaaccccgagagcaccgtgcccatcgcccccgagctgccccccagcaccagcaccgagcagcccgtgacccccgagcccaccagcagagccaccagaggcagaaagaacagaagcagcggcaagacccccgagaccctggtgcccaccgcccccaagctggagcccagcaccagcaccgaccagcccgtgacccccgagcccaccagccaggccaccagaggcagaaccaacagaagcagcgtgaagacccccgagaccgtggtgcccaccgcccccgagctgcagcccagcaccagcaccgaccagcccgtgacccccgagcccaccagccaggccaccagaggcagaaccgacagaagcagcgtgaagacccccgagaccgtggtgcccaccgcccccgagctgcaggccagcgccagcaccgaccagcccgtgaccagcgagcccaccagcagaaccaccagaggcagaaagaacagaagcagcgtgaagacccccgagaccgtggtgcccgccgcccccgagctgcagcccagcaccagcaccgaccagcccgtgacccccgagcccaccagcagagccaccagaggcagaaccaacagaagcagcgtgaagacccccgagagcatcgtgcccatcgcccccgagctgcagcccagcaccagcagaaaccagctggtgacccccgagcccaccagcagagccaccagatgcagaaccaacagaagcagcgtgaagacccccgagcccgtggtgcccaccgcccccgagccccaccccaccaccagcaccgaccagcccgtgacccccaagctgaccagcagagccaccagaagaaagaccaacagaagcagcgtgaagacccccaagcccgtggagcccgccgccagcgacctggagcccttcacccccaccgaccagagcgtgacccccgaggccatcgcccagggcggccagagcaagaccctgagaagcagcaccgtgagagccatgcccgtgcccaccacccccgagttccagagccccgtgaccaccgaccagcccatcagccccgagcccatcacccagcccagctgcatcaagagacagagagccgccggcaaccccggcagcctggccgcccccatcgaccacaagccctgcagcgcccccctggagcccaagagccaggccagcagaaaccagagatggggcgccgtgagagccgccgagagcctgaccgccatccccgagcccgccagcccccagctgctggagacccccatccacgccagccagatccagaaggtggagcccgccggcagaagcagattcacccccgagctgcagcccaaggccagccagagcagaaagagaagcctggccaccatggacagccccccccaccagaagcagccccagagaggcgaggtgagccagaagaccgtgatcatcaaggaggaggaggaggacaccgccgagaagcccggcaaggaggaggacgtggtgacccccaagcccggcaagagaaagagagaccaggccgaggaggagcccaacagaatccccagcagaagcctgagaagaaccaagctgaaccaggagagcaccgcccccaaggtgctgttcaccggcgtggtggacgccagaggcgagagagccgtgctggccctgggcggcagcctggccggcagcgccgccgaggccagccacctggtgaccgacagaatcagaagaaccgtgaagttcctgtgcgccctgggcagaggcatccccatcctgagcctggactggctgcaccagagcagaaaggccggcttcttcctgccccccgacgagtacgtggtgaccgaccccgagcaggagaagaacttcggcttcagcctgcaggacgccctgagcagagccagagagagaagactgctggagggctacgagatctacgtgacccccggcgtgcagcccccccccccccagatgggcgagatcatcagctgctgcggcggcacctacctgcccagcatgcccagaagctacaagccccagagagtggtgatcacctgcccccaggacttcccccactgcagcatccccctgagagtgggcctgcccctgctgagccccgagttcctgctgaccggcgtgctgaagcaggaggccaagcccgaggccttcgtgctgagccccctggagatgagcagcacctag

SEQ ID NO: 285617 - DNA, 4968 bp, Artificial Sequence
  derived and/or modified sequence
atgtaccacagactggacgtgagcctgcccttcgtgagcagaggccccctgaccgtggaggagacccccagagtgcagggcgagacccagccccagagactgctgctggccgaggacagcgaggaggaggtggacttcctgagcgagagaagaatggtgaagaagagcagaaccaccagcagcagcgtgatcgtgcccgagagcgacgaggagggccacagccccgtgctgggcggcctgggcccccccttcgccttcaacctgaacagcgacaccgacgtggaggagggccagcagcccgccaccgaggaggccagcagcgccgccagaagaggcgccaccgtggaggccaagcagagcgaggccgaggtggtgaccgagatccagctggagaaggaccagcccctggtgaaggagaaggacaacgacaccaaggtgaagagaggcgccggcaacggcgtggtgcccgccggcgtgatcctggagagaagccagccccccggcgaggacagcgacaccgacgtggacgacgacagcagaccccccggcagacccgccgaggtgcacctggagagagcccagcccttcggcttcatcgacagcgacaccgacgccgaggaggagagaatccccgccacccccgtggtgatccccatgaagaagagaaagatcttccacggcgtgggcaccagaggccccggcgcccccggcctggcccacctgcaggagagccaggccggcagcgacaccgacgtggaggagggcaaggccccccaggccgtgcccctggagaagagccaggccagcatggtgatcaacagcgacaccgacgacgaggaggaggtgagcgccgccctgaccctggcccacctgaaggagagccagcccgccatctggaacagagacgccgaggaggacatgccccagagagtggtgctgctgcagagaagccagaccaccaccgagagagacagcgacaccgacgtggaggaggaggagctgcccgtggagaacagagaggccgtgctgaaggaccacaccaagatcagagccctggtgagagcccacagcgagaaggaccagccccccttcggcgacagcgacgacagcgtggaggccgacaagagcagccccggcatccacctggagagaagccaggccagcaccaccgtggacatcaacacccaggtggagaaggaggtgccccccggcagcgccatcatccacatcaagaagcaccaggtgagcgtggagggcaccaaccagaccgacgtgaaggccgtgggcggccccgccaagctgctggtggtgagcctggaggaggcctggcccctgcacggcgactgcgagaccgacgccgaggagggcaccagcctgaccgccagcgtggtggccgacgtgagaaagagccagctgcccgccgagggcgacgccggcgccgagtgggccgccgccgtgctgaagcaggagagagcccacgaggtgggcgcccagggcggcccccccgtggcccaggtggagcaggacctgcccatcagcagagagaacctgaccgacctggtggtggacaccgacaccctgggcgagagcacccagccccagagagagggcgcccaggtgcccaccggcagagagagagagcagcacgtgggcggcaccaaggacagcgaggacaactacggcgacagcgaggacctggacctgcaggccacccagtgcttcctggagaaccagggcctggaggtgcagagcatggaggacgagcccacccaggccttcatgctgacccccccccaggagctgggccccagccactgcagcttccagaccaccggcctgctgaactgcaagatgccccccgccgagaaggccagcagaatcagagccgccgagaaggtgagcagaggcgaccaggagagccccgacgcctgcctgccccccaccgtgcccgaggcccccgcccccccccagaagcccctgaacagccagagccagaagcacctggcccccccccccctgctgagccccctgctgcccagcatcaagcccaccgtgagaaagaccagacaggacggcagccaggaggcccccgaggcccccctgagcagcgagctggagcccttccaccccaagcccaagatcagaaccagaaagagcagcagaatgacccccttccccgccaccagcgccgcccccgagccccaccccagcaccagcaccgcccagcccgtgacccccaagcccaccagccaggccaccagaagcagaaccaacagaagcagcgtgaagacccccgagcccgtggtgcccaccgcccccgagctgcagcccagcaccagcaccgaccagcccgtgaccagcgagcccaccagccaggtgaccagaggcagaaagagcagaagcagcgtgaagacccccgagaccgtggtgcccaccgccctggagctgcagcccagcaccagcaccgacagacccgtgaccagcgagcccaccagccaggccaccagaggcagaaagaacagaagcagcgtgaagacccccgagcccgtggtgcccaccgcccccgagctgcagcccagcaccagcaccgaccagcccgtgaccagcgagcccacctaccaggccaccagaggcagaaagaacagaagcagcgtgaagacccccgagcccgtggtgcccaccgcccccgagctgagacccagcaccagcaccgacagacccgtgacccccaagcccaccagcagaaccaccagaagcagaaccaacatgagcagcgtgaagaaccccgagagcaccgtgcccatcgcccccgagctgccccccagcaccagcaccgagcagcccgtgacccccgagcccaccagcagagccaccagaggcagaaagaacagaagcagcggcaagacccccgagaccctggtgcccaccgcccccaagctggagcccagcaccagcaccgaccagcccgtgacccccgagcccaccagccaggccaccagaggcagaaccaacagaagcagcgtgaagacccccgagaccgtggtgcccaccgcccccgagctgcagcccagcaccagcaccgaccagcccgtgacccccgagcccaccagccaggccaccagaggcagaaccgacagaagcagcgtgaagacccccgagaccgtggtgcccaccgcccccgagctgcaggccagcgccagcaccgaccagcccgtgaccagcgagcccaccagcagaaccaccagaggcagaaagaacagaagcagcgtgaagacccccgagaccgtggtgcccgccgcccccgagctgcagcccagcaccagcaccgaccagcccgtgacccccgagcccaccagcagagccaccagaggcagaaccaacagaagcagcgtgaagacccccgagagcatcgtgcccatcgcccccgagctgcagcccagcaccagcagaaaccagctggtgacccccgagcccaccagcagagccaccagatgcagaaccaacagaagcagcgtgaagacccccgagcccgtggtgcccaccgcccccgagccccaccccaccaccagcaccgaccagcccgtgacccccaagctgaccagcagagccaccagaagaaagaccaacagaagcagcgtgaagacccccaagcccgtggagcccgccgccagcgacctggagcccttcacccccaccgaccagagcgtgacccccgaggccatcgcccagggcggccagagcaagaccctgagaagcagcaccgtgagagccatgcccgtgcccaccacccccgagttccagagccccgtgaccaccgaccagcccatcagccccgagcccatcacccagcccagctgcatcaagagacagagagccgccggcaaccccggcagcctggccgcccccatcgaccacaagccctgcagcgcccccctggagcccaagagccaggccagcagaaaccagagatggggcgccgtgagagccgccgagagcctgaccgccatccccgagcccgccagcccccagctgctggagacccccatccacgccagccagatccagaaggtggagcccgccggcagaagcagattcacccccgagctgcagcccaaggccagccagagcagaaagagaagcctggccaccatggacagccccccccaccagaagcagccccagagaggcgaggtgagccagaagaccgtgatcatcaaggaggaggaggaggacaccgccgagaagcccggcaaggaggaggacgtggtgacccccaagcccggcaagagaaagagagaccaggccgaggaggagcccaacagaatccccagcagaagcctgagaagaaccaagctgaaccaggagagcaccgcccccaaggtgctgttcaccggcgtggtggacgccagaggcgagagagccgtgctggccctgggcggcagcctggccggcagcgccgccgaggccagccacctggtgaccgacagaatcagaagaaccgtgaagttcctgtgcgccctgggcagaggcatccccatcctgagcctggactggctgcaccagagcagaaaggccggcttcttcctgccccccgacgagtacgtggtgaccgaccccgagcaggagaagaacttcggcttcagcctgcaggacgccctgagcagagccagagagagaagactgctggagggctacgagatctacgtgacccccggcgtgcagcccccccccccccagatgggcgagatcatcagctgctgcggcggcacctacctgcccagcatgcccagaagctacaagccccagagagtggtgatcacctgcccccaggacttcccccactgcagcatccccctgagagtgggcctgcccctgctgagccccgagttcctgctgaccggcgtgctgaagcaggaggccaagcccgaggccttcgtgctgagccccctggagatgagcagcacctag

SEQ ID NO: 285618 - DNA, 5478 bp, Artificial Sequence
  derived and/or modified sequence
atggaggacactcaggcaatcgactgggatgtcgaggaggaggaggaaaccgaacagagttcagagagtctccgctgcaatgtggagccagtaggacgcctgcatatatttagcggagcccacggccctgagaaagacttccccctgcatctcgggaaaaatgtcgtcggtagaatgccagactgctcagtggcattgccctttccatctatatccaagcagcatgcggagatcgaaattttagcctgggacaaagcacccatactgagagactgtgggagtctgaatggcactcagatccttaggccacctaaggttttgagcccgggagtaagccatagactgagagaccaggagctgatcttgttcgctgacctattatgccaataccaccggcttgacgtttcactgccttttgttagccgagggcctctgactgtggaggaaactcccagagtccagggcgaaacccagccgcagagactactgctggctgaagatagtgaagaagaggtggatttcctgagcgagcgccgcatggtgaaaaagtcccggaccacctctagttcggtgattgtcccagaatctgatgaggagggacattcgccggtactcggtgggttaggacctccatttgcttttaacctcaacagtgacactgacgtggaggaaggacaacagcccgccacggaagaagcaagctcagccgcgcgccggggggcgactgtagaagcaaagcaaagtgaggccgaggttgtaacagagatacagttagagaaagaccagccactggtgaaggagaaggacaatgacacgaaggtgaagcggggggccgggaatggggttgtacccgccggggttattctagagaggtcacagcctccgggagaagattctgacaccgatgtggatgacgactcaagaccccctggacggcccgccgaagtccatctagaacgcgcacagcctttcggttttatagattccgataccgacgccgaagaggagcggatcccagccacaccagtggtcattccaatgaagaagcgaaaaatctttcatggtgtggggacccgcggacctggagctcctggcctcgcccatctccaggaaagccaggcaggctcagacaccgatgtggaggaagggaaagcgccacaggccgtgccgctagaaaaaagccaggcatctatggtgatcaattccgacactgacgatgaggaggaggtatctgcagcacttacccttgcacaccttaaggagtcgcagccagccatttggaaccgggatgccgaagaagatatgccccaacgtgttgtgctattgcagaggtctcagaccacaacagagagagactcagatacagacgtcgaggaagaagagttgcccgtggaaaaccgcgaggccgttctgaaggaccacacaaaaatccgggcgctggtgcgcgctcacagtgagaaagatcaaccccctttcggggatagcgacgattccgtggaagctgataaatctagccctggtatccacctggaacgcagccaggcatccacaactgttgacatcaacactcaggtggaaaaagaggtgcctcccgggtctgccatcatccacatcaagaagcaccaggtgagcgtagagggtaccaaccagacagatgtaaaggccgtggggggacctgcaaaactactcgtcgtgagtctggaggaggcttggcccctgcacggcgactgcgagacggacgccgaagagggcacatcgctgacagcatcagtggtggcagacgtgagaaagagccagctgcctgccgagggcgatgcaggggcagagtgggccgctgctgtcttaaagcaggagagagctcacgaggttggcgctcagggtggacccccagtcgcacaggtggagcaggatttgcccattagcagggagaatttgaccgaccttgtggtcgacactgatacgctcggagaaagcacccagccccagcgcgagggagcgcaggtcccaacagggagggagagagagcagcatgttggcgggactaaagattctgaagacaactacggcgacagtgaggatctggacttacaggccacccagtgctttctggagaaccaggggctggaggcagttcaaagtatggaggacgagcctactcaggcgttcatgctgaccccaccgcaggaattaggtccgagccattgctcctttcagactactgggctcctgaactgcaaaatgcctccggccgagaaagcatcccggatacgcgctgcagaaaaggtgagtaggggggatcaagaatcacccgacgcatgcctgccccctaccgtccctgaagcaccagctcctcctcagaaacctctaaattctcagtcacaaaaacacttagccccccctccactcttgtcccctttgcttcctagcattaaacccacagtgcgaaagaccaggcaggacggcagccaagaagcccccgaggctcctctgtcaagcgaattggagcccttccacccaaaaccaaagatacggaccagaaagagcagcagaatgaccccatttccggcaacctcagccgccccagaacctcacccctccacatccacagcacaacctgtaactcccaaacctactagtcaggcaactcgttcgaggacaaatcggtcatctgttaaaaccccagagccagtggttcccactgcccctgagctccagcctagcacgtccacggatcagcctgtaacatccgagccgaccagtcaggtcacccgcggaagaaagagccgctcctcagtcaaaactcctgagacagtcgtgccaaccgctttggagctgcaaccaagcacctccactgatcggccagtgacctctgaaccaacaagccaagcaacacggggaaggaagaataggagctctgtgaagacgccagaacctgtggtgccaaccgcgcccgagctacagccttccacctctactgaccaacctgtgaccagcgagcctacatatcaggccactagagggagaaagaacaggtccagcgttaagacgccagaaccagtggtgcccaccgcgcccgagctgcgccccagcacatctaccgatcgacccgtgactcctaagcctaccagtagaaccacaagatcccgcaccaacatgtctagtgttaagacccctgagacagttgtgccaactgccccagagcttcagatctcgacctctacagatcaaccagtaacaccaaagccaacatctcggaccaccagatctcgcaccaatatgtctagcgtgaagaaccccgagtccaccgtcccaatcgcgccagagctgcctcccagcacctccacagaacagccggtgactccagagcctacctccagggcaacccgtggtcggaagaatcgctctagtgggaaaacccctgagactctggttcctactgcccctaagctggaaccaagcaccagtacagatcagccagtgacgccggagcccacaagccaggctacccgggggcgaaccaaccggagctcggtcaaaacacctgaaacggtggtacccactgcgcctgagctgcagccttccacatctacagaccaaccggtgacaccagagcctacttctcaggcaacccgggggaggactgaccgcagcagcgtcaaaacgccggaaacagtggtccccactgccccagaactgcaggccagcgcatccactgatcagcctgttacaagtgagcctacatcacgcaccaccagaggacggaagaaccgcagctctgtgaaaaccccagaaactgtggttcctgcagctcccgagctacagccctccactagcacagaccagccagtgacaccggagcccacctccagggcaaccagagggcggaccaatcgctcttctgtgaaaaccccagaaagcatcgtccccatcgccccggaacttcagcctagcacttctcggaatcaactggtcacgccagagcctacatcccgggctacccggtgcaggacaaatagaagctcagtgaaaactccagagccagttgtccccaccgctccagagccccatccgacaacatctacagaccagcccgtgacacccaagttgacctcccgtgctacacgccgcaagacaaatcggagctccgtcaaaacgcccaaacctgtggagcccgccgcctccgatttggagcccttcaccccaacggaccaatctgtgactccagaggcgattgctcagggaggtcagagcaagactctcagatcctccactgtgagagctatgccagtccctaccacaccagagttccagtctcccgtgactactgatcagcctataagcccggaacccatcacccagccctcatgcatcaaaagacaacgcgccgccggtaatcccggcagtcttgctgcccctattgatcacaaaccatgttccgctcctctggagcctaagagtcaagcttcccgaaaccaaaggtggggggccgtcagagctgccgagtctctgaccgccattcctgagccagcgtcacctcaactgctcgaaacccccattcacgctagccaaatacagaaggttgaacccgccgggagaagtagatttaccccagagttgcagccaaaggcctctcagtcacggaaacgcagccttgcaaccatggacagccctccccaccagaaacagccacagcggggcgaggtctcccagaagactgtgattattaaagaagaagaagaggacactgctgaaaagcccggcaaggaagaggatgttgtgactccaaagccaggaaaaagaaagagagaccaggccgaagaggaaccaaaccgtattccttcacgaagcttaaggcggactaagttgaatcaggaatcaactgctcccaaggtgcttttcactggcgttgtcgacgctagaggggaacgtgctgtccttgctctggggggatccctagccgggagcgcggccgaggccagccacctcgtgaccgaccggatcaggcgtaccgtcaagtttttatgcgcgctaggtcgaggcattcctattctcagcctggattggttgcaccagagcaggaaagccggattcttcctcccgccagatgagtacgtggtgacggaccctgaacaggagaagaatttcggcttttcactgcaagatgcactgagtcgggcccgggagagacgcctacttgagggttacgagatctacgttactcctggagtgcaacctccacctccacaaatgggagagatcatttcctgctgcggcgggacatacttaccttcaatgccacggtcctacaaacctcagagggtggttatcacctgtccgcaggatttccctcactgttccatcccacttcgcgtcggtctgcccctgctttctccggagttcctgcttacgggcgtgttaaagcaggaggccaaacctgaagccttcgtactgagcccactagaaatgagcagtacctag

SEQ ID NO: 285619 - DNA, 4968 bp, Artificial Sequence
  derived and/or modified sequence
atgtaccaccgccttgacgtcagtctgcctttcgtctccagaggccccctaacggtcgaagagacaccacgggtgcagggagaaactcaaccccaaaggcttcttttggctgaagatagtgaggaggaggtcgatttcctgtctgagaggcgaatggtgaagaagtctcgcaccacgtcctcatcagtcatagtgcctgaaagtgatgaggagggacatagccctgtgttgggggggctcggtccaccttttgctttcaacttgaattccgatactgacgtggaggaaggtcagcaaccagctaccgaggaggcttcatccgccgcacgacggggggccacagttgaagcaaaacagtccgaggccgaggttgtcaccgagatccagctggaaaaggatcagcctctcgtgaaggagaaagataatgacaccaaagtcaagcgtggggctggaaatggagtcgtccccgccggagtgattcttgagcgatctcaacctccaggtgaagattctgatacagatgtggacgatgattcccggcccccaggtcgaccagccgaagtccatctggaaagggcacagcccttcggcttcattgatagcgacaccgatgcagaagaagaacggattccagccacccctgtggtcatcccaatgaaaaagcgcaaaatctttcacggggtgggaacccggggccccggcgcacccggtctggcccatctccaggagtcgcaggctggctctgatactgatgtggaggagggcaaagctcctcaggctgttcctctggagaaatcccaggccagtatggttataaatagcgatactgacgatgaggaggaagtcagtgcagcactgactttggcccatctgaaagaatctcagcctgctatttggaatcgggacgcggaggaggacatgcctcagcgcgtggtgcttttgcagcgctcacagacaaccaccgagcgtgatagtgacactgatgtggaggaagaagagctgccagtcgagaaccgcgaggcagtgctgaaggatcacaccaaaattcgggcgcttgtccgagcccattccgagaaagaccaaccacctttcggggattccgatgattccgtggaggccgataagtccagtcccggcattcatttagaaagaagtcaggcaagcaccaccgttgacatcaatacacaggttgaaaaggaagtgcctcccgggagcgccattattcacattaaaaaacaccaggtatctgtggaagggacaaatcaaactgatgtgaaagccgtgggtggcccagctaaactgctcgtagtgagcctagaagaagcttggccactccacggggattgcgaaacggacgcagaggaagggacatctctcacagcatctgtcgtggctgatgtgagaaagtcacagcttcccgcggagggagacgctggtgccgagtgggccgccgctgttctcaaacaggagcgggctcacgaggtgggcgcccagggaggccctccagtcgcccaggtggagcaggatctccctattagccgtgagaatctcaccgacctcgtggtcgataccgatacactaggcgaaagcacacagccacaacgggagggggctcaggtgccaacaggacgtgagagagagcagcacgtaggggggaccaaagacagcgaggacaactacggcgattccgaggacctggacttgcaggctacccagtgttttcttgagaatcaaggtttggaagtacagagtatggaagatgagcctacacaggctttcatgctgacaccaccccaagaattgggcccctcccattgttccttccagactacaggcctgctgaactgcaagatgcccccagcagagaaggcaagcaggatccgagcagctgaaaaggtctcccgtggtgaccaggagtctccagacgcctgcctccctcccacggtgccagaggcccccgcgccaccgcagaaaccacttaacagccagtcacagaagcacctggcaccacctcctctgctttctccactccttccatccatcaagcctaccgtgcgtaagacccgccaggacggatcacaggaagcacccgaggctccgctcagttccgagctggaaccctttcatccgaaaccaaagattcgaacccggaaatcttctcgaatgactccgttcccggcaacgtcagctgcgccggagcctcatccttcaaccagcaccgcacaacctgtgacccccaaaccaactagccaagcaaccaggtcaaggaccaatcggagctctgtgaagactcccgagcccgtcgtcccaacggcccccgaattgcagccctctacctcaacagaccagcctgtgacgtctgaacctacctctcaggtgacccgcggcaggaaatccagatcaagtgtgaagactcccgaaactgtcgttcccaccgccctagagctgcagccgagcacctcaacagacagaccggtgaccagtgagccgacatcgcaggctactagaggccggaaaaacagaagcagtgttaaaaccccggaacctgtcgttcctacagctccggagcttcagccaagtacttctaccgatcaaccggtcacctccgagccaacctaccaggccacccgcggcagaaagaacaggtcttccgttaaaactcctgagcccgtggttcccaccgctccagaactgagaccttcaacttccactgataggccagtcacccctaaaccaacaagtagaaccaccagaagccgaactaatatgagctccgttaagaacccggagtccactgttcccatcgctcccgaactgcctcctagcacttccacggagcagcctgtgactcccgaacccaccagcagggccacacgtggtcgcaaaaacagatcaagtgggaaaaccccagagactcttgttcctaccgccccgaagttggagccgagcactagcacggaccagccagttacacctgagcctacaagccaggctacacgggggcggaccaaccgtagctccgtcaagaccccagagactgtcgtccccaccgcacccgagctccagcccagcaccagcaccgaccaacccgtcactcctgaacctacctcacaagctactagggggcgcaccgatcgttcttcggtgaagacacccgagacggtagtgcccaccgcccccgagctccaggcatccgcctctactgatcagcctgttacttctgagccgacatcacggaccaccaggggcaggaaaaatcgctcttcagtgaaaactcctgagaccgtcgttcctgctgctccggaactccagccttccacttccactgaccagccagtgacccccgagcctacaagcagggcgacccgtggccggactaatcgtagttctgtgaagacccctgagtcaatcgtgcctattgctcccgaactgcagccttccacttccagaaaccaactggtgactccagagcccacatcccgtgctacgcggtgtagaacaaaccgctccagtgtgaagactcctgagccagttgtcccaacagctcccgagccccaccctactacctccactgatcagccagtgactcctaagctaaccagccgggcaactagacgaaagaccaatcggtcttctgtcaaaactcccaagccagtggagccagccgcatcagaccttgagcccttcactccgactgaccagtctgtgacacctgaggcgatagctcagggaggtcagtctaagaccttgcggtcaagtaccgttcgcgctatgccagtccctacgacgcccgagtttcaaagccctgtcaccacggaccaaccaatttcccccgaacccattactcagccaagctgcatcaagcgccagagagctgctggtaaccctggatcccttgccgcccccatcgaccataaaccttgctctgcacccctggagccaaagtcacaggcgtcccgaaaccagaggtggggggccgtgcgtgccgccgaatccctgacggccataccggagccggcgtctccccagttgctggagacacccatccacgcttcacagattcagaaggtagagccagcaggcagaagtcgtttcactccagagttacagccaaaggccagtcagtctcgaaaaagaagcctggccacaatggactctccgcctcaccagaagcagccccagcgcggcgaagtgtcacagaaaaccgtcatcataaaagaagaagaagaggacaccgccgaaaaacctgggaaggaggaggacgtggtaaccccaaaacctggcaagagaaaaagagaccaggccgaagaggagccaaaccgcatccccagccggagcttgcgaaggaccaagctcaaccaagaatccaccgctcctaaggttctgtttacaggcgttgttgatgctcggggtgagagggcagtgcttgcactaggagggagtctggcaggatccgccgcggaggcttcccacctcgtgacggacaggatccgacgcactgtgaagttcctttgcgctcttggccgtggcattccgatattgtccctcgattggttgcatcagagtcggaaagccgggttttttctcccgcctgacgagtacgtggtcactgacccagagcaggagaaaaattttggattttcattgcaggacgccctgtccagagctagagaacgacggttgttagaaggttatgagatatacgtgactcctggggtacagccccctcccccccagatgggtgaaatcatcagttgctgtggcggtacctacctgccatcaatgccacgctcttacaaacctcagagggttgtgatcacctgcccgcaggactttccccactgcagcattcccttacgggttggactccctctccttagcccagagttcttactgacgggcgtcctcaaacaggaggccaaacctgaggccttcgttttgagcccattggaaatgtcatcaacatag

SEQ ID NO: 285620 - DNA, 5478 bp, Artificial Sequence
  derived and/or modified sequence
atggaggacacccaggccatcgactgggatgtggaggaggaggaggagacagagcagagcagcgagagcctgcgctgcaatgtggagcctgtgggccgcctgcacatcttcagcggggcccacggccctgagaaggacttccccctgcacctgggcaagaatgtggtgggccgcatgccagactgcagcgtggccctgcccttccccagcatcagcaagcagcacgccgagattgagatcctggcctgggacaaggcccccatcctgcgggactgtggcagcctgaatggcacccagatcctgcggccccccaaggtgctgagccctggggtgagccaccggctgcgggaccaggagctgatcctgtttgctgacctgctgtgccagtaccaccggctggatgtgtccctgccctttgtgtcccggggccccctgactgtggaggagaccccccgggtgcagggcgagacccagccccagaggctgctgctggccgaggacagcgaggaggaggtggacttcctgtctgagaggaggatggtgaagaagagcaggaccaccagcagcagcgtcatcgtgcctgagagtgatgaggagggccacagccctgtgctgggcggcctgggccccccatttgccttcaacctgaacagcgacacagatgtggaggagggccagcagcctgccacagaggaggccagcagcgctgcccggcggggggccaccgtggaggccaagcagagcgaggccgaggtggtgacagagatccagctggagaaggaccagcccctggtgaaggagaaggacaatgacaccaaggtgaagagaggagctggaaatggagtggtgcctgctggggtcatcctggagaggagccagcccccaggagaagattctgacacagatgtggatgatgacagcaggcctcctggccggcctgctgaggtgcacctggagcgggcccagcccttcggcttcatcgacagcgacacagatgctgaggaggagcgcatcccagccacccctgtggtgatccccatgaagaagaggaagatcttccacggcgtgggcacccggggccctggggcccctggcctggcccacctgcaggagagccaggccggcagtgacacagatgtggaggagggcaaggccccccaggccgtgcccctggagaagagccaggcctccatggtgatcaacagcgacacagatgatgaggaggaggtgtctgctgccctgaccctggcccacctgaaggagagccagcctgccatctggaacagagatgctgaggaggacatgccccagagggtggtgctgctgcagaggagccagaccaccacagagcgggacagcgacacagatgtggaggaggaggagctgcctgtggagaaccgggaggccgtgctgaaggaccacaccaagatccgggccctggtgcgggcccacagcgagaaggaccagcccccatttggagacagtgatgacagcgtggaggccgacaagagcagccctggcatccacctggagaggagccaggccagcaccaccgtggacatcaacacccaggtggagaaggaggtgcccccaggcagcgccatcatccacatcaagaagcaccaggtgtctgtggagggcaccaaccagacagatgtgaaggctgtgggcggccctgccaagctgctggtggtgtccctggaggaggcctggcccctgcacggggactgtgaaacagatgctgaggagggcaccagcctgacagcctctgtggtggctgatgtgaggaagagccagctgcctgcagaaggagatgctggagctgagtgggccgctgctgtgctgaagcaggagcgggcccacgaggtgggcgcccagggcggcccccctgtggcccaggtggagcaggacctgcccatcagccgggagaacctgacagacctggtggtggacacagacaccctgggggagagcacccagccccagcgggagggcgcccaggtgcccaccggccgggagcgggagcagcacgtgggcggcaccaaggacagcgaggacaactacggggacagcgaggacctggacctgcaggccacccagtgcttcctggagaaccagggcctggaggccgtgcagagcatggaggatgagcccacccaggccttcatgctgaccccaccccaggagctgggccccagccactgcagcttccagaccaccggcctgctgaactgcaagatgcccccagctgagaaggccagccgcatccgggctgctgagaaggtgtccagaggagaccaggagagcccagatgcctgcctgcccccaacagtgcctgaggccccagccccaccccagaagcccctgaacagccagagccagaagcacctggcccccccacccctgctgagccccctgctgcccagcatcaagcccaccgtgaggaagacccggcaggacggcagccaggaggcccctgaggcccccctgagcagcgagctggagcccttccaccccaagcccaagatccgcaccaggaagagcagcaggatgacccccttccctgccaccagcgctgcccctgagccccaccccagcaccagcacagcccagcctgtgacccccaagcccaccagccaggccaccaggagcaggaccaacagaagctctgtgaagaccccagagcctgtggtgcccacagcccctgagctgcagcccagcaccagcacagaccagcctgtgaccagcgagcccaccagccaggtgacccggggcaggaagagccgcagctctgtgaagaccccagagaccgtggtgcccacagccctggagctgcagcccagcaccagcacagacaggcctgtgaccagcgagcccaccagccaggccacccggggcaggaagaacagaagctctgtgaagaccccagagcctgtggtgcccacagcccctgagctgcagcccagcaccagcacagaccagcctgtgaccagcgagcccacctaccaggccacccggggcaggaagaacagaagctctgtgaagaccccagagcctgtggtgcccacagcccctgagctgcggcccagcaccagcacagacaggcctgtgacccccaagcccaccagcaggaccaccaggagcaggaccaacatgagctctgtgaagaccccagagaccgtggtgcccacagcccctgagctgcagatcagcaccagcacagaccagcctgtgacccccaagcccaccagcaggaccaccaggagcaggaccaacatgagctctgtgaagaaccctgagagcacagtgcccatcgcccctgagctgccccccagcaccagcacagagcagcctgtgaccccagagcccaccagccgggccacccggggcaggaagaacagaagcagcggcaagaccccagagaccctggtgcccacagcccccaagctggagcccagcaccagcacagaccagcctgtgaccccagagcccaccagccaggccacccggggccgcaccaacagaagctctgtgaagaccccagagaccgtggtgcccacagcccctgagctgcagcccagcaccagcacagaccagcctgtgaccccagagcccaccagccaggccacccggggccgcacagacaggagctctgtgaagaccccagagaccgtggtgcccacagcccctgagctgcaggccagcgccagcacagaccagcctgtgaccagcgagcccaccagcaggaccacccggggcaggaagaacagaagctctgtgaagaccccagagaccgtggtgcctgctgcccctgagctgcagcccagcaccagcacagaccagcctgtgaccccagagcccaccagccgggccacccggggccgcaccaacagaagctctgtgaagaccccagagagcatcgtgcccatcgcccctgagctgcagcccagcaccagcaggaaccagctggtgaccccagagcccaccagccgggccacccgctgcaggaccaacagaagctctgtgaagaccccagagcctgtggtgcccacagcccctgagccccaccccaccaccagcacagaccagcctgtgacccccaagctgaccagccgggccaccaggaggaagaccaacagaagctctgtgaagacccccaagcctgtggagcctgctgccagtgacctggagcccttcacccccacagaccagagcgtgaccccagaggccatcgcccagggcggccagagcaagaccctgcggagcagcacagtgcgggccatgcctgtgcccaccaccccagagttccagagccctgtgaccacagaccagcccatcagccctgagcccatcacccagcccagctgcatcaagaggcagagagctgctggcaaccctggcagcctggccgcccccatcgaccacaagccctgcagcgcccccctggagcccaagagccaggccagcaggaaccagcgctggggcgctgtgcgggctgctgagagcctgacagccatccctgagcccgccagcccccagctgctggagacccccatccacgccagccagatccagaaggtggagcccgccggccgcagccgcttcaccccagagctgcagcccaaggccagccagagcaggaagaggagcctggccaccatggacagccccccccaccagaagcagccccagagaggagaggtgtcccagaagacagtcatcatcaaggaggaggaggaggacacagctgagaagccaggcaaggaggaggatgtggtgacccccaagccaggcaagaggaagagggaccaggccgaggaggagcccaaccgcatccccagccgcagcctgcggaggaccaagctgaaccaggagagcacagcccccaaggtgctcttcaccggggtggtggatgcccggggggagagagctgtgctggccctgggcggcagcctggccggcagcgctgctgaggccagccacctggtgacagaccgcatccggaggacagtgaagttcctgtgtgccctgggccggggcatccccatcctgagcctggactggctgcaccagagcaggaaggccggcttcttcctgcccccagatgaatatgtggtgacagatcctgagcaggagaagaactttggcttcagcctgcaggatgccctgagccgggcccgggagcggcggctgctggagggctatgagatctacgtgaccccaggagtgcagcccccaccaccccagatgggagagatcatcagctgctgcggcggcacctacctgcccagcatgcccaggagctacaagccccagagggtggtgatcacctgcccccaggacttcccccactgcagcatccccctgcgggtgggcctgcccctgctgagccctgagttcctgctgactggagtgctgaagcaggaggccaagccagaggcctttgtgctgagccccctggagatgagcagcacctag

SEQ ID NO: 285621 - DNA, 4968 bp, Artificial Sequence
  derived and/or modified sequence
atgtaccaccggctggatgtgtccctgccctttgtgtcccggggccccctgactgtggaggagaccccccgggtgcagggcgagacccagccccagaggctgctgctggccgaggacagcgaggaggaggtggacttcctgtctgagaggaggatggtgaagaagagcaggaccaccagcagcagcgtcatcgtgcctgagagtgatgaggagggccacagccctgtgctgggcggcctgggccccccatttgccttcaacctgaacagcgacacagatgtggaggagggccagcagcctgccacagaggaggccagcagcgctgcccggcggggggccaccgtggaggccaagcagagcgaggccgaggtggtgacagagatccagctggagaaggaccagcccctggtgaaggagaaggacaatgacaccaaggtgaagagaggagctggaaatggagtggtgcctgctggggtcatcctggagaggagccagcccccaggagaagattctgacacagatgtggatgatgacagcaggcctcctggccggcctgctgaggtgcacctggagcgggcccagcccttcggcttcatcgacagcgacacagatgctgaggaggagcgcatcccagccacccctgtggtgatccccatgaagaagaggaagatcttccacggcgtgggcacccggggccctggggcccctggcctggcccacctgcaggagagccaggccggcagtgacacagatgtggaggagggcaaggccccccaggccgtgcccctggagaagagccaggcctccatggtgatcaacagcgacacagatgatgaggaggaggtgtctgctgccctgaccctggcccacctgaaggagagccagcctgccatctggaacagagatgctgaggaggacatgccccagagggtggtgctgctgcagaggagccagaccaccacagagcgggacagcgacacagatgtggaggaggaggagctgcctgtggagaaccgggaggccgtgctgaaggaccacaccaagatccgggccctggtgcgggcccacagcgagaaggaccagcccccatttggagacagtgatgacagcgtggaggccgacaagagcagccctggcatccacctggagaggagccaggccagcaccaccgtggacatcaacacccaggtggagaaggaggtgcccccaggcagcgccatcatccacatcaagaagcaccaggtgtctgtggagggcaccaaccagacagatgtgaaggctgtgggcggccctgccaagctgctggtggtgtccctggaggaggcctggcccctgcacggggactgtgaaacagatgctgaggagggcaccagcctgacagcctctgtggtggctgatgtgaggaagagccagctgcctgcagaaggagatgctggagctgagtgggccgctgctgtgctgaagcaggagcgggcccacgaggtgggcgcccagggcggcccccctgtggcccaggtggagcaggacctgcccatcagccgggagaacctgacagacctggtggtggacacagacaccctgggggagagcacccagccccagcgggagggcgcccaggtgcccaccggccgggagcgggagcagcacgtgggcggcaccaaggacagcgaggacaactacggggacagcgaggacctggacctgcaggccacccagtgcttcctggagaaccagggcctggaggtgcagagcatggaggatgagcccacccaggccttcatgctgaccccaccccaggagctgggccccagccactgcagcttccagaccaccggcctgctgaactgcaagatgcctcctgctgagaaggccagccgcatccgggctgctgagaaggtgtccagaggagaccaggagagcccagatgcctgcctgccccccaccgtgcctgaggccccagccccaccccagaagcccctgaacagccagagccagaagcacctggcccccccacccctgctgagccccctgctgcccagcatcaagcccaccgtgaggaagacccggcaggacggcagccaggaggcccctgaggcccccctgagcagcgagctggagcccttccaccccaagcccaagatccgcaccaggaagagcagcaggatgacccccttccctgccaccagcgctgcccctgagccccaccccagcaccagcacagcccagcctgtgacccccaagcccaccagccaggccaccaggagcaggaccaacagaagctctgtgaagaccccagagcctgtggtgcccacagcccctgagctgcagcccagcaccagcacagaccagcctgtgaccagcgagcccaccagccaggtgacccggggcaggaagagccgcagctctgtgaagaccccagagaccgtggtgcccacagccctggagctgcagcccagcaccagcacagacaggcctgtgaccagcgagcccaccagccaggccacccggggcaggaagaacagaagctctgtgaagaccccagagcctgtggtgcccacagcccctgagctgcagcccagcaccagcacagaccagcctgtgaccagcgagcccacctaccaggccacccggggcaggaagaacagaagctctgtgaagaccccagagcctgtggtgcccacagcccctgagctgcggcccagcaccagcacagacaggcctgtgacccccaagcccaccagcaggaccaccaggagcaggaccaacatgagctctgtgaagaaccctgagagcacagtgcccatcgcccctgagctgccccccagcaccagcacagagcagcctgtgaccccagagcccaccagccgggccacccggggcaggaagaacagaagcagcggcaagaccccagagaccctggtgcccacagcccccaagctggagcccagcaccagcacagaccagcctgtgaccccagagcccaccagccaggccacccggggccgcaccaacagaagctctgtgaagaccccagagaccgtggtgcccacagcccctgagctgcagcccagcaccagcacagaccagcctgtgaccccagagcccaccagccaggccacccggggccgcacagacaggagctctgtgaagaccccagagaccgtggtgcccacagcccctgagctgcaggccagcgccagcacagaccagcctgtgaccagcgagcccaccagcaggaccacccggggcaggaagaacagaagctctgtgaagaccccagagaccgtggtgcctgctgcccctgagctgcagcccagcaccagcacagaccagcctgtgaccccagagcccaccagccgggccacccggggccgcaccaacagaagctctgtgaagaccccagagagcatcgtgcccatcgcccctgagctgcagcccagcaccagcaggaaccagctggtgaccccagagcccaccagccgggccacccgctgcaggaccaacagaagctctgtgaagaccccagagcctgtggtgcccacagcccctgagccccaccccaccaccagcacagaccagcctgtgacccccaagctgaccagccgggccaccaggaggaagaccaacagaagctctgtgaagacccccaagcctgtggagcctgctgccagtgacctggagcccttcacccccacagaccagagcgtgaccccagaggccatcgcccagggcggccagagcaagaccctgcggagcagcacagtgcgggccatgcctgtgcccaccaccccagagttccagagccctgtgaccacagaccagcccatcagccctgagcccatcacccagcccagctgcatcaagaggcagagagctgctggcaaccctggcagcctggccgcccccatcgaccacaagccctgcagcgcccccctggagcccaagagccaggccagcaggaaccagcgctggggcgctgtgcgggctgctgagagcctgacagccatccctgagcccgccagcccccagctgctggagacccccatccacgccagccagatccagaaggtggagcccgccggccgcagccgcttcaccccagagctgcagcccaaggccagccagagcaggaagaggagcctggccaccatggacagccccccccaccagaagcagccccagagaggagaggtgtcccagaagacagtcatcatcaaggaggaggaggaggacacagctgagaagccaggcaaggaggaggatgtggtgacccccaagccaggcaagaggaagagggaccaggccgaggaggagcccaaccgcatccccagccgcagcctgcggaggaccaagctgaaccaggagagcacagcccccaaggtgctcttcaccggggtggtggatgcccggggggagagagctgtgctggccctgggcggcagcctggccggcagcgctgctgaggccagccacctggtgacagaccgcatccggaggacagtgaagttcctgtgtgccctgggccggggcatccccatcctgagcctggactggctgcaccagagcaggaaggccggcttcttcctgcccccagatgaatatgtggtgacagatcctgagcaggagaagaactttggcttcagcctgcaggatgccctgagccgggcccgggagcggcggctgctggagggctatgagatctacgtgaccccaggagtgcagcccccaccaccccagatgggagagatcatcagctgctgcggcggcacctacctgcccagcatgcccaggagctacaagccccagagggtggtgatcacctgcccccaggacttcccccactgcagcatccccctgcgggtgggcctgcccctgctgagccctgagttcctgctgactggagtgctgaagcaggaggccaagccagaggcctttgtgctgagccccctggagatgagcagcacctag

SEQ ID NO: 285622 - DNA, 6575 bp, Artificial Sequence
  derived and/or modified sequence
caccatgtctaggaggaccgaggaaaggcgctctggccttaccagacacgtcggacgtctatgacacagcccctctatccgttgccggcagctggcgccagactctctggtcgcggtttggaactgcgcgggaagtgggtggtgggcgggcaagcggtagtgggttgtcccttggagctgcccaatcgacgtgcattattctgttggcgcacggcggccttcaattaccgtctcattaactgatctcagcagcctgggagacaccacctatttgaactctaagggggcggggctttgggtgtgcctccgctcgactggctgcggttgtgaaagacagcggcagaagccaatcagcaaataagctctttttcggcacacgcagtcgctccacccgggtcgcgaccgttactggtggcgcgcgcggggacttaaagtagatcatggaggacacccaggctattgactgggatgttgaagaagaggaggagacagagcaatccagtgaatccttgaggtgtaacgtggagccagtagggcggctacatatctttagtggtgcccatggaccagaaaaagatttcccactacacctcgggaagaatgtggtaggccgaatgcctgactgctctgtggccctgccctttccatctatctccaaacaacatgcagagattgaaatcttagcctgggacaaggcacctatcctccgagactgtgggagccttaatggtactcaaatcctgagacctcctaaggttttgagccctggggtgagtcaccgtctgagggaccaggaattgattctctttgctgacttgctctgccagtaccatcgcctggatgtctctctgccctttgtctcccggggccctctgacagtagaagagacacccagagtacagggagaaactcaaccccagaggcttctgttggctgaggactcggaggaggaagtagattttctttctgaaaggcgtatggtaaaaaaatcaaggaccacatcttcctctgtgatagttccagagagtgatgaagaggggcattccccggtcctgggcggccttgggccgccttttgccttcaatttgaacagtgacacagatgtggaagaaggtcagcaaccagccacagaggaggcctcctcagctgccagaagaggtgccactgtagaggcaaagcagtctgaagctgaagttgtaactgaaatccagcttgaaaaggatcagcctttagtgaaggagaaggacaatgatacaaaagtcaagaggggtgcagggaatggggtggttccagctggggtgattctggagaggagccaacctcctggagaggacagtgacacagatgtggatgatgacagcaggcctcctggaaggccagctgaggtccatttggaaagggctcagccttttggcttcatcgacagcgacactgatgcggaagaagagaggatcccagcaaccccagttgtcattcctatgaagaagaggaagatcttccatggagtaggtacaaggggtcctggagcaccaggcctggcccatctgcaggagagccaggctggtagtgatacagatgtggaagaaggcaaggccccacaggctgtccctctggagaaaagccaagcttccatggttatcaacagcgatacagatgacgaggaagaagtctcagcagcgctgactttggcacatctgaaagagagccagcctgctatatggaacagagatgcagaagaggacatgccccaacgtgtggtccttctgcagcgaagccaaaccaccactgagagagacagtgacacagacgtggaggaggaagagctcccagtggaaaatagagaagctgtcctcaaggatcacacaaagattagagcccttgttagagcacattcagaaaaggaccaacctccttttggggacagtgatgacagtgtggaagcagataagagctcacctgggatccacctggagagaagccaagcctccaccacagtggacatcaacacacaagtggagaaggaagtcccgccagggtcagccattatacatataaagaagcatcaggtgtctgtggaggggacaaatcaaacagatgtgaaagcagttgggggaccagcaaagctgcttgtggtatctctagaggaagcctggcctctgcatggggactgtgaaacagatgcagaggagggcacctccctaacagcctcagtagttgcagatgtaagaaagagccagcttccagcagaaggggatgctggggcagagtgggctgcagctgttcttaagcaggagagagctcatgaggtgggggcccagggtgggccacctgtggcacaagtggagcaggacctccctatctcaagagagaacctcacagatctggtggtggacacagacactctaggggaatccacccagccacagagagagggagcccaggtccccacaggaagggagagagaacaacatgtgggtgggaccaaggactctgaagacaactatggtgattctgaagatctggacctacaagctacccagtgctttctggagaatcagggcctggaagcagtccagagcatggaggatgaacctacccaggccttcatgttgactccaccccaagagcttggcccttcccattgcagcttccagacaacaggcctcctgaattgcaagatgccacctgctgagaaggcttccaggatcagagctgctgagaaggtttccaggggcgatcaggaatctccagatgcttgtctgcctcctacagtacctgaagccccagccccaccccaaaagccccttaactctcagagccagaaacatcttgcacctccgccccttctttctccccttttaccttctatcaagccaaccgttcgtaagaccaggcaagatgggagtcaggaagctccagaggctcccttgtcctcagagctggagcctttccacccaaagcctaaaattagaactcggaagtcctccagaatgacaccctttccagctacctctgctgcccctgagccccacccttccacctccacagcccagccagtcactcccaagcccacatctcaggccactaggagcaggacaaataggtcctctgtcaagacccctgaaccagttgtccccacagcccctgagctccagccttccacctccacagaccagcctgtcacctctgagcccacatctcaggttactaggggaagaaaaagtagatcctctgtcaagacccctgaaacagttgtgcccacagcccttgagctccagccttccacctccaccgaccgacctgtcacctctgaacccacctctcaggctactaggggaagaaaaaatagatcctctgtcaagacccctgaaccagttgtccccacagcccctgagctccagccttccacctccacagaccagcctgtcacttctgagcccacatatcaggctactaggggaagaaaaaatagatcctctgtcaagacccctgaaccagttgtgcccacagcccctgagctccggccttccacctccacagaccgacctgtcacccccaagcccacatctcggaccactaggagcaggacaaatatgtcctctgtcaagacccctgaaacagttgtccccacagcccctgagctccagatttccacctccacagaccaacctgtcacccctaagcccacatctcggaccactaggagcaggacaaatatgtcctctgtgaagaaccctgaatcaactgtccctatagcccctgagctcccaccttccacctccacagagcagcctgtcacccctgagcccacatctcgggctactaggggaagaaaaaatagatcctctggcaagacccctgaaacacttgtccccacagcccctaagctcgagccttccacttccacagaccaacctgtcactcctgagcccacatctcaggccaccaggggcaggacaaataggtcctctgtgaagacccctgaaacagttgtccccacagcccctgagctccagccttccacctccacagaccagcctgttacccctgagcctacgtctcaggctactaggggaagaacagatagatcctctgtcaagactcctgaaacagttgtccccacagcccctgagctacaggcttccgcctccacagaccagcctgtcacctctgagcccacatctcggaccactaggggaagaaaaaatcggtcctctgtcaagacccctgaaacagttgtgcccgcagcccctgagctccagccttccacctccacagaccaacctgtcacccctgagcccacatctcgggccactaggggcaggacaaataggtcctctgtcaagacccctgaatcaattgtccctatagcccctgagcttcagccttccacctccagaaaccagcttgtcacccctgagcccacatctcgggccactaggtgcaggacaaataggtcctctgtcaagacccctgagccagttgtccccacagcccctgagccccatcctaccacctccacagaccagcctgtcacccccaagctcacatctagggccactaggagaaagacaaataggtcctctgtcaagactcccaaaccagttgaaccagcagcctctgatcttgagccttttacccccacagaccagtccgtcacccctgaggccatagctcagggtggtcagagcaaaacactgaggtcttccacagtaagagctatgccggttcctaccacccctgaattccaatctcctgtcaccacagaccagcctatttcccctgagcctattactcaacccagttgcatcaagaggcagagagccgctgggaaccctggctccctcgcagctcccattgaccataagccttgctctgcacccttggaacctaaatcccaggcctcaaggaaccaaagatggggagcagtgagagcagctgaatcccttacagccattcctgagcctgcctctccccagcttcttgagacaccaattcatgcctcccagatccaaaaggtggaaccagcaggtagatctaggttcaccccggagctccagcctaaggcctctcaaagccgcaagaggtctttagctaccatggattcaccaccacatcaaaaacagccccaaagaggggaagtctcccagaagacagtgattatcaaggaagaggaagaagatactgcagagaagccagggaaggaagaggatgtcgtgactccaaaaccaggcaagagaaagagagaccaggcagaggaggagcccaacagaataccaagccgcagcctccgacggaccaaacttaaccaagaatcaacagcccccaaagtgctcttcacaggagtggtggatgctcggggagagcgggctgtgctggcactggggggaagtctggctggttcagcggcagaggcttcccacctggtcactgatcgcatccgccggacagtcaagttcctgtgtgccctggggcggggaatccccattctgtccctggactggctgcatcagtcccgcaaggctggtttcttcttacccccggatgaatatgtggtgaccgaccctgagcaagagaagaactttggctttagccttcaagacgcactgagcagggctcgggagcgaaggctgctagagggctatgagatctatgtgacccctggagtccagccaccaccacctcagatgggagagattattagctgctgtggaggcacatacctacccagcatgcctcggtcctataagcctcagagagttgtgatcacatgccctcaggacttccctcattgctccattccactacgggttgggctgcccctcctctcgcctgagttcctgctgactggagtgctgaagcaggaagccaagccagaggcctttgtcctctcccctttggagatgtcatccacctgagaactccactacccttttccctcccagaccacgaattagaagatatgtggaagaaagaactcagggcgttagaaaggattggggtatattgatacaacttgtcctggaacatgggtgggaccagaaatctttatgaataaatgaaaagataagggatttggaagccacaggttgttttttgtttgtttgtttgtttttttaatggccattttattttatttgtatttatagttttttatttgtatagatttaggggatacaagatttcttacatgcatgtattaaatggccattttaaaattagctagtttcatgctcagatgtcataagtggcagctatctttagccagactgttgcagttattgctcgatgccactcatggtgtcctacctcctatttggaaaccatctctatttttttcttactgagattcttactttggggtcaggaacttgaagggatgcttggagtgagtagatttgagggtccagttatggagtgctactaaaacattttcttctctcctggcctctggaagcatctttagctttgactttgggcaagtctctgtacttttctggccagcttttccaggatttataaaattagagcttcggcttgacctctgtgataaataaatattcactctgtgcctt

SEQ ID NO: 285623 - DNA, 5648 bp, Artificial Sequence
  derived and/or modified sequence
ccacggctccccgggagccatcttggttcccccagaaggcgggaggggcgtaccttgggtgcgactgggcggaggtgacttggaagttcgcttctcggactgtaatactcatccttacctggcgccccgctccgagtttagatcatggaggacacccaggctattgactgggatgttgaagaagaggaggagacagagcaatccagtgaatccttgaggtgtaacgtggagccagtagggcggctacatatctttagtggtgcccatggaccagaaaaagatttcccactacacctcgggaagaatgtggtaggccgaatgcctgactgctctgtggccctgccctttccatctatctccaaacaacatgcagagattgaaatcttagcctgggacaaggcacctatcctccgagactgtgggagccttaatgtaccatcgcctggatgtctctctgccctttgtctcccggggccctctgacagtagaagagacacccagagtacagggagaaactcaaccccagaggcttctgttggctgaggactcggaggaggaagtagattttctttctgaaaggcgtatggtaaaaaaatcaaggaccacatcttcctctgtgatagttccagagagtgatgaagaggggcattccccggtcctgggcggccttgggccgccttttgccttcaatttgaacagtgacacagatgtggaagaaggtcagcaaccagccacagaggaggcctcctcagctgccagaagaggtgccactgtagaggcaaagcagtctgaagctgaagttgtaactgaaatccagcttgaaaaggatcagcctttagtgaaggagaaggacaatgatacaaaagtcaagaggggtgcagggaatggggtggttccagctggggtgattctggagaggagccaacctcctggagaggacagtgacacagatgtggatgatgacagcaggcctcctggaaggccagctgaggtccatttggaaagggctcagccttttggcttcatcgacagcgacactgatgcggaagaagagaggatcccagcaaccccagttgtcattcctatgaagaagaggaagatcttccatggagtaggtacaaggggtcctggagcaccaggcctggcccatctgcaggagagccaggctggtagtgatacagatgtggaagaaggcaaggccccacaggctgtccctctggagaaaagccaagcttccatggttatcaacagcgatacagatgacgaggaagaagtctcagcagcgctgactttggcacatctgaaagagagccagcctgctatatggaacagagatgcagaagaggacatgccccaacgtgtggtccttctgcagcgaagccaaaccaccactgagagagacagtgacacagacgtggaggaggaagagctcccagtggaaaatagagaagctgtcctcaaggatcacacaaagattagagcccttgttagagcacattcagaaaaggaccaacctccttttggggacagtgatgacagtgtggaagcagataagagctcacctgggatccacctggagagaagccaagcctccaccacagtggacatcaacacacaagtggagaaggaagtcccgccagggtcagccattatacatataaagaagcatcaggtgtctgtggaggggacaaatcaaacagatgtgaaagcagttgggggaccagcaaagctgcttgtggtatctctagaggaagcctggcctctgcatggggactgtgaaacagatgcagaggagggcacctccctaacagcctcagtagttgcagatgtaagaaagagccagcttccagcagaaggggatgctggggcagagtgggctgcagctgttcttaagcaggagagagctcatgaggtgggggcccagggtgggccacctgtggcacaagtggagcaggacctccctatctcaagagagaacctcacagatctggtggtggacacagacactctaggggaatccacccagccacagagagagggagcccaggtccccacaggaagggagagagaacaacatgtgggtgggaccaaggactctgaagacaactatggtgattctgaagatctggacctacaagctacccagtgctttctggagaatcagggcctggaagtccagagcatggaggatgaacctacccaggccttcatgttgactccaccccaagagcttggcccttcccattgcagcttccagacaacaggcctcctgaattgcaagatgccacctgctgagaaggcttccaggatcagagctgctgagaaggtttccaggggcgatcaggaatctccagatgcttgtctgcctcctacagtacctgaagccccagccccaccccaaaagccccttaactctcagagccagaaacatcttgcacctccgccccttctttctccccttttaccttctatcaagccaaccgttcgtaagaccaggcaagatgggagtcaggaagctccagaggctcccttgtcctcagagctggagcctttccacccaaagcctaaaattagaactcggaagtcctccagaatgacaccctttccagctacctctgctgcccctgagccccacccttccacctccacagcccagccagtcactcccaagcccacatctcaggccactaggagcaggacaaataggtcctctgtcaagacccctgaaccagttgtccccacagcccctgagctccagccttccacctccacagaccagcctgtcacctctgagcccacatctcaggttactaggggaagaaaaagtagatcctctgtcaagacccctgaaacagttgtgcccacagcccttgagctccagccttccacctccaccgaccgacctgtcacctctgaacccacctctcaggctactaggggaagaaaaaatagatcctctgtcaagacccctgaaccagttgtccccacagcccctgagctccagccttccacctccacagaccagcctgtcacttctgagcccacatatcaggctactaggggaagaaaaaatagatcctctgtcaagacccctgaaccagttgtgcccacagcccctgagctccggccttccacctccacagaccgacctgtcacccctaagcccacatctcggaccactaggagcaggacaaatatgtcctctgtgaagaaccctgaatcaactgtccctatagcccctgagctcccaccttccacctccacagagcagcctgtcacccctgagcccacatctcgggctactaggggaagaaaaaatagatcctctggcaagacccctgaaacacttgtccccacagcccctaagctcgagccttccacttccacagaccaacctgtcactcctgagcccacatctcaggccaccaggggcaggacaaataggtcctctgtgaagacccctgaaacagttgtccccacagcccctgagctccagccttccacctccacagaccagcctgttacccctgagcctacgtctcaggctactaggggaagaacagatagatcctctgtcaagactcctgaaacagttgtccccacagcccctgagctacaggcttccgcctccacagaccagcctgtcacctctgagcccacatctcggaccactaggggaagaaaaaatcggtcctctgtcaagacccctgaaacagttgtgcccgcagcccctgagctccagccttccacctccacagaccaacctgtcacccctgagcccacatctcgggccactaggggcaggacaaataggtcctctgtcaagacccctgaatcaattgtccctatagcccctgagcttcagccttccacctccagaaaccagcttgtcacccctgagcccacatctcgggccactaggtgcaggacaaataggtcctctgtcaagacccctgagccagttgtccccacagcccctgagccccatcctaccacctccacagaccagcctgtcacccccaagctcacatctagggccactaggagaaagacaaataggtcctctgtcaagactcccaaaccagttgaaccagcagcctctgatcttgagccttttacccccacagaccagtccgtcacccctgaggccatagctcagggtggtcagagcaaaacactgaggtcttccacagtaagagctatgccggttcctaccacccctgaattccaatctcctgtcaccacagaccagcctatttcccctgagcctattactcaacccagttgcatcaagaggcagagagccgctgggaaccctggctccctcgcagctcccattgaccataagccttgctctgcacccttggaacctaaatcccaggcctcaaggaaccaaagatggggagcagtgagagcagctgaatcccttacagccattcctgagcctgcctctccccagcttcttgagacaccaattcatgcctcccagatccaaaaggtggaaccagcaggtagatctaggttcaccccggagctccagcctaaggcctctcaaagccgcaagaggtctttagctaccatggattcaccaccacatcaaaaacagccccaaagaggggaagtctcccagaagacagtgattatcaaggaagaggaagaagatactgcagagaagccagggaaggaagaggatgtcgtgactccaaaaccaggcaagagaaagagagaccaggcagaggaggagcccaacagaataccaagccgcagcctccgacggaccaaacttaaccaagaatcaacagcccccaaagtgctcttcacaggagtggtggatgctcggggagagcgggctgtgctggcactggggggaagtctggctggttcagcggcagaggcttcccacctggtcactgatcgcatccgccggacagtcaagttcctgtgtgccctggggcggggaatccccattctgtccctggactggctgcatcagtcccgcaaggctggtttcttcttacccccggatgaatatgtggtgaccgaccctgagcaagagaagaactttggctttagccttcaagacgcactgagcagggctcgggagcgaaggctgctagagggctatgagatctatgtgacccctggagtccagccaccaccacctcagatgggagagattattagctgctgtggaggcacatacctacccagcatgcctcggtcctataagcctcagagagttgtgatcacatgccctcaggacttccctcattgctccattccactacgggttgggctgcccctcctctcgcctgagttcctgctgactggagtgctgaagcaggaagccaagccagaggcctttgtcctctcccctttggagatgtcatccacctgagaactccactacccttttccctcccagaccacgaattagaagatatgtggaagaaagaactcagggcgttagaaaggattggggtatattgatacaacttgtcctggaacatgggtgggaccagaaatctttatgaataaatgaaaagataagggatttggaagccacaggttgttttttgtttgtttgtttgtttttttaatggccattttattttatttgtatttatagttttttatttgtatagatt

SEQ ID NO: 285624 - DNA, 5478 bp, Artificial Sequence
  derived and/or modified sequence
atggaggacacccaggccatcgactgggacgtggaggaggaggaggaaaccgaacagagcagcgagtcactgagatgcaatgtcgaacccgtaggccgccttcacatattcagcggggcgcatggcccagagaaagacttccccctacatctcggtaaaaatgttgtcggccgcatgcctgattgtagtgttgctctccctttcccaagcatctcaaaacagcacgcagaaattgaaatcctggcctgggacaaggcccctattctccgagattgcggtagcctgaatggaacccaaatactccggccccctaaagtgctttcacctggagtgtcccatcgactgcgagatcaagagttaattctgttcgcagacctcctctgtcaatatcacagactggatgtatcactaccattcgtgtcacgaggccctctgactgtggaagagactccacgggtgcagggcgaaacacagccgcagcgcctcttacttgccgaggactcagaggaagaagtggattttttgagtgagcgaaggatggtcaagaagagtaggactacctccagttcggtcattgtccccgaaagcgacgaggagggacactctcccgtcctgggcggtcttgggccaccgtttgcctttaacttaaatagcgacacagatgtggaagaaggacagcaacccgccaccgaagaagcctcctcagccgcaaggagaggggccactgttgaggctaaacagagcgaagccgaggtggtgaccgagatccaacttgaaaaagaccagcccctcgtaaaggagaaggataacgacaccaaagtgaaacggggagccggtaacggggtcgtaccagctggcgtaatcctggagcgttctcaaccaccaggagaggatagcgatacagatgtggacgacgattccaggcctccgggcaggcccgcagaggtccatcttgagagggcccagccgttcggattcatcgactctgatacagatgcggaggaggaacgcatccccgctaccccagtggtgatccccatgaagaagcggaaaatctttcacggagtgggtaccagaggacccggcgctccgggcttagcccatttacaggagtcacaagccgggtctgatacagacgtggaggagggaaaagcaccccaggctgtgcccctggagaagtcccaggcttccatggtgataaactcagacaccgacgatgaagaagaagttagcgccgcactgactctcgcccacctcaaagaaagccagccagccatatggaatcgcgatgccgaggaagacatgccgcagcgagtcgttttgctgcagaggagccaaacaaccactgagagggatagcgacactgatgttgaagaggaggaactccctgtggagaaccgcgaggcagtgctgaaagaccataccaagatcagggctctggtgcgggcacattccgaaaaagaccagccaccctttggggactcagatgattccgttgaggcagataagagcagccctggaattcatctggagcgttcacaggcctccactacggttgatataaacacacaagtcgaaaaagaggtccctcctggcagtgccatcattcatataaagaagcaccaggtttccgtagaaggaaccaaccagacggatgtgaaagccgtaggaggaccagctaaactgctcgtagtgtctctcgaggaggcttggcctttacacggggattgcgaaactgacgccgaggagggcactagtctgactgccagcgttgtggctgatgtgcgcaagtctcagctgccagccgagggagacgctggagcagagtgggcagccgccgtgctcaaacaggagcgcgcacatgaggtcggggcccagggtggaccaccagttgctcaggtggaacaggatttgcccattagccgtgagaatttgacggacttggtggtggataccgatactttaggagagagcactcagccacagagagagggggcccaggtgcctacaggaagagagcgcgagcagcatgtgggtggcactaaagacagcgaagacaactacggcgatagcgaagacttggatctccaggctactcagtgttttctcgagaaccagggcctcgaagccgttcagtctatggaggacgagcccacacaagctttcatgctgactccgccacaagaactagggccgagtcattgcagtttccagaccaccggcctgcttaactgcaagatgcctcccgcagaaaaggcgagccggatccgagctgccgaaaaggtctctaggggagaccaagaaagtccggacgcatgcctccctccgacggtgcccgaggcacccgcgcctcctcaaaaacctcttaatagccagtctcaaaaacatctggcaccccccccactgctgtcaccattgctcccctccatcaaacctacagtgaggaaaaccagacaggacggttcccaggaggccccagaggcacccctgtcatctgaacttgaacccttccacccgaaaccaaaaatacgcacccggaaaagttctaggatgacaccatttcccgcgactagcgccgccccggagccccatccgtctacttccaccgctcagccagttacccccaagccaacctcccaggctacccgctctcggaccaaccgctcatccgtgaaaactcccgagcccgtggtcccaacggcccccgagctgcagccctcgactagcacagatcagccagtgacctcagaacccacctcccaggtcacgagggggagaaagtctcggtctagcgtaaaaactcccgaaactgttgtacccacggctcttgaacttcagcctagcactagcactgatcggcctgtgacttccgagcctacatctcaggccacacggggccggaagaaccggtcatccgttaaaactccggagccagtggtgcctactgcaccagaactccagcctagtacgagtaccgatcagccggtgacctcagagcccacctaccaagctacccgtggcagaaaaaacagaagctctgtgaagacgccggagccagttgtgcccacagcgcccgagttgcgaccgtccacttcaacagaccgcccggttacacctaaacccactagccgcacaaccaggtctcgcacgaatatgtcatccgtgaaaacgcctgagaccgtcgtcccgaccgccccggagctccaaatttcgacctcaactgaccagcccgttactcctaagccaacttcccgaacaacccggtctcggactaatatgtctagcgtgaagaaccctgaatctacagtgcctattgcccccgaactgcctccgtccacaagtacagaacagcctgttacaccagaacctacaagtcgggcaacacgtggtcgcaagaatagatcctctgggaagactcccgagacccttgttccaactgcacccaagctggaaccttcaacttccacagaccagccggttacccctgagccgaccagccaggccaccagaggccggacgaacagaagctcagtgaaaactcccgagaccgtggtgccaacagctccagagctccagccatctacctctaccgaccagcccgtcacccccgagcctacatctcaagccacaagaggtaggacagatagatcctccgtgaagactccggaaaccgtcgtgcctacggcccccgaactgcaggcctcagcctctaccgaccaaccagtgacgtctgagcccaccagtcggacaacccggggccggaaaaacaggtctagcgttaaaacaccagaaacagtggtgcctgccgcaccagaactgcaaccctccacctcaactgaccagcccgtcacgcccgaacccactagcagagccacgcgcgggcgcacaaaccggtccagcgtgaaaactcctgagtctatcgtgcccatcgctcccgaacttcagccgtcaacctcacgtaatcagctggtcacaccggagccaacttctcgtgctacacgttgtcggaccaatcgctctagcgtgaagacaccagaaccagtcgtcccaactgccccagaaccccaccccaccacaagcaccgaccaaccagtgacgccaaagctgaccagtcgggcaacgcggagaaaaacgaaccgtagtagcgtcaaaactcctaaaccagttgagccggccgctagcgatctcgagcccttcacccctactgatcaatctgtgaccccggaggctattgcccagggcggccagtctaagaccttgaggtcttccacagttcgcgcaatgcccgtcccaacgactcctgagttccagtcacctgtgacaacggaccagcctatttctcccgaaccgatcacccagccaagctgtattaagcgacagcgggctgccggaaaccccggaagtctggcggcaccgattgatcacaaaccttgctccgccccactggagcctaagtcccaagccagtaggaaccaacggtggggggcagtccgggcagctgagagcctcaccgccattccggagcctgcttcaccccagttgcttgagacacctatccacgcctcccaaatccagaaagtggagcccgcaggccggtctcgcttcaccccggaactacaacctaaggccagccaaagccgcaaacgaagtttggcaactatggatagccctccacaccagaagcaaccacagcggggtgaggtatcacaaaagactgtgatcatcaaagaagaagaggaggatacagcagagaaaccagggaaagaggaagatgtcgttactcccaaacctggcaagagaaaaagggatcaggctgaggaagagcctaatcgcatcccatcccgaagcctccgaagaacaaaacttaatcaagaatccaccgccccaaaggtcctgttcaccggtgtcgttgacgcccggggggaacgcgctgtcttagctttgggcggatccctggctgggagcgcagcggaagcttctcatctggtcaccgaccgcattcgacgcactgtgaaattcctgtgtgcactgggccggggcatccccattctcagtctcgactggctgcatcagtcgagaaaggctgggttcttcctgccgcctgatgaatacgtcgtaacagatcctgagcaggaaaagaactttggcttttcattgcaggacgctttgagtagggctcgggaacgcaggctgctggagggctatgagatttacgtgacaccaggcgtccagcccccacccccacagatgggggaaatcatctcttgctgcggtggcacttaccttccatctatgcccagatcgtacaagccacagcgggttgtgattacctgcccccaggactttccccactgttctatcccacttcgtgtgggtctgcctctacttagccctgagtttctgttaaccggagtgctgaagcaagaggcaaaaccagaagcctttgttttgtccccccttgagatgtcaagtacttag

SEQ ID NO: 285625 - DNA, 4968 bp, Artificial Sequence
  derived and/or modified sequence
atgtaccaccggctggacgtgagcctgcccttcgtgagccggggccccctgactgttgaggaaacccctagggtccagggcgaaacccagcctcagcgcctcctcctcgctgaggactccgaagaggaggtggactttcttagcgaacgcagaatggtcaaaaaatccagaactacgtctagttccgtcattgtgcccgagtctgacgaggaaggccacagccctgttctcgggggtctgggaccacctttcgctttcaatctgaattcagacactgacgtggaagaggggcaacagcccgccaccgaggaggcttctagtgccgctagacgaggtgcgacagtggaggcaaaacaatccgaagctgaagtagtcacagagattcagctcgaaaaggaccagcccttggtcaaagaaaaagacaacgatactaaagtaaaacggggcgctggcaatggcgtggtacctgccggagttattctggagcgttcccagccccccggcgaggatagtgataccgacgtggacgacgactcacggccaccaggtagaccagccgaggtgcacctcgaaagggcccaacctttcggattcatcgacagtgacaccgatgccgaagaggaacgcatcccggctacccctgtggtgataccaatgaaaaaacggaaaatatttcatggggttggcacgcgcggcccgggagccccgggactggctcacttgcaagagagccaagctgggagcgatacagatgtcgaggaggggaaagcaccgcaggcggtgcccctggaaaaaagtcaagcttctatggttattaacagcgataccgacgacgaagaagaagtcagcgcagccttaacgcttgctcacctgaaggaatcgcagcccgcaatctggaatcgcgacgctgaagaagatatgccccagcgggtcgtgctgctgcagcggtcgcagacaactaccgagcgggattcggatacggatgtcgaggaagaggagctgccagtcgaaaatcgagaggcagtattgaaagaccacacaaagattcgggcacttgtacgggcccattctgagaaagaccagccacctttcggggactccgatgacagcgtggaggctgacaaatcgtccccaggaatccacctggagcgctcccaggcgtctactacagtggatatcaatacccaggtggagaaagaggttccacccgggtccgccattatacatattaaaaagcaccaggtctctgtcgaaggaacaaaccagacggacgtcaaagcagtcggaggtcctgctaaacttctggtagtgagcctcgaagaagcctggccgctgcacggggactgtgagacggatgcggaagaaggaacttcactcaccgcttctgtagtggccgatgtgagaaagtctcagcttcccgccgaaggcgacgcgggtgctgagtgggcagccgccgtgctaaagcaggagcgcgcacacgaagtgggcgctcagggaggaccacccgtggcccaggtggagcaggaccttccgatctcccgtgaaaacctaacagatttggtagtcgacacagatacactgggtgaaagtacccaaccgcagcgtgaaggcgcgcaagtaccgaccggccgggaacgcgaacaacatgtggggggaacaaaggactccgaggataactatggcgatagtgaggatctggatctacaggctacccagtgcttcctggaaaatcaggggcttgaagtgcagtccatggaagacgagccgacacaggcctttatgctcacccctcctcaggagctgggcccatctcactgtagcttccagactactggccttctgaactgcaagatgccgcctgcagagaaggcgtctcgtatcagagcggcagagaaggtgtctaggggcgatcaggaaagcccagacgcctgtcttccgcccaccgttcccgaggctcccgccccaccacagaaaccattgaatagccagtctcagaagcatctagccccccccccccttttgagtcccctccttcctagcatcaagcctaccgtgagaaagaccagacaggatggatctcaggaagcccctgaagcacccctgtcgagcgagcttgagcccttccaccccaaaccgaaaattcgaacacggaagagcagccggatgacccctttccccgcaaccagtgccgctccagaaccacacccaagcacttctacagcgcaaccagtcacacctaaacccacctcccaggccactagatcccgcacgaataggtcttccgtcaagacgccagaacccgttgtcccaactgctccagaactacagcctagtaccagtaccgaccagcccgtcacaagtgagcccacctcacaagtcaccaggggacgtaagagccgctcctctgttaaaactccagaaacagttgtaccaactgctcttgaactccaaccctctaccagcacagacaggcccgtcacgtctgaacccactagtcaggcaacacgcgggaggaaaaaccgatcgtcagtcaaaactcctgagccagtggttccgaccgctcctgaactgcaaccgagcacaagtactgaccagcctgtcacgtctgagcccacataccaagccactcgcggacggaagaatcggagctcggttaaaacccccgaacccgtggttccaactgctcctgaactacgcccgagcacctctactgaccgtcccgttacccctaaaccaacgtccaggactaccagatcgaggaccaacatgagctcggtgaagaatccagaatcgacggtccctatcgcgcccgagttgcccccctccacatctacagagcagcccgtcacccctgagccaaccagcagggcaacacgcggaaggaagaataggtcaagcggcaaaacaccggaaacattagtgcccactgcacctaagttggaacccagcacctctacagatcagccagtcacaccagaacccacgagtcaggccaccagaggaaggacaaacaggagctctgtcaagacaccagaaaccgtggtcccaaccgcccctgaactacagccttccacaagtaccgatcaacccgtgacccccgaacctactagtcaggctactaggggccgaacagaccggtcatctgttaaaaccccggaaactgtcgtgcccaccgccccggaactccaggcgagcgcttctaccgatcagcctgtgaccagcgagccaacaagtagaactacccgaggccggaagaaccgctccagcgttaaaactcccgagaccgtcgtcccagctgcccccgagctgcagccctccacctcgactgaccagcccgtgacacctgaaccaactagtcgggctaccaggggccggaccaaccgaagcagtgtgaagactccagaaagcatcgttccaattgcaccggaactgcagccttcaacgtctcgtaatcagttggttacacctgaacctacctctcgggctacgcggtgcagaacaaaccgaagcagcgtaaagaccccagagcccgtggtgcccacagcccctgaaccgcatccgactaccagcaccgaccagcccgtaactcctaagctcaccagccgtgccactcggaggaaaaccaaccggtcttctgtcaagacacctaagccagttgaaccagccgcgtctgatctggagccatttacacctacagatcagagcgtcacacctgaggccatcgcacaagggggacagagtaagactctgcgcagctccaccgtccgagccatgcccgtgccaacgaccccagaatttcaatcccctgtgacgacggatcaacccatctcaccggagcccatcacacagccaagttgcattaagagacagcgggctgccggcaatcctggatcgttggcagctccaattgaccacaaaccttgtagtgctccgctggaacctaaatctcaggcctcgcgcaaccagcggtggggggcagtgagggctgcggagtcccttacagccattcctgagcccgcatccccccagctactcgagaccccgatacatgcctctcagattcagaaagtggagcccgctggccggtcgcgcttcacgcccgaactgcaacccaaggcctctcagagccgcaaaagatctctagccacaatggactctcccccccatcagaaacaaccgcagagaggagaggtgagccagaaaacagtgatcatcaaggaggaggaagaggatactgcagaaaaacccggtaaggaagaggacgtcgtcactcccaagccgggaaagcggaaacgcgatcaagctgaggaagagcccaatagaattccttccagatcactcagaagaacgaagctcaatcaggaaagtacggccccaaaggtcctcttcaccggggttgttgatgcgcgcggcgagagagctgtcctggcgttgggtggttccctcgcaggatccgcagctgaagcctcccacctggtaacggaccggattaggaggaccgtgaagttcctctgcgcgttaggtcgcggcattcccatcctgagccttgactggcttcaccagtctaggaaggcaggttttttcctgccacctgacgagtatgtggtgactgaccccgaacaggagaaaaactttggtttctcattgcaggacgccctcagccgcgccagagagagaagactgctggaggggtacgagatatatgtcactccaggcgtgcaaccaccaccacctcagatgggagagataatcagctgctgcggaggtacctacctgccctcaatgcctcggagctataagccgcagcgggtagtgatcacctgtcctcaggattttccccactgcagcattccactacgggtgggcctcccactcctttccccggaattcctcctcaccggcgtactcaagcaagaggccaaacctgaggctttcgtcttatcgccgctggagatgtcatctacttag

SEQ ID NO: 285626 - DNA, 5477 bp, Artificial Sequence
  derived and/or modified sequence
atggaggatactcaagcgatcgactgggacgttgaagaggaagaggagactgaacaatcctcagaatccctgcgctgtaacgtagagcccgtcggtcgtttgcacattttttcaggggctcatggacccgaaaaggactttcctctgcatctggggaaaaatgtagtggggagaatgcccgattgctccgtcgctctgccttttccatctatttcaaaacagcacgctgagatcgaaatcttagcctgggacaaagctccaatcctgcgggattgcggatctctcaacgggactcagatcctccgaccccctaaagtgctcagtccgggagtgagtcaccgactgagagaccaggaactgatcctgtttgccgacttgttgtgtcaatatcaccgattggatgttagcctgcccttcgtaagtcggggtccacttacagtcgaggaaacccctagagtccagggcgagacccagcctcagaggctgctgctggcggaggactccgaggaggaggtggattttctgtccgaacgccgtatggtcaaaaaatcgcgcactaccagtagttctgtcattgtacccgaatcagatgaggagggccattcccccgtccttgggggattgggcccaccattcgcattcaatctgaactctgatactgatgttgaagaaggacagcaaccagccaccgaagaagcctcctccgccgcacggaggggggcaactgtggaggcaaaacagtcagaagcggaagtggtgaccgagatacagctggaaaaagaccagcccctggtcaaggagaaagacaacgacacgaaagtgaaacggggtgcaggaaatggagtggtcccagccggtgtgattctggagagatcacagcctcccggtgaggactccgataccgacgtagatgatgattccagaccgccagggcgacccgctgaagtccacctggagcgcgcacagcctttcggtttcatagacagtgacaccgatgccgaggaagagcggatcccggcaaccccggtggttatcccaatgaaaaaacgcaaaatcttccatggcgtaggcacgagaggcccaggcgctcctggattggcccatctgcaggaaagtcaggccggatccgacaccgacgttgaagaaggtaaggcccctcaggctgtgcctctggagaaatcccaggctagcatggtcattaattcagacaccgatgacgaggaagaggtttctgcagccctgactctcgctcacctcaaggagagccagcccgcaatctggaacagggacgccgaggaagatatgccacagagagtggtcctcctccagcgttctcaaacaaccactgagagagacagcgatacagacgtggaggaagaagaactgcccgtcgagaacagggaagccgtacttaaagaccataccaaaattcgcgcactcgtgcgggcacatagtgaaaaggatcagcctccattcggagacagtgacgactctgtggaggcagacaagtcgagcccaggaatacacctcgaacgaagccaggcatctactaccgtcgacatcaatacacaggtggaaaaggaagttcctcctggctcagccatcattcacatcaaaaagcaccaggtgagcgtggagggcactaatcagacagacgttaaggccgtggggggaccagccaaattgttggtggtctctctcgaggaagcatggccccttcatggtgattgcgagactgacgccgaggaaggtaccagcttaactgcatctgtggtggccgacgttagaaaaagccaactgcccgctgagggtgatgccggtgcagagtgggccgctgctgtgctgaaacaagaacgagcccatgaggtaggagcacagggtgggccacctgttgcccaggtggagcaggatctccctatcagccgcgagaacctcaccgatctggtggtggacacagacacgctgggcgaaagcactcagccccagcgtgagggagcccaggtgccaaccggtcgggagagagagcagcacgtcggagggaccaaggatagtgaagataactacggcgatagcgaggacctggatctgcaggccactcagtgcttcctcgagaaccaaggactggaggctgtgcagtccatggaggatgaacctacacaagcctttatgctgaccccccctcaggaactgggacctagtcattgttcctttcaaaccaccggtttactgaattgcaaaatgccccctgcggagaaagcttcaagaatccgggcagccgagaaagtctctaggggcgatcaggaaagtcccgatgcttgcttgcctcccactgtgccagaggcacctgcccctccacagaagcctctgaactcacagagccaaaagcacctggcaccgcctcccctcctttcccctctgctaccctcgatcaagcccacagttcgcaagacgcggcaagatggctcgcaagaggcgccagaggccccactctccagcgagctggagccattccacccaaagccaaagattcggacccgcaagtccagtcgtatgaccccttttcccgctacgtctgccgctccagagcctcacccgagtacatctaccgcccagccggtgacgccaaaacccacatcccaggcaacccggtctcgcacaaaccgatctagcgttaaaaccccggagcctgtggttcccaccgctcccgagcttcagccaagtacgtcgacagaccagccggttacaagtgaaccgacctcccaggtgactagagggaggaagtcgcggagctctgtcaagaccccggaaacagtggttcctactgccctggagttacaacccagcacctctactgatcggccagtcacatcagaacccaccagccaggctacaagaggacgaaaaaataggtcatcggttaagaccccagaacccgttgtacccacggctcccgagctacaaccaagcacaagtactgaccagcccgtcactagcgaacctacttatcaggccacaagggggaggaaaaacagaagtagcgtgaaaactccagagcctgtggttccgaccgcacctgaattaagaccctcaacaagcactgaccgtcccgtgactccgaagccaaccagtcgaacaacacgatcacgcacgaatatgtccagcgtgaagacccctgaaacggtggtgccaactgctcccgaactgcaaatttcaactagtaccgaccagccagtcacccccaagcccacttctaggaccactcgctcacggactaacatgagctcagtgaagaaccctgaatctacagttccgattgctccagagctgcccccttccacttccaccgaacagccggtaactccagaacccacatcacgggcaacaagagggagaaagaacagatctagcgggaagacaccggaaacgttagtcccaactgccccaaagcttgagccatcaacctctaccgaccagcccgttaccccagaacccacatcccaggccacacggggacggaccaatagatcttcagtgaaaactccagagacagtggtgccgacagccccagagctacagccttccacctctaccgatcagcctgttacacctgaacccacttcccaggctaccagaggccgaaccgaccgatcttctgttaaaaccccagaaactgttgtgccaactgcgccagagctgcaggccagcgcttccactgaccagcctgttacttctgagcctacatcgcgcacaactagaggaagaaagaaccgcagcagcgtgaaaacccctgaaacggttgtgcctgctgcacctgaactgcaacctagcacatctaccgaccagccggtcactcccgagcccacctctagggctactcgagggcgtaccaataggtcctctgtgaaaaccccagagagcatagtgccaatagcaccggaactgcagccaagcacaagcagaaatcaactggttacaccagagccaactagtcgcgctacacggtgtagaactaatcgcagcagtgtgaagacaccagaacctgttgtgccaacagcaccagaaccgcatcctacaacatcaactgatcaacctgtgaccccaaagctcacgagccgggcaactagaagaaagaccaacagaagttctgtgaaaacccccaaacccgtggaacccgctgcatctgacctggagccttttactcccaccgaccagtcagtcactccagaggctatcgctcagggtgggcagagcaaaacacttcgatcctctacagtgagagcgatgcccgtcccaactacacccgaattccagtcccctgtcactaccgatcagcctatatcgcccgagcctataacgcagccatcctgcatcaaaaggcagagggcagcagggaatcccggaagcctggcagcacccatcgaccacaagccatgcagtgctccacttgaaccaaaatctcaggcctccagaaaccagagatggggcgctgtccgggctgccgagtctctaactgcaatcccagagccagcatccccccagctgttagagacccctattcacgcctcccaaatacaaaaggtcgaacccgcaggtcgttccaggttcacaccagagctgcagcctaaagcctcacaatcaaggaaacgaagcctcgccactatggattcacctccacaccagaaacaaccacagagaggcgaggtgtcccagaaaactgtgatcatcaaggaagaagaagaggatactgctgagaagcctggcaaagaggaggatgtggtgacacctaaacctgggaaaagaaagcgggatcaggctgaagaagagccgaatcggatcccgtccagatcacttcggagaacgaaactaaaccaggaatccactgcccctaaggtgcttttcactggcgttgttgacgccagaggtgagagggcggtgttggccttaggtggctcattggctggctccgcggcagaagcttctcatcttgtaacagaccgaatacggagaacagtgaagtttctttgtgcactgggcagaggcatacccatcctctcactcgactggctgcaccaaagccggaaagccggtttctttctgcctccggatgagtatgtggttactgatccagaacaagaaaaaaacttcggcttcagcctgcaggacgccctgtctcgagcaagggaaaggaggctgctagaggggtacgaaatctacgtgacaccaggcgtacagcccccacccccacagatgggcgagatcattagctgctgtgggggtacgtacctaccaagtatgcctcgttcttataaaccccagagggtggttataacttgcccacaagacttccctcactgtagtataccgcttcgagtggggctgcccctgttgtccccagagtttcttttgactggtgtgctgaagcaggaagccaaacccgaagcattcgtgttgagccctctggaaatgagttcaacata

SEQ ID NO: 285627 - DNA, 4968 bp, Artificial Sequence
  derived and/or modified sequence
atgtatcatcgtttggacgtgtctctgccttttgtttcaaggggtcccttaaccgtagaggaaactcccagggtccagggcgagacgcaaccacaaaggctgctcctcgctgaagactctgaggaggaagtggacttcctctccgaaaggcgaatggttaaaaagagccgcacaactagttcaagcgtgatcgtccctgaatccgatgaggagggtcacagccctgtgctgggcggattaggccctcctttcgctttcaatcttaactccgacaccgacgtggaagaaggccagcagccagccaccgaagaggcgtccagtgctgccagaagaggtgccaccgttgaagccaagcagagcgaggccgaggtggttacagaaatacaactggaaaaagaccaacctcttgtcaaagaaaaagacaatgatacaaaggtgaagcggggtgctggcaatggcgtggtccccgcaggagtcattcttgaaagaagtcagccacctggcgaggattctgatacagatgtagacgatgactcacgccctcccggtcgaccagctgaagtccaccttgagcgcgctcagcccttcggattcattgatagcgacaccgacgcggaggaagagaggataccagcgacacccgtggtgattcccatgaagaagagaaagatctttcacggcgtgggcacccgaggacccggagctcccggtctggcacacctgcaagagtcgcaagctggatcagacacagacgttgaagagggcaaggcacctcaggcagtgccccttgagaaaagtcaagctagcatggtcattaattcggatactgacgacgaggaggaggtcagcgccgcactcaccctggcccatctgaaggagagccagccagctatctggaacagagatgctgaagaggacatgccacagcgggtggttttgctgcagcgcagccaaacaaccactgaacgggactctgatacagatgttgaggaggaggagctgccagtagagaacagggaagctgtgcttaaagaccacactaaaattcgcgctctggtgagagcccattctgaaaaagaccagcctccttttggggatagcgatgacagtgtcgaagcagacaaaagctcacccggtatacacctcgagagaagccaggcatcaacaacagtagatatcaacactcaggtggagaaggaggttccaccagggtcagccattattcacattaagaagcatcaggtcagcgttgaaggcaccaaccaaacagacgtgaaggccgtcgggggaccagcaaagctgctcgtggtttccctggaggaggcttggccgcttcatggcgactgtgagactgatgccgaggaggggacaagtctgaccgcgtccgttgttgcagatgttagaaaatcccaactgcctgccgagggggatgctggtgccgaatgggccgcagcggtgctcaagcaagagcgagcccatgaggtgggcgctcaggggggacccccagttgcccaagtggagcaggatctgcccatcagccgcgaaaacctgactgacctagtggttgacactgacactcttggggagagtacgcagccacagcgtgaaggcgcacaggtacccactggccgtgagcgcgaacaacatgtaggcggaaccaaggatagcgaagataactatggcgactcggaagacctggacttacaggccacacaatgctttcttgagaatcagggcctggaggttcaaagcatggaagacgaacctacgcaggctttcatgctcacacctcctcaggagctcggcccatcacactgcagcttccagaccaccgggttgctgaattgtaagatgcctcctgctgagaaggcctcacgaatcagggccgctgagaaagtctcccgaggagaccaggaatcccctgatgcctgtctgcctcccaccgttcccgaggcacctgccccacctcagaagcccctgaatagccagtcccagaaacaccttgcaccaccccctttattatctcccttgttgcccagcatcaagcctaccgtgagaaagacaagacaagatggctcacaggaagcccctgaggcacccctgtctagcgagctcgaaccttttcatcctaagcccaaaattcgtactcggaagtcctcgagaatgactcccttccctgcaacatccgcagcacctgagcctcacccatctacgtccacagcacagcccgtcacgcctaaacctaccagccaggctacacgcagccggaccaatcgttcatccgttaaaacccctgaacctgtggttccaactgcaccagagcttcaaccctctacctcaaccgaccagcccgtaacctcagagcctaccagtcaggtgacacgcggaagaaaaagcaggtcctcagttaaaacccccgagacggtcgtccccaccgccctagaactgcagcccagtaccagcaccgatcgccctgtaacctcggagccaacttcgcaggccacgaggggcagaaaaaacaggagctctgtaaagactccagaacccgtggtgccaaccgcacccgaacttcagcccagtacctccactgatcagccagtgacctccgagcctacatatcaggctacacggggaaggaagaacagatcctctgtaaaaacaccggaaccagtggtgccaaccgccccagagctccgtcccagcacatcaacagatcgccctgtgaccccgaagcccactagtcgaaccaccaggagtagaacgaacatgagctcagtcaagaatcctgaaagtacagtgcccatcgcaccagagttacccccttccactagtactgagcaacccgtcacaccagagcctacctcccgggctactagaggaaggaaaaaccgtagtagcggcaaaacccccgagactctcgttcccaccgcaccgaagcttgaacccagtacttccaccgaccagccggtgacccctgagccgacctcccaggctacacggggtcggactaaccggagtagcgtgaagacaccagagactgtagtgcccactgccccagaactgcagccttccacatctaccgatcaacccgtaactccagagccgacatctcaggccacacggggtcgcacagatagatcttctgttaagacccccgaaacagtggttccaacagccccagagctgcaggcttccgcctcaacagaccagcccgtcacgtccgaacctacgagcagaacaaccagaggacgtaagaaccgctcctctgtgaagacacctgagacagtggttcctgcagccccagagcttcagcccagcacctctactgaccagcccgtcacccccgaacccacgtcacgggcaacgcgtggcagaaccaatcggtctagcgtgaaaactcccgagagtatcgtacctatcgccccagagctccagcccagcacatcaaggaaccaattggtgacccctgaacccacatcccgggcaacaaggtgccgtactaaccgcagttccgtcaaaacgcccgaacctgttgtgccaacagctcctgaaccgcatccgacaacctctaccgatcaaccagttacacccaaattgacatccagagctactaggcgaaaaaccaatcgctcctcagtcaaaacgcctaagccggtggaacctgcagcatccgatttggagcctttcactcctaccgaccagtctgtcactccagaggcaatcgcacaggggggacaaagcaagacactcaggagtagtacggttcgcgcaatgcctgtgcccaccacacctgagttccaaagtcccgtgactaccgaccaaccaatatctccagagcccatcactcaacccagttgtattaaaaggcagagagcagcaggcaaccccggatcactcgctgcccctatcgatcataaaccatgcagtgctccactggaacccaaatcacaggcttctagaaaccaaaggtggggggcagtcagggccgcagagtcactgactgccattcccgaaccagctagtccccagctgctcgagacgccaattcacgccagccaaatacagaaggtagagcctgctggtcggtcccgatttacacctgaattgcagcccaaggcctcacagtccaggaaacgctcgctagctactatggatagccctccccatcagaagcagccccaacgcggtgaagtatctcagaagaccgttatcataaaagaggaggaggaggacactgccgagaagccgggaaaggaagaggatgtcgtgacccccaagcccggtaaaaggaaaagggatcaagccgaggaggagcccaaccgaattcctagccggagcctcagacggacaaagttgaatcaggaatctaccgcaccgaaggtcttattcacgggtgttgttgatgcccgaggggagcgcgcagtgctggcgctggggggttctttagccggatcagcagcagaagcgagtcacttagtgactgatcgcattaggaggaccgttaagttcctgtgcgcgctggggagggggatccccatcctcagcttggactggctgcaccagtcaagaaaggcaggttttttccttcctcctgatgaatacgttgtcaccgaccctgagcaggaaaagaatttcggcttctcactgcaggatgccctttctcgcgcaagggagaggaggctcctggaagggtacgagatttacgttacacccggagtgcagcctcccccacctcagatgggggagatcatcagttgttgcgggggtacgtaccttccttcaatgccccgttcctacaagccacaaagggtcgtgattacatgcccgcaggactttccccactgctccattccacttcgcgtcggtcttcctttactatcccccgagttcctcttgacaggcgttctgaaacaggaagcaaagcccgaggccttcgtgctctctccacttgaaatgtcatccacctag

SEQ ID NO: 285628 - protein, 241 aa, Artificial Sequence
  derived and/or modified sequence
  misc_feature (1)..(1): Xaa can be any naturally occurring amino acid
XPDGRLLRGYDQDAYDGKDYIALNEDLSSWTAADTAAQITQRKWEAARVAEQDRAYLEGLCVESLRRYLENGKETLQRADPPKTHVTHHPISDHEVTLRCWALGFYPAEITLTWQRDGEDQTQDTELVETRPAGDRTFQKWAAVVVPSGEEQRYTCHVQHEGLPKPLTLRWEPSSQSTVPIVGIVAGLAVLAVVVIGAVVAAVMCRRKSSGHFLPTGGKGGSYSQAACSDSAQGSDVSLTA

SEQ ID NO: 285629 - protein, 246 aa, Artificial Sequence
  derived and/or modified sequence
MASVGRREGTAGGGAGPGEPRREEGRAGLSPSSPPGSHSMRYFYTAMSRPGRGEPRFITVGYVDDTLFVRFDSDATSPRKEPRAPWIEQEGPEYWDRETQISKTNTQTYRENLRTALRYYNQSEAGSHIIQRMYGCDVGPDGRLLRGYDQDAYDGKDYIALNEDLSSWTAADTAAQITQRKWEAARVAEQDRAYLEGLCVESLRRYLENGKETLQRADPPKTHVTHHPISDHEVTLRCWALGFYPA

SEQ ID NO: 285630 - protein, 433 aa, Artificial Sequence
  derived and/or modified sequence
MRVTAPRTLLLLLWGAVALTETWAGSHSMRYFYTAMSRPGRGEPRFITVGYVDDTLFVRFDSDATSPRKEPRAPWIEQEGPEYWDRETQISKTNTQTYRENLRTALRYYNPGRRSRLPIPHVRPGSPRVSGSEIRPRGRGTRPDPRPARAPGAFTRFHFQLRPKSPRVGRGGAGLGTGLTAGPGPGSHIIQRMYGCDVGPDGRLLRGYDQDAYDGKDYIALNEDLSSWTAADTAAQITQRKWEAARVAEQDRAYLEGLCVESLRRYLENGKETLQRADPPKTHVTHHPISDHEVTLRCWALGFYPAEITLTWQRDGEDQTQDTELVETRPAGDRTFQKWAAVVVPSGEEQRYTCHVQHEGLPKPLTLRWEPSSQSTVPIVGIVAGLAVLAVVVIGAVVAAVMCRRKSSGGKGGSYSQAACSDSAQGSDVSLTA

SEQ ID NO: 285631 - DNA, 1089 bp, Artificial Sequence
  derived and/or modified sequence
atgagagtgaccgcccccagaaccctgctgctgctgctgtggggcgccgtggccctgaccgagacctgggccggcagccacagcatgagatacttctacaccgccatgagcagacccggcagaggcgagcccagattcatcaccgtgggctacgtggacgacaccctgttcgtgagattcgacagcgacgccaccagccccagaaaggagcccagagccccctggatcgagcaggagggccccgagtactgggacagagagacccagatcagcaagaccaacacccagacctacagagagaacctgagaaccgccctgagatactacaaccagagcgaggccggcagccacatcatccagagaatgtacggctgcgacgtgggccccgacggcagactgctgagaggctacgaccaggacgcctacgacggcaaggactacatcgccctgaacgaggacctgagcagctggaccgccgccgacaccgccgcccagatcacccagagaaagtgggaggccgccagagtggccgagcaggacagagcctacctggagggcctgtgcgtggagagcctgagaagatacctggagaacggcaaggagaccctgcagagagccgacccccccaagacccacgtgacccaccaccccatcagcgaccacgaggtgaccctgagatgctgggccctgggcttctaccccgccgagatcaccctgacctggcagagagacggcgaggaccagacccaggacaccgagctggtggagaccagacccgccggcgacagaaccttccagaagtgggccgccgtggtggtgcccagcggcgaggagcagagatacacctgccacgtgcagcacgagggcctgcccaagcccctgaccctgagatgggagcccagcagccagagcaccgtgcccatcgtgggcatcgtggccggcctggccgtgctggccgtggtggtgatcggcgccgtggtggccgccgtgatgtgcagaagaaagagcagcggcggcaagggcggcagctacagccaggccgcctgcagcgacagcgcccagggcagcgacgtgagcctgaccgcctag

SEQ ID NO: 285632 - DNA, 726 bp, Artificial Sequence
  derived and/or modified sequence
tgacccgacggcagactgctgagaggctacgaccaggacgcctacgacggcaaggactacatcgccctgaacgaggacctgagcagctggaccgccgccgacaccgccgcccagatcacccagagaaagtgggaggccgccagagtggccgagcaggacagagcctacctggagggcctgtgcgtggagagcctgagaagatacctggagaacggcaaggagaccctgcagagagccgacccccccaagacccacgtgacccaccaccccatcagcgaccacgaggtgaccctgagatgctgggccctgggcttctaccccgccgagatcaccctgacctggcagagagacggcgaggaccagacccaggacaccgagctggtggagaccagacccgccggcgacagaaccttccagaagtgggccgccgtggtggtgcccagcggcgaggagcagagatacacctgccacgtgcagcacgagggcctgcccaagcccctgaccctgagatgggagcccagcagccagagcaccgtgcccatcgtgggcatcgtggccggcctggccgtgctggccgtggtggtgatcggcgccgtggtggccgccgtgatgtgcagaagaaagagcagcggccacttcctgcccaccggcggcaagggcggcagctacagccaggccgcctgcagcgacagcgcccagggcagcgacgtgagcctgaccgcctag

SEQ ID NO: 285633 - DNA, 1302 bp, Artificial Sequence
  derived and/or modified sequence
atgagagtgaccgcccccagaaccctgctgctgctgctgtggggcgccgtggccctgaccgagacctgggccggcagccacagcatgagatacttctacaccgccatgagcagacccggcagaggcgagcccagattcatcaccgtgggctacgtggacgacaccctgttcgtgagattcgacagcgacgccaccagccccagaaaggagcccagagccccctggatcgagcaggagggccccgagtactgggacagagagacccagatcagcaagaccaacacccagacctacagagagaacctgagaaccgccctgagatactacaaccccggcagaagaagcagactgcccatcccccacgtgagacccggcagccccagagtgagcggcagcgagatcagacccagaggcagaggcaccagacccgaccccagacccgccagagcccccggcgccttcaccagattccacttccagctgagacccaagagccccagagtgggcagaggcggcgccggcctgggcaccggcctgaccgccggccccggccccggcagccacatcatccagagaatgtacggctgcgacgtgggccccgacggcagactgctgagaggctacgaccaggacgcctacgacggcaaggactacatcgccctgaacgaggacctgagcagctggaccgccgccgacaccgccgcccagatcacccagagaaagtgggaggccgccagagtggccgagcaggacagagcctacctggagggcctgtgcgtggagagcctgagaagatacctggagaacggcaaggagaccctgcagagagccgacccccccaagacccacgtgacccaccaccccatcagcgaccacgaggtgaccctgagatgctgggccctgggcttctaccccgccgagatcaccctgacctggcagagagacggcgaggaccagacccaggacaccgagctggtggagaccagacccgccggcgacagaaccttccagaagtgggccgccgtggtggtgcccagcggcgaggagcagagatacacctgccacgtgcagcacgagggcctgcccaagcccctgaccctgagatgggagcccagcagccagagcaccgtgcccatcgtgggcatcgtggccggcctggccgtgctggccgtggtggtgatcggcgccgtggtggccgccgtgatgtgcagaagaaagagcagcggcggcaagggcggcagctacagccaggccgcctgcagcgacagcgcccagggcagcgacgtgagcctgaccgcctag

SEQ ID NO: 285634 - DNA, 1089 bp, Artificial Sequence
  derived and/or modified sequence
atgcgagtaactgcccccaggaccttgttactgctcctctggggagcagtggctttaacggagacatgggccgggtctcatagcatgcgatatttctacaccgccatgagtcgaccggggagaggagaacctcggtttatcacagtaggatacgttgacgataccctattcgtgaggtttgatagcgacgccacaagcccacgtaaggaaccccgagctccctggatcgagcaagaggggcctgagtattgggacagggagactcagattagtaaaacgaatactcagacataccgtgagaaccttaggactgcccttaggtactataaccaaagcgaggccggatcccatatcattcagcggatgtatggctgcgacgtgggccctgatggacgacttctgcgcggctacgatcaggacgcttatgacgggaaagactatatcgctttaaacgaggacttatctagctggacggctgccgacacagcagctcagatcacacaaaggaaatgggaggccgcccgagtcgctgagcaggatcgtgcttaccttgaaggcctgtgcgtggagtctctcaggcgttacctcgagaacggcaaggagaccctccagcgcgccgaccccccgaagactcacgtgacgcaccatcctatctctgaccatgaagtcaccctccgttgctgggcactgggcttctatccggcagaaattacgctgacatggcagagagacggggaagaccagacgcaggacacagagctggtggagactagacctgccggagatcggacatttcagaaatgggccgccgtggtggtaccctcgggcgaagaacagcggtatacttgtcacgtgcagcatgagggattgcccaagcccctgacattgcgatgggaaccttcatcacagtctactgtacccatcgtcggaatagtggccggcctggctgtgctcgcagtagtggtcattggggccgtcgtagcggcggtgatgtgcaggcgcaaaagttccggtggcaaggggggctcttacagccaggctgcatgctcagatagcgctcagggcagtgacgtctctttgacagcctag

SEQ ID NO: 285635 - DNA, 726 bp, Artificial Sequence
  derived and/or modified sequence
tgaccggacggccgattgctccgtgggtacgaccaagatgcgtatgacggcaaggactacatcgccctcaacgaagaccttagcagttggacagcggccgacactgcggctcaaatcacacagcgaaaatgggaagcggctcgagtggctgagcaggaccgggcctaccttgagggactatgtgtcgaaagcttgagacgatatttagaaaacggcaaagagacacttcagcgcgccgatcctccaaaaacccacgtgacacaccaccccatcagcgaccacgaagtgaccctgagatgttgggccctgggattttaccccgccgagattacgttgacttggcaaagagacggcgaggaccagactcaggacacggagctggtcgagactagacccgcaggtgatcgcacctttcaaaagtgggctgcggttgtcgtgccatcgggcgaggaacagcgctatacttgtcacgtccagcacgaagggctgcccaaacctctaactctgcgttgggaaccatcatcgcagtcaactgttcctattgtcggcattgtggcaggtctggcagttctggccgtagtcgtgataggagcagttgttgccgcagttatgtgccgcagaaaatccagtggccacttcctcccgaccggagggaagggcggaagttattctcaagcagcctgctcagattcggctcagggatccgatgtgtccctcacagcatag

SEQ ID NO: 285636 - DNA, 1302 bp, Artificial Sequence
  derived and/or modified sequence
atgagagtgactgcaccgagaaccctgcttctgctgctgtggggagccgtggccttgacggaaacatgggccggctcccatagtatgagatatttttataccgcaatgtcaaggcctggacggggagagcccagattcattactgttggttacgtggacgacaccctgttcgttagattcgactcagacgcaacttcgccaaggaaagaaccccgagccccttggattgagcaggaaggcccggaatattgggatagggagacccagatctccaagacaaatacccagacttatcgggagaatctgaggactgcattaagatactacaatcctggacggcgaagccgtcttccgataccccacgtcaggccaggttccccacgggtctcaggctcggagatacgccctagaggaaggggaacccgcccggatccccggccagctagggcacccggtgcctttacccgattccatttccagttgcgccccaagagtcctcgcgtgggcagggggggtgctggcctggggacggggctgactgccggcccgggtcctgggagccacattatccagcgtatgtatggttgcgatgttgggcccgatggcaggctgctgaggggatacgatcaggacgcgtacgacggcaaagactatattgcccttaatgaagacctttccagttggaccgctgccgatacagcagctcagattacccagaggaaatgggaagccgccagagtggctgagcaggatcgcgcgtatctagaggggttatgtgtcgagagcttgcggaggtacctggagaatgggaaggaaaccctgcagcgtgcagacccaccgaagactcatgtgacccaccaccctataagtgatcacgaggtaacgctgcgatgctgggccctagggttttacccagcggaaataacactcacctggcagcgggatggggaggaccagacccaagatactgagttagtggaaactagacctgccggcgatcgcacgtttcaaaaatgggccgccgtggtcgtgccctccggtgaggaacagcgctacacatgccatgtgcagcatgagggcttacccaaacctcttaccctgcggtgggaaccatcatctcagtcaactgtgcctattgtggggattgttgccggactagcggtcctggccgtggtcgtgataggcgcagtggtggcagccgtaatgtgcaggagaaagtcaagtggcggcaaggggggctcttactcacaggctgcctgctcggactccgcgcagggttctgatgtctcattgaccgcttag

SEQ ID NO: 285637 - DNA, 1589 bp, Artificial Sequence
  derived and/or modified sequence
agtgtcgccggggtcccagttctaaagtccccacgcacccacccggactcagaatctcctcagacgccgagatgcgggtcacggcgccccgaaccctcctcctgctgctctggggggcagtggccctgaccgagacctgggccggctcccactccatgaggtatttctacaccgccatgtcccggcccggccgcggggagccccgcttcatcaccgtgggctacgtggacgacacgctgttcgtgaggttcgacagcgacgccacgagtccgaggaaggagccgcgggcgccatggatagagcaggaggggccggagtattgggaccgggagacacagatctccaagaccaacacacagacttaccgagagaacctgcgcaccgcgctccgctactacaaccagagcgaggccgggtctcacatcatccagaggatgtacggctgcgacgtggggccggacgggcgcctcctccgcgggtatgaccaggacgcctacgacggcaaggattacatcgccctgaacgaggacctgagctcctggaccgcggcggacaccgcggctcagatcacccagcgcaagtgggaggcggcccgtgtggcggagcaggacagagcctacctggagggcctgtgcgtggagtcgctccgcagatacctggagaacgggaaggagacgctgcagcgcgcggaccccccaaagacacatgtgacccaccaccccatctctgaccatgaggtcaccctgaggtgctgggccctgggcttctaccctgcggagatcacactgacctggcagcgggatggcgaggaccaaactcaggacaccgagcttgtggagaccagaccagcaggagatagaaccttccagaagtgggcagctgtggtggtgccttctggagaagagcagagatacacatgccatgtacagcatgaggggctgccgaagcccctcaccctgagatgggagccgtcttcccagtccaccgtccccatcgtgggcattgttgctggcctggctgtcctagcagttgtggtcatcggagctgtggtcgctgctgtgatgtgtaggaggaagagctcaggtggaaaaggagggagctactctcaggctgcgtgcagcgacagtgcccagggctctgatgtgtctctcacagcttgaaaagcctgagacagctgtcttgtgagggactgagatgcaggatttcttcacgcctcccctttgtgacttcaagagcctctggcatctctttctgcaaaggcacctgaatgtgtctgcgtccctgttagcataatgtgaggaggtggagagacagcccacccccgtgtccaccgtgacccctgttcccatgctgacttgtgtttcctccccagtcatctttcctgttccagagaggtggggctggatgtctccatctctgtctcaactttatgtgcactgagctgcaacttcttacttccctactgaaaataagaatctgaatataaatttgttttctcaaatatttgctatgagaggttgatggattaattaaataagtcaattcctggaatttgagagagcaaataaagacctgagaaccttccagaa

SEQ ID NO: 285638 - DNA, 1154 bp, Artificial Sequence
  derived and/or modified sequence
ggccggacgggcgcctcctccgcgggtatgaccaggacgcctacgacggcaaggattacatcgccctgaacgaggacctgagctcctggaccgcggcggacaccgcggctcagatcacccagcgcaagtgggaggcggcccgtgtggcggagcaggacagagcctacctggagggcctgtgcgtggagtcgctccgcagatacctggagaacgggaaggagacgctgcagcgcgcggaccccccaaagacacatgtgacccaccaccccatctctgaccatgaggtcaccctgaggtgctgggccctgggcttctaccctgcggagatcacactgacctggcagcgggatggcgaggaccaaactcaggacaccgagcttgtggagaccagaccagcaggagatagaaccttccagaagtgggcagctgtggtggtgccttctggagaagagcagagatacacatgccatgtacagcatgaggggctgccgaagcccctcaccctgagatgggagccgtcttcccagtccaccgtccccatcgtgggcattgttgctggcctggctgtcctagcagttgtggtcatcggagctgtggtcgctgctgtgatgtgtaggaggaagagctcagggcattttcttcccacaggtggaaaaggagggagctactctcaggctgcgtgcagcgacagtgcccagggctctgatgtgtctctcacagcttgaaaagcctgagacagctgtcttgtgagggactgagatgcaggatttcttcacgcctcccctttgtgacttcaagagcctctggcatctctttctgcaaaggcacctgaatgtgtctgcgtccctgttagcataatgtgaggaggtggagagacagcccacccccgtgtccaccgtgacccctgttcccatgctgacttgtgtttcctccccagtcatctttcctgttccagagaggtggggctggatgtctccatctctgtctcaactttatgtgcactgagctgcaacttcttacttccctactgaaaataagaatctgaatataaatttgttttctcaaatatttgctatgagaggttgatggattaattaaataagtcaattcctggaatttgagagagcaaataaagacctgagaaccttccagaa

SEQ ID NO: 285639 - DNA, 1750 bp, Artificial Sequence
  derived and/or modified sequence
agaatctcctcagacgccgagatgcgggtcacggcgccccgaaccctcctcctgctgctctggggggcagtggccctgaccgagacctgggccggctcccactccatgaggtatttctacaccgccatgtcccggcccggccgcggggagccccgcttcatcaccgtgggctacgtggacgacacgctgttcgtgaggttcgacagcgacgccacgagtccgaggaaggagccgcgggcgccatggatagagcaggaggggccggagtattgggaccgggagacacagatctccaagaccaacacacagacttaccgagagaacctgcgcaccgcgctccgctactacaacccggggcgcaggtcacgactccccatcccccacgtacggcccgggtcgccccgagtctccgggtccgagatccgcccccgaggccgcgggacccgcccagaccctcgaccggcgagagccccaggcgcgtttacccggtttcattttcagttgaggccaaaatccccgcgggttggtcggggcggggcggggctcgggacggggctgaccgcggggccggggccagggtctcacatcatccagaggatgtacggctgcgacgtggggccggacgggcgcctcctccgcgggtatgaccaggacgcctacgacggcaaggattacatcgccctgaacgaggacctgagctcctggaccgcggcggacaccgcggctcagatcacccagcgcaagtgggaggcggcccgtgtggcggagcaggacagagcctacctggagggcctgtgcgtggagtcgctccgcagatacctggagaacgggaaggagacgctgcagcgcgcggaccccccaaagacacatgtgacccaccaccccatctctgaccatgaggtcaccctgaggtgctgggccctgggcttctaccctgcggagatcacactgacctggcagcgggatggcgaggaccaaactcaggacaccgagcttgtggagaccagaccagcaggagatagaaccttccagaagtgggcagctgtggtggtgccttctggagaagagcagagatacacatgccatgtacagcatgaggggctgccgaagcccctcaccctgagatgggagccgtcttcccagtccaccgtccccatcgtgggcattgttgctggcctggctgtcctagcagttgtggtcatcggagctgtggtcgctgctgtgatgtgtaggaggaagagctcaggtggaaaaggagggagctactctcaggctgcgtgcagcgacagtgcccagggctctgatgtgtctctcacagcttgaaaagcctgagacagctgtcttgtgagggactgagatgcaggatttcttcacgcctcccctttgtgacttcaagagcctctggcatctctttctgcaaaggcacctgaatgtgtctgcgtccctgttagcataatgtgaggaggtggagagacagcccacccccgtgtccaccgtgacccctgttcccatgctgacttgtgtttcctccccagtcatctttcctgttccagagaggtggggctggatgtctccatctctgtctcaactttatgtgcactgagctgcaacttcttacttccctactgaaaataagaatctgaatataaatttgttttctcaaatatttgctatgagaggttgatggattaattaaataagtcaattcctggaatttgagagagcaaataaagacctgagaaccttccag

SEQ ID NO: 285640 - DNA, 1089 bp, Artificial Sequence
  derived and/or modified sequence
atgagggtgacagcccccaggaccctgctgctgctgctgtggggcgctgtggccctgacagagacctgggccggcagccacagcatgagatacttctacacagccatgagcaggcctggccgcggggagccccgcttcatcaccgtgggctacgtggatgacaccctgtttgtgcgctttgacagtgatgccaccagccccaggaaggagccccgggccccctggattgagcaggagggccctgagtactgggaccgggagacccagatcagcaagaccaacacccagacctaccgggagaacctgaggacagccctgcgctactacaaccagagcgaggccggcagccacatcatccagaggatgtatggctgtgatgtgggcccagatggccgcctgctgcggggctatgaccaggatgcctatgatggcaaggactacatcgccctgaatgaagacctgagctcctggacagctgctgacacagctgcccagatcacccagaggaagtgggaggccgcccgggtggccgagcaggaccgggcctacctggagggcctgtgtgtggagagcctgcggcgctacctggagaatggcaaggagaccctgcagagagctgacccccccaagacccacgtgacccaccaccccatcagtgaccacgaggtgaccctgcgctgctgggccctgggcttctacccagctgagatcaccctgacctggcagagagatggagaggaccagacccaggacacagagctggtggagaccaggcctgctggggacaggaccttccagaagtgggccgctgtggtggtgcccagcggggaggagcagcgctacacctgccacgtgcagcacgagggcctgcccaagcccctgaccctgcgctgggagcccagcagccagagcacagtgcccatcgtgggcatcgtggccggcctggccgtgctggccgtggtggtgattggagctgtggtggccgctgtgatgtgcaggaggaagagcagcggcggcaagggcggcagctacagccaggccgcctgcagcgacagcgcccagggcagtgatgtgtccctgacagcctag

SEQ ID NO: 285641 - DNA, 726 bp, Artificial Sequence
  derived and/or modified sequence
tgaccagatggccgcctgctgcggggctatgaccaggatgcctatgatggcaaggactacatcgccctgaatgaagacctgagctcctggacagctgctgacacagctgcccagatcacccagaggaagtgggaggccgcccgggtggccgagcaggaccgggcctacctggagggcctgtgtgtggagagcctgcggcgctacctggagaatggcaaggagaccctgcagagagctgacccccccaagacccacgtgacccaccaccccatcagtgaccacgaggtgaccctgcgctgctgggccctgggcttctacccagctgagatcaccctgacctggcagagagatggagaggaccagacccaggacacagagctggtggagaccaggcctgctggggacaggaccttccagaagtgggccgctgtggtggtgcccagcggggaggagcagcgctacacctgccacgtgcagcacgagggcctgcccaagcccctgaccctgcgctgggagcccagcagccagagcacagtgcccatcgtgggcatcgtggccggcctggccgtgctggccgtggtggtgattggagctgtggtggccgctgtgatgtgcaggaggaagagcagcggccacttcctgcccaccggcggcaaaggaggcagctacagccaggccgcctgcagcgacagcgcccagggcagtgatgtgtccctgacagcctag

SEQ ID NO: 285642 - DNA, 1302 bp, Artificial Sequence
  derived and/or modified sequence
atgagggtgacagcccccaggaccctgctgctgctgctgtggggcgctgtggccctgacagagacctgggccggcagccacagcatgagatacttctacacagccatgagcaggcctggccgcggggagccccgcttcatcaccgtgggctacgtggatgacaccctgtttgtgcgctttgacagtgatgccaccagccccaggaaggagccccgggccccctggattgagcaggagggccctgagtactgggaccgggagacccagatcagcaagaccaacacccagacctaccgggagaacctgaggacagccctgcgctactacaaccctggaagaagaagccggctgcccatcccccacgtgcggcccggcagcccccgggtgtctggcagcgagatccggccccggggccggggcaccaggccagaccccaggcctgcccgggcccctggggccttcacccgcttccacttccagctgcggcccaagagcccccgggtgggccggggcggggccggcctgggcaccggcctgacagctggccctggccctggcagccacatcatccagaggatgtatggctgtgatgtgggcccagatggccgcctgctgcggggctatgaccaggatgcctatgatggcaaggactacatcgccctgaatgaagacctgagctcctggacagctgctgacacagctgcccagatcacccagaggaagtgggaggccgcccgggtggccgagcaggaccgggcctacctggagggcctgtgtgtggagagcctgcggcgctacctggagaatggcaaggagaccctgcagagagctgacccccccaagacccacgtgacccaccaccccatcagtgaccacgaggtgaccctgcgctgctgggccctgggcttctacccagctgagatcaccctgacctggcagagagatggagaggaccagacccaggacacagagctggtggagaccaggcctgctggggacaggaccttccagaagtgggccgctgtggtggtgcccagcggggaggagcagcgctacacctgccacgtgcagcacgagggcctgcccaagcccctgaccctgcgctgggagcccagcagccagagcacagtgcccatcgtgggcatcgtggccggcctggccgtgctggccgtggtggtgattggagctgtggtggccgctgtgatgtgcaggaggaagagcagcggcggcaaaggaggcagctacagccaggccgcctgcagcgacagcgcccagggcagtgatgtgtccctgacagcctag

SEQ ID NO: 285643 - DNA, 1089 bp, Artificial Sequence
  derived and/or modified sequence
atgcgggtgaccgccccccggaccctgctgctgctgctgtggggcgccgtcgcattgacagagacttgggccggatcccactccatgagatacttttacactgctatgtcccgccccggcaggggggaacctcggttcatcacggtggggtacgttgatgatacacttttcgtgaggttcgattctgatgccaccagcccccgcaaggagcctcgggccccctggattgaacaggaaggacctgagtactgggatagagagactcaaatctctaagacaaacacgcagacttatcgggagaaccttagaacagccctgcgctattacaaccaatccgaagctgggtctcatattattcagcgcatgtacggatgtgatgttggaccagacggccgcctgctacgggggtatgaccaagacgcctacgacggcaaggactacatcgcactaaacgaagatcttagtagttggacagccgcggataccgcggcacaaataactcaaagaaagtgggaagccgcccgagttgctgaacaggatcgggcatatctcgagggtctctgcgtcgagtcactgcgccggtacctagagaacggcaaggagactctgcagagggcagaccctccaaaaactcacgttactcaccatcccatcagcgaccacgaggttactctgcggtgttgggccctgggattctacccagccgagattactctgacctggcagcgcgacggggaggaccagacacaagatactgagcttgtggaaaccaggccagcgggcgaccgaacctttcagaaatgggccgcggtggtcgttccatctggagaggaacagaggtatacctgtcatgttcagcacgagggtttaccaaagcctcttacactcagatgggaaccatctagccagagtacagtgcctatcgtgggaattgtggctgggctagctgtcctagccgtggtggtaattggcgccgtcgtggccgccgtgatgtgtcgtcgtaaaagctccggcggaaagggaggatcctattcccaggcggcatgtagcgacagcgcccagggttccgacgtttccctgactgcctag

SEQ ID NO: 285644 - DNA, 726 bp, Artificial Sequence
  derived and/or modified sequence
tgacccgacggccggctgctgcggggctacgaccaggacgcctacgatggtaaagactacatagctttgaacgaggacctaagcagttggactgccgccgatactgcagcccagatcacccaacgcaagtgggaggcagctcgggtggccgagcaggaccgagcttacctcgagggcttatgtgtcgagagcttgaggcgatacctggaaaacggcaaagagaccttgcagcgcgccgacccacctaaaacccatgttactcaccaccccatttccgatcacgaggtaacacttcggtgctgggcactgggattctaccctgccgaaattaccctcacatggcaacgcgacggggaagaccagacacaggacacagaactggttgaaacccgtccagccggcgacaggacttttcagaaatgggccgccgtggtggtaccttccggtgaggagcagcgatatacttgccatgtccagcacgagggtcttcccaagcccctgactctgagatgggagcccagctctcagagcacagtgccaattgtggggattgtggctgggctggccgtccttgcagtggtagtgatcggcgcagttgtggcagcagtgatgtgcagacggaaatccagtggccacttcctgcctactggaggtaaaggaggcagttacagtcaggctgcctgttctgacagtgctcaggggtccgacgtgtctctaaccgcttag

SEQ ID NO: 285645 - DNA, 1302 bp, Artificial Sequence
  derived and/or modified sequence
atgcgggtgaccgccccccggaccctgctgctgctgctgtggggcgcagtggctctgaccgaaacctgggccggctcgcatagcatgaggtacttctacactgccatgagtcggccagggcggggcgaacctcgctttataaccgtgggctacgtggacgacactctgttcgtgcgttttgacagcgatgctacatctccaagaaaagaaccacgggctccttggatcgagcaggaagggccggagtattgggatcgcgaaacccaaatatccaaaactaatacccagacttaccgggagaatctacgaactgctctccggtattacaatccgggcagacgaagtcgcctgcccattccacacgttaggccgggctcccctcgagtctctggctccgaaattcggccaagaggtaggggaacgagacccgatccccggcccgctcgtgcaccaggagcctttacacggtttcattttcagctaaggccgaaatcgcccagggttggccgcggaggtgcagggctaggcacaggattgaccgcaggcccagggccagggtcccacatcattcagcgcatgtatggctgtgatgtaggccccgacggacgactccttcgaggttacgatcaggacgcgtatgacggaaaagattacattgccctgaacgaggacctgtcttcgtggacagctgcagataccgcagctcagattacgcagcgcaaatgggaggcagctcgagttgccgaacaagacagagcgtatctcgaaggactatgcgttgaaagcctgcggcgctatcttgaaaacggcaaagaaacattacagagagccgatccgccaaagacccatgtgacacatcatcccatttcagaccacgaagtgacactaagatgttgggccctgggcttttacccagcagaaataaccttgacctggcaaagagacggagaggatcagacccaggacacggagttggttgagactaggccggctggcgatcggacgttccagaagtgggccgctgtggtggtgccatctggtgaggagcagaggtacacttgccacgtgcagcacgagggcttgcctaagcctctgacacttcggtgggaacctagctcccagagtaccgttcctatagttggtatcgttgccggcctggccgtcttagccgtggtggtgatcggggctgtggtggcggccgtgatgtgcaggagaaagtctagcggcggtaaaggtggatcctacagccaggctgcttgcagcgacagcgctcagggttctgatgtttcactcactgcatag

SEQ ID NO: 285646 - DNA, 1089 bp, Artificial Sequence
  derived and/or modified sequence
atgagggtgacagcccctcggacactcttgctcctcctctggggggcagtggcgctcaccgaaacttgggctgggagtcactcaatgagatacttttacacagccatgtctcgtccagggcgaggtgagcctcgctttattaccgtcggatacgtagatgataccctcttcgtgagatttgactcggatgctacgagcccacgcaaggagccacgagctccctggatagagcaggaggggcctgagtactgggaccgagagacccagatcagcaagaccaacacacagacctatagggagaatctgagaacagcccttcgttactacaaccagtccgaggcaggttctcatatcatacagcgtatgtacggatgtgacgtcggtccagacggacgtctcttgcgcggttacgaccaggatgcctatgatggcaaagactatatcgctctcaacgaggacttgagttcttggacagctgccgataccgcagcccagataacccagagaaaatgggaggcggctcgagtggccgagcaggaccgcgcatatctggagggcctgtgcgtcgagtccctgagacgttacctcgagaacggaaaagagacgctgcaacgggcagatccccctaagacacacgtgactcaccaccccatatctgaccacgaagttacccttaggtgttgggccctgggcttctaccccgctgagattacactgacttggcagcgagatggagaggatcagactcaagacaccgagctagtggaaactagacccgctggggacaggacctttcagaagtgggccgcagtcgtagtaccttcaggcgaggaacagaggtatacatgccacgttcagcatgagggtttaccaaaaccactcacccttcgttgggagccatcaagccagtctactgttccaatagtcggaatcgttgccggtcttgcggtcctggcagtcgtggtgatcggcgcagttgtagctgccgtgatgtgtcggaggaagtccagcggcggaaaagggggatcttattcacaagcagcctgttccgactctgcccaagggtccgatgtgagcctcacggcctag

SEQ ID NO: 285647 - DNA, 726 bp, Artificial Sequence
  derived and/or modified sequence
tgaccagatggtagactcctgcgtggatacgaccaggatgcttacgatggaaaggactacatcgccctgaacgaggacttatcatcctggaccgcagccgatactgccgcacagatcacgcagcgcaagtgggaggctgctcgcgtagcggagcaggatcgtgcctatctggaaggactgtgtgtagagtccttgcggcgatatctggaaaacggcaaggagaccctgcagcgagcggatcccccaaaaactcacgtgacccaccatcctatttcagatcatgaggtcacactgagatgctgggccttaggcttttatccagcagagatcacactgacgtggcagcgcgacggggaggaccagactcaggatacggagcttgtggaaaccagacccgctggcgacagaacatttcaaaagtgggccgctgttgtagtgccttccggcgaagagcagaggtacacatgtcacgttcagcatgaaggactgcctaagcctcttactctcaggtgggagccctcttctcagagcactgtccctatcgtagggattgtggctggcctggccgtgcttgctgtggtcgtcattggcgctgtggtggccgctgttatgtgcaggcgcaagagttccgggcattttctccccacaggaggaaagggcggatcttacagtcaggcagcttgttcagactccgcccaaggatctgatgtctcactgaccgcatag

SEQ ID NO: 285648 - DNA, 1302 bp, Artificial Sequence
  derived and/or modified sequence
atgagggtcactgccccacgtactctccttctgctgttgtggggagccgtcgcgctcacagagacatgggctggcagtcactcaatgcgatacttttatacagcgatgtcaagacctgggaggggtgaacccaggtttatcaccgtcggctatgtggatgacactctctttgtgcgtttcgattctgacgctacaagcccaagaaaagagcctcgagcaccttggatcgaacaggaaggcccagagtactgggatagagagacacagatttcaaagactaatactcaaacttaccgtgaaaatttgcgaaccgctctgaggtattataacccaggcaggcgatctcggttacctatcccacatgtgcgacctgggtcccctagggtatctgggtctgagatccgtcctcggggacgcggtactagaccggatccgaggcccgctagggcacctggcgcttttacgcgctttcatttccagctacgccctaagtcccccagggtgggccgtggcggtgccggactcggaactggtttgaccgctggacctggccctggatcacatatcattcagcgtatgtacggctgcgacgttggacctgatggaagactcctccggggatatgaccaggacgcctacgacggaaaggattacatcgcattgaatgaggacttgagtagctggacagccgctgacaccgcggcacaaatcacccaacggaagtgggaagcggctagagtagccgaacaggaccgcgcttacctcgaaggactctgtgtcgagagtttgaggcgctatctggagaacggaaaagagaccctacaacgggctgacccccctaaaacacacgtgactcatcacccaattagtgatcacgaggtgacactcaggtgctgggcacttggtttttaccctgccgaaataacactcacatggcagcgtgacggcgaagaccagactcaggatacggaattggtcgagacccggcctgcaggcgatagaacttttcagaaatgggcagctgtggtcgtcccttcaggagaggaacagcggtatacctgtcacgtgcagcatgagggcttacccaaaccactgactctgaggtgggaaccaagctcccagagcacggtgcctatcgtgggcattgttgcaggcctggccgtcttggccgtcgtcgtcataggagcagtggttgcggcagtcatgtgcagaagaaagtcatccggaggcaagggtgggagctacagtcaagcggcatgtagtgattcagcccagggaagtgacgtatctcttaccgcttag

SEQ ID NO: 285649 - protein, 255 aa, Artificial Sequence
  derived and/or modified sequence
MILNKALMLGALALTTVMSPCGGEDIVADHVASYGVNLYQSYGPSGQYSHEFDGDEEFYVDLERKETVWQLPLFRRFRRFDPQFALTNIAVLKHNLNIVIKRSNSTAATNEVPEVTVFSKSPVTLGQPNTLICLVDNIFPPVVNITWLSNGHSVTEGVSETSFLSKSDHSFFKISYLTFLPSADEIYDCKVEHWGLDEPLLKHWEPEIPTPMSELTETVVCALGLSVGLVGIVVGTVLIIRGLRSVGASRHQGPL

SEQ ID NO: 285650 - protein, 191 aa, Artificial Sequence
  derived and/or modified sequence
MSPCGGEDIVADHVASYGVNLYQSYGPSGQYSHEFDGDEEFYVDLERKETVWQLPLFRRFRRFDPQFALTNIAVLKHNLNIVIKRSNSTAATNEVPEVTVFSKSPVTLGQPNTLICLVDNIFPPVVNITWLSNGHSVTEGVSETSFLSKSDHSFFKISYLTFLPSADEIYDCKVEHWGLDEPLLKHWGLLH

SEQ ID NO: 285651 - protein, 200 aa, Artificial Sequence
  derived and/or modified sequence
MSPCGGEDIVADHVASYGVNLYQSYGPSGQYSHEFDGDEEFYVDLERKETVWQLPLFRRFRRFDPQFALTNIAVLKHNLNIVIKRSNSTAATNEVPEVTVFSKSPVTLGQPNTLICLVDNIFPPVVNITWLSNGHSVTEGVSETSFLSKSDHSFFKISYLTFLPSADEIYDCKVEHWGLDEPLLKHWESQSRESEESTKS

SEQ ID NO: 285652 - protein, 201 aa, Artificial Sequence
  derived and/or modified sequence
MSPCGGEDIVADHVASYGVNLYQSYGPSGQYSHEFDGDEEFYVDLERKETVWQLPLFRRFRRFDPQFALTNIAVLKHNLNIVIKRSNSTAATNEVPEVTVFSKSPVTLGQPNTLICLVDNIFPPVVNITWLSNGHSVTEGVSETSFLSKSDHSFFKISYLTFLPSADEIYDCKVEHWGLDEPLLKHWGIQAEEGQRRKKLG

SEQ ID NO: 285653 - protein, 129 aa, Artificial Sequence
  derived and/or modified sequence
GCLGKRMILNKALMLGALALTTVMSPCGGEDIVADHVASYGVNLYQSYGPSGQYSHEFDGDEEFYVDLERKETVWQLPLFRRFRRFDPQFALTNIAVLKHNLNIVIKRSNSTAATNEVPEVTVFSKSPV

SEQ ID NO: 285654 - DNA, 768 bp, Artificial Sequence
  derived and/or modified sequence
atgatcctgaacaaagcgctcatgctgggggccttagcgttgacgactgtgatgagcccatgcgggggtgaggacattgtggccgaccacgtagcatcttatggcgtgaatctttatcaatcatatgggcctagcgggcagtacagccacgaatttgatggtgacgaagagttctacgtggacttggagagaaaggagactgtgtggcagctccccctttttcgcagattccgccggtttgatccacagtttgcgcttactaacatcgcggtcctgaaacataaccttaacatcgtcattaagcggagcaactcaactgctgcaactaatgaggtccccgaagtaacagtttttagcaagtcaccagtgactctggggcagccgaacaccttgatctgcctggtcgataatatcttcccacctgtcgtcaatattacatggctgtcgaacgggcactcagtgaccgagggcgttagcgaaacctcttttctgagcaaaagtgatcacagtttctttaaaataagctacctgacatttctcccatctgcggatgaaatctacgattgcaaggtggagcactgggggctagacgaacctttactgaaacattgggagcccgagattcccaccccaatgagcgaacttacagagacagtggtgtgtgctttaggactgagcgtgggtctagtcggcatcgtcgtcgggaccgtactgattatcagaggcttgagatcagtgggcgctagccggcatcagggacctctgtag

SEQ ID NO: 285655 - DNA, 768 bp, Artificial Sequence
  derived and/or modified sequence
atgattttgaacaaggctctgatgctgggagctcttgcactgacaacagtgatgtcaccatgtgggggtgaagacattgtggccgaccacgtggcaagctatggtgtgaatctgtaccagtcctatggaccgagtgggcagtatagccacgagtttgatggcgatgaggaattctatgtcgatctagagcgcaaagaaaccgtctggcagttgcctttgttcagaagattccgaaggttcgatcctcagttcgcccttacgaacatcgcggttctaaaacacaacctcaatatcgtgataaaaagatcaaatagtactgcggctaccaacgaggtgccggaggttaccgtgttcagcaagagcccagtgacactggggcagcccaacaccttgatttgcctcgtagataatatctttcccccggtggtaaacatcacgtggcttagtaacggccatagcgtcaccgaaggagtgtcagagacctcatttctgagcaaaagcgaccactcgttttttaagatctcctacctaacattcttgcctagcgctgatgagatttatgactgtaaagtggaacactggggtctggatgaacccctgcttaagcattgggaacccgaaatccccactcccatgtctgagttgaccgagaccgtagtgtgcgccctcggactctcagtcggattggttggaatcgtggtggggaccgtgctcataataagaggcctccggtctgtgggagctagtcgtcaccaggggcccctctag

SEQ ID NO: 285656 - DNA, 576 bp, Artificial Sequence
  derived and/or modified sequence
atgagcccttgcggaggtgaagatatcgtcgccgaccacgtggcctcatatggagtgaatctctatcagtcatacgggccttccggacagtattctcacgagttcgatggtgatgaagagttttatgtggaccttgaacgcaaagaaactgtgtggcagctccccctgttcaggcgttttagaaggttcgatcctcagtttgcgctcaccaacattgccgtgcttaagcataacctcaacatcgtgattaagagaagtaattctacggctgcgactaacgaagtgcccgaggtaacggttttctctaagtctcctgttacacttggccagcccaacaccctgatctgcctggtcgacaacatttttccccctgtagtgaatattacctggctcagtaacgggcattcggttactgagggagtgtctgagacttccttcttaagcaaaagtgaccacagcttctttaaaatcagctacctcacattcttaccttctgctgacgagatttacgactgcaaggtcgaacattgggggttggatgagccccttctgaaacactggggtctcctgcattag

SEQ ID NO: 285657 - DNA, 603 bp, Artificial Sequence
  derived and/or modified sequence
atgtcaccttgcggtggagaggatatcgttgctgaccatgtggcctcctacggcgttaatctgtaccagtcttacggaccttccggccagtatagccatgaattcgacggggacgaggagttttacgtagacctagagagaaaagaaacagtgtggcagctccccctattcaggcgttttcggcgatttgatccgcagtttgctctgacaaatattgctgtgttgaagcacaatcttaacattgttataaaaagaagcaacagtaccgccgccaccaacgaggtcccagaagtgacagtgttttctaaatcccctgtcaccttgggccagccaaacacactgatctgcttagtggacaatatctttcccccagtggtgaatatcacatggctctcaaatggccactctgtcacagaaggagtgagtgaaaccagctttcttagcaagtccgatcactctttttttaaaatttcttaccttacctttctgccatcagccgatgaaatttacgattgcaaagttgagcattggggacttgatgagcccttgctcaaacattgggagtctcagtcccgcgagtcagaggaaagtacaaaatcatag

SEQ ID NO: 285658 - DNA, 606 bp, Artificial Sequence
  derived and/or modified sequence
atgtcaccttgcggaggcgaagacatagtcgctgaccacgtggcaagctatggcgtaaatctctatcagagctatggcccctccgggcagtactcccatgaatttgacggagatgaggaattctacgtcgacttggaaagaaaagaaaccgtgtggcaattgccactgtttcgacgtttcaggaggttcgacccccagttcgctcttactaacattgccgtcctgaaacataatctgaatatagtaatcaaacggagtaatagcacagccgccaccaatgaggtccctgaagtgacagtttttagtaaatcacccgttacacttggacagccgaataccttaatctgcctcgtggacaatatttttcctccggttgttaacattacgtggctgtccaacggacacagcgtgacagagggtgtgtcggaaacatcattcctttctaagtcagatcatagcttctttaaaataagttatctcacatttctcccgtctgcagacgaaatctacgactgcaaagttgaacattggggcctggacgagccccttttaaaacactggggcatccaggcagaggaaggacaaagacgcaagaaacttggctag

SEQ ID NO: 285659 - DNA, 390 bp, Artificial Sequence
  derived and/or modified sequence
ggatgcctgggaaaaaggatgatactgaacaaggctctcatgctgggggctttggccttaacaactgtaatgtccccttgtggtggagaggacattgtcgccgaccatgtcgcatcttatggggttaatctatatcagagctacggcccgtctggacaatatagccatgagttcgatggagacgaggaattttacgtggatctggagcgcaaagaaaccgtctggcagttgcccctcttcagacgctttcgccgcttcgaccctcagtttgcactgacaaacattgccgttctgaagcataatctcaacatagtgattaagagatccaacagcacggctgccaccaatgaagtccccgaggtgacagttttctccaaaagcccagtgtag

SEQ ID NO: 285660 - DNA, 768 bp, Artificial Sequence
  derived and/or modified sequence
atgatcctgaacaaggccctgatgctgggcgccctggccctgaccaccgtgatgagcccctgtggcggggaggacatcgtggccgaccacgtggccagctatggagtgaacctgtaccagagctatggccccagcggccagtacagccatgaatttgatggagatgaggagttctacgtggacctggagaggaaggagaccgtgtggcagctgcccctcttccgccgcttccgccgctttgacccccagtttgccctgaccaacattgctgtgctgaagcacaacctgaacatcgtcatcaagaggagcaacagcacagctgccaccaatgaggtgcctgaggtgaccgtcttcagcaagagccctgtgaccctgggccagcccaacaccctcatctgcctggtggacaacatcttcccccctgtggtgaacatcacctggctgagcaatggccacagcgtgacagaaggagtgtctgagaccagcttcctgagcaagagtgaccacagcttcttcaagatctcctacctgaccttcctgcccagcgcagatgagatctatgactgcaaggtggagcactggggcctggatgagcccctgctgaagcactgggagcctgagatccccacccccatgtctgagctgacagagaccgtggtgtgtgccctgggcctgtctgtgggcctggtgggcatcgtggtgggcaccgtgctgatcatccggggcctgcggtctgtgggcgccagccgccaccagggccccctgtag

SEQ ID NO: 285661 - DNA, 576 bp, Artificial Sequence
  derived and/or modified sequence
atgagcccctgtggaggagaagatattgtggccgaccacgtggccagctatggagtgaacctgtaccagagctatggccccagcggccagtacagccatgaatttgatggagatgaggagttctacgtggacctggagaggaaggagaccgtgtggcagctgcccctcttccgccgcttcagaagatttgacccccagtttgccctgaccaacattgctgtgctgaagcacaacctgaacatcgtcatcaagaggagcaacagcacagctgccaccaatgaggtgcctgaggtgacagtgttcagcaagagccctgtgaccctgggccagcccaacaccctcatctgcctggtggacaacatcttcccccctgtggtgaacatcacctggctgagcaatggccacagcgtgacagagggcgtgtctgagaccagcttcctgagcaagagtgaccacagcttcttcaagatctcctacctgaccttcctgcccagcgcagatgagatctatgactgcaaggtggagcactggggcctggatgagcccctgctgaagcactggggcctgctgcactag

SEQ ID NO: 285662 - DNA, 603 bp, Artificial Sequence
  derived and/or modified sequence
atgagcccctgtggaggagaagatattgtggccgaccacgtggccagctatggagtgaacctgtaccagagctatggccccagcggccagtacagccatgaatttgatggagatgaggagttctacgtggacctggagaggaaggagaccgtgtggcagctgcccctcttccgccgcttcagaagatttgacccccagtttgccctgaccaacattgctgtgctgaagcacaacctgaacatcgtcatcaagaggagcaacagcacagctgccaccaatgaggtgcctgaggtgacagtgttcagcaagagccctgtgaccctgggccagcccaacaccctcatctgcctggtggacaacatcttcccccctgtggtgaacatcacctggctgagcaatggccacagcgtgacagagggcgtgtctgagaccagcttcctgagcaagagtgaccacagcttcttcaagatctcctacctgaccttcctgcccagcgcagatgagatctatgactgcaaggtggagcactggggcctggatgagcccctgctgaagcactgggagagccagagccgggagagcgaggagagcaccaagagctag

SEQ ID NO: 285663 - DNA, 606 bp, Artificial Sequence
  derived and/or modified sequence
atgagcccctgtggaggagaagatattgtggccgaccacgtggccagctatggagtgaacctgtaccagagctatggccccagcggccagtacagccatgaatttgatggagatgaggagttctacgtggacctggagaggaaggagaccgtgtggcagctgcccctcttccgccgcttcagaagatttgacccccagtttgccctgaccaacattgctgtgctgaagcacaacctgaacatcgtcatcaagaggagcaacagcacagctgccaccaatgaggtgcctgaggtgacagtgttcagcaagagccctgtgaccctgggccagcccaacaccctcatctgcctggtggacaacatcttcccccctgtggtgaacatcacctggctgagcaatggccacagcgtgacagagggcgtgtctgagaccagcttcctgagcaagagtgaccacagcttcttcaagatctcctacctgaccttcctgcccagcgcagatgagatctatgactgcaaggtggagcactggggcctggatgagcccctgctgaagcactggggcatccaggccgaggagggccagaggaggaagaagctgggctag

SEQ ID NO: 285664 - DNA, 390 bp, Artificial Sequence
  derived and/or modified sequence
ggctgcctgggcaagaggatgatcctgaacaaggccctgatgctgggcgccctggccctgaccaccgtgatgagcccctgtggcggggaggacatcgtggccgaccacgtggccagctatggagtgaacctgtaccagagctatggccccagcggccagtacagccatgaatttgatggagatgaggagttctacgtggacctggagaggaaggagaccgtgtggcagctgcccctcttccgccgcttccgccgctttgacccccagtttgccctgaccaacattgctgtgctgaagcacaacctgaacatcgtcatcaagaggagcaacagcacagctgccaccaatgaggtgcctgaggtgaccgtcttcagcaagagccctgtgtag

SEQ ID NO: 285665 - DNA, 1217 bp, Artificial Sequence
  derived and/or modified sequence
ggcagggtttggtttgggtgtcttcagatttccttgtcttgaggccctcacaattgctctacagctcagaacagcaactgctgaggctgccttgggaagaggatgatcctaaacaaagctctgatgctgggggccctcgccctgaccaccgtgatgagcccttgtggaggtgaagacattgtggctgaccatgttgcctcttacggtgtaaacttgtaccagtcttatggtccctctgggcagtacagccatgaatttgatggagacgaggagttctatgtggacctggagaggaaggagactgtctggcagttgcctctgttccgcagatttagaagatttgacccgcaatttgcactgacaaacatcgctgtgctaaaacataacttgaacatcgtgattaaacgctccaactctaccgctgctaccaatgaggttcctgaggtcacagtgttttccaagtctcccgtgacactgggtcagcccaacaccctcatctgtcttgtggacaacatctttcctcctgtggtcaacatcacctggctgagcaatgggcactcagtcacagaaggtgtttctgagaccagcttcctctccaagagtgatcattccttcttcaagatcagttacctcaccttcctcccttctgctgatgagatttatgactgcaaggtggagcactggggcctggatgagcctcttctgaaacactgggagcctgagattccaacacctatgtcagagctcacagagactgtggtctgcgccctggggttgtctgtgggcctcgtgggcattgtggtggggaccgtcttgatcatccgaggcctgcgttcagttggtgcttccagacaccaagggcccttgtgaatcccatcctgaaaaggaaggtgcatcaccatctacagcagcggaagagtggacttgctacatgacctagcactattctctggcccgatttatcataccctttttctcctgcaaatgtttctcctcttaccttttctctgctttttttttcttaagcttctgtatcccctcagagctcacaaatgcctttgaattctttccctgacctcctgatttttttttcttttctcaggtgttacctactaagagatgcctggggtaagccgcccagctacctaattcctcagtaacatcgatctaaaatctccatggaagcaataaattccctttaagagatctatgtcaaa

SEQ ID NO: 285666 - DNA, 922 bp, Artificial Sequence
  derived and/or modified sequence
aggctgccttgggaagaggatgatcctaaacaaagctctgatgctgggggccctcgccctgaccaccgtgatgagcccttgtggaggtgaagacattgtggctgaccatgttgcctcttacggtgtaaacttgtaccagtcttatggtccctctgggcagtacagccatgaatttgatggagacgaggagttctatgtggacctggagaggaaggagactgtctggcagttgcctctgttccgcagatttagaagatttgacccgcaatttgcactgacaaacatcgctgtgctaaaacataacttgaacatcgtgattaaacgctccaactctaccgctgctaccaatgaggttcctgaggtcacagtgttttccaagtctcccgtgacactgggtcagcccaacaccctcatctgtcttgtggacaacatctttcctcctgtggtcaacatcacctggctgagcaatgggcactcagtcacagaaggtgtttctgagaccagcttcctctccaagagtgatcattccttcttcaagatcagttacctcaccttcctcccttctgctgatgagatttatgactgcaaggtggagcactggggcctggatgagcctcttctgaaacactgggagcctgagattccaacacctatgtcagagctcacagagactgtggtctgcgccctggggttgtctgtgggcctcgtgggcattgtggtggggaccgtcttgatcatccgaggcctgcgttcagttggtgcttccagacaccaagggcccttgtgaatcccatcctgaaaaggaaggtgttacctactaagagatgcctggggtaagccgcccagctacctaattcctcagtaacatcgatctaaaatctccatggaagcaataaattccctttaagagatctatgtcaaa

SEQ ID NO: 285667 - DNA, 674 bp, Artificial Sequence
  derived and/or modified sequence
attgctctacagctcagaacagcaactgctgaggctgccttgggaagaggatgatcctaaacaaagctctgatgctgggggccctcgccctgaccaccgtgatgagcccttgtggaggtgaagacattgtggctgaccatgttgcctcttacggtgtaaacttgtaccagtcttatggtccctctgggcagtacagccatgaatttgatggagacgaggagttctatgtggacctggagaggaaggagactgtctggcagttgcctctgttccgcagatttagaagatttgacccgcaatttgcactgacaaacatcgctgtgctaaaacataacttgaacatcgtgattaaacgctccaactctaccgctgctaccaatgaggttcctgaggtcacagtgttttccaagtctcccgtgacactgggtcagcccaacaccctcatctgtcttgtggacaacatctttcctcctgtggtcaacatcacctggctgagcaatgggcactcagtcacagaaggtgtttctgagaccagcttcctctccaagagtgatcattccttcttcaagatcagttacctcaccttcctcccttctgctgatgagatttatgactgcaaggtggagcactggggcctggatgagcctcttctgaaacactggggtttgttacac

SEQ ID NO: 285668 - DNA, 701 bp, Artificial Sequence
  derived and/or modified sequence
attgctctacagctcagaacagcaactgctgaggctgccttgggaagaggatgatcctaaacaaagctctgatgctgggggccctcgccctgaccaccgtgatgagcccttgtggaggtgaagacattgtggctgaccatgttgcctcttacggtgtaaacttgtaccagtcttatggtccctctgggcagtacagccatgaatttgatggagacgaggagttctatgtggacctggagaggaaggagactgtctggcagttgcctctgttccgcagatttagaagatttgacccgcaatttgcactgacaaacatcgctgtgctaaaacataacttgaacatcgtgattaaacgctccaactctaccgctgctaccaatgaggttcctgaggtcacagtgttttccaagtctcccgtgacactgggtcagcccaacaccctcatctgtcttgtggacaacatctttcctcctgtggtcaacatcacctggctgagcaatgggcactcagtcacagaaggtgtttctgagaccagcttcctctccaagagtgatcattccttcttcaagatcagttacctcaccttcctcccttctgctgatgagatttatgactgcaaggtggagcactggggcctggatgagcctcttctgaaacactgggaatctcagtctagagaatctgaagaaagcaccaaatca

SEQ ID NO: 285669 - DNA, 704 bp, Artificial Sequence
  derived and/or modified sequence
attgctctacagctcagaacagcaactgctgaggctgccttgggaagaggatgatcctaaacaaagctctgatgctgggggccctcgccctgaccaccgtgatgagcccttgtggaggtgaagacattgtggctgaccatgttgcctcttacggtgtaaacttgtaccagtcttatggtccctctgggcagtacagccatgaatttgatggagacgaggagttctatgtggacctggagaggaaggagactgtctggcagttgcctctgttccgcagatttagaagatttgacccgcaatttgcactgacaaacatcgctgtgctaaaacataacttgaacatcgtgattaaacgctccaactctaccgctgctaccaatgaggttcctgaggtcacagtgttttccaagtctcccgtgacactgggtcagcccaacaccctcatctgtcttgtggacaacatctttcctcctgtggtcaacatcacctggctgagcaatgggcactcagtcacagaaggtgtttctgagaccagcttcctctccaagagtgatcattccttcttcaagatcagttacctcaccttcctcccttctgctgatgagatttatgactgcaaggtggagcactggggcctggatgagcctcttctgaaacactggggcattcaggcagaagaaggccagcgaagaaagaaactaggt

SEQ ID NO: 285670 - DNA, 764 bp, Artificial Sequence
  derived and/or modified sequence
attgctctacagctcagaacagcaactgctgaggctgccttgggaagaggatgatcctaaacaaagctctgatgctgggggccctcgccctgaccaccgtgatgagcccttgtggaggtgaagacattgtggctgaccatgttgcctcttacggtgtaaacttgtaccagtcttatggtccctctgggcagtacagccatgaatttgatggagacgaggagttctatgtggacctggagaggaaggagactgtctggcagttgcctctgttccgcagatttagaagatttgacccgcaatttgcactgacaaacatcgctgtgctaaaacataacttgaacatcgtgattaaacgctccaactctaccgctgctaccaatgaggttcctgaggtcacagtgttttccaagtctcccgtgacactgggtcagcccaacaccctcatctgtcttgtggacaacatctttcctcctgtggtcaacatcacctggctgagcaatgggcactcagtcacagaaggtgtttctgagaccagcttcctctccaagagtgatcattccttcttcaagatcagttacctcaccttcctcccttctgctgatgagatttatgactgcaaggtggagcactggggcctggatgagcctcttctgaaacactggggtaaggatgagtttcaccattttttgatgctttcttgtctgtcaagttcagaacttcctgccttttactatatcccaaaacttgttttccacacttcatga

SEQ ID NO: 285671 - DNA, 768 bp, Artificial Sequence
  derived and/or modified sequence
atgatcctgaacaaggccctgatgctgggcgccctggccctgaccacggtaatgtctccttgtggcggagaggatatcgtcgctgaccacgtggcctcttacggggtgaacctctatcaatcttacggaccttcaggtcagtactctcatgaattcgatggcgatgaggaattctacgtcgatttagagcgtaaagaaacggtgtggcagctgcccttattccggcgtttcaggcgattcgacccacaatttgccctcactaacattgctgttctgaaacataatctgaatatcgtgatcaagaggtctaatagcaccgctgctaccaacgaagtgccagaagttaccgtcttctcaaaaagccctgtgactctgggccagcctaatactcttatatgtctggtggataacatctttcccccagtcgttaatattacctggctgtcaaacggacactctgttactgagggggtctcagagacttcttttctatctaagtcagaccactcctttttcaagatctcatacctgacatttctgcccagcgcagatgaaatatatgattgcaaggtggaacattggggtctcgacgagccacttttgaagcactgggaacccgaaattcccactcctatgagcgaactgaccgaaactgtggtgtgcgccctgggcctgagcgtgggacttgtgggcattgtcgtgggcacagtactaatcatcaggggactccgatcggttggtgctagccgtcatcaaggaccgctatag

SEQ ID NO: 285672 - DNA, 768 bp, Artificial Sequence
  derived and/or modified sequence
atgatcctgaacaaggccctgatgctgggcgccctggccctgaccaccgtgatgtctccatgtggtggcgaggacatcgttgcagatcacgtagcttcttacggcgtcaatctctatcagagctacggaccgagcggacaatactctcacgaatttgacggtgatgaggaattctatgttgacctcgaacgtaaggagacagtatggcaactgccactgttccgccggtttagacggttcgatcctcaattcgctcttacaaacatcgcggtactgaaacataatctcaatatcgttataaaacggtccaactctacagcagccactaatgaggtcccggaagtgacagtgttcagcaaatcccctgtgactcttggacagccaaacaccctcatctgtttagttgataatatatttccacccgtggtgaatatcacatggctgtcaaacggacactcagtgaccgagggggtgtctgagacctcttttctgtccaagtctgatcattcgtttttcaagataagctacttaactttcctaccgtccgcggatgagatatatgattgtaaagtcgagcactggggactcgacgagccgctgttaaagcattgggagccagaaatccccactccgatgtcggaacttacggagacggtggtgtgcgcactaggactctcagtgggattggtgggcatagttgtggggactgtcctgataatcaggggcctgaggagcgtgggggccagtagacatcaggggcccttatag

SEQ ID NO: 285673 - DNA, 576 bp, Artificial Sequence
  derived and/or modified sequence
atgagcccctgcggcggcgaggacatcgtggccgaccacgtggccagctatggagtcaatttgtatcaaagctacgggcccagtggacagtatagccatgagttcgacggagacgaggaattttacgttgacctggagaggaaggagactgtgtggcagctgcccttgtttcgtcgcttcaggcggtttgatccgcagttcgccctcaccaacatagcggttcttaaacataatctgaatattgtaataaagcgtagcaatagcacagctgcaacaaacgaagtcccggaggtgaccgtgttcagcaagtcgcccgtgactctgggccagcccaacactctcatctgcttggtggacaatatcttccctccagtcgtcaacattacctggttaagtaatggacactctgtgaccgaaggtgtttcagagacttctttcctgagcaaatccgaccattctttcttcaagatcagctacttaacctttctgccctcagcggacgagatatacgattgtaaggtggagcactggggactggacgagcctcttctcaaacattggggtttactccactag

SEQ ID NO: 285674 - DNA, 603 bp, Artificial Sequence
  derived and/or modified sequence
atgagcccctgcggcggcgaggacatcgtggccgaccacgtggccagctatggagtgaatctgtatcagtcgtacggtccatcaggacagtattcccacgagtttgacggcgacgaggagttttatgtcgatcttgagcggaaagagacagtctggcagctgcctctgttccgaaggtttagaaggttcgatccccagtttgccctcacgaacatcgccgtattgaaacataatctcaatatcgtcattaagcggagtaacagcacagcagcaacaaacgaagtgcctgaagtgacagtgttcagcaaatccccagttaccctcggacaacctaacacacttatttgtcttgtggacaatatcttccctcccgtggtgaacattacgtggctgtccaatggccatagcgtgaccgaaggcgtaagcgagacctctttccttagcaagtctgatcactctttctttaagatctcatacctaacctttctgcctagcgccgatgagatttatgattgtaaagtcgagcactggggcctggacgaacctctgctcaaacactgggaatcacagtcacgtgaatctgaggagtcaacgaaaagctag

SEQ ID NO: 285675 - DNA, 606 bp, Artificial Sequence
  derived and/or modified sequence
atgagcccctgcggcggcgaggacatcgtggccgaccacgtggccagctatggcgttaatctataccagagctacggcccatccggtcagtactcccacgaatttgatggcgatgaggagttctatgtcgacttggaacgcaaagagactgtgtggcagctgcctctattccggcgttttagaagatttgatccacagttcgcccttactaatatcgcagtgctaaaacataacctgaacatcgtgatcaaacgaagcaactctactgcggccacgaatgaggttcccgaagttactgtgttcagtaaatctcccgtgaccttgggacaaccaaacaccctcatctgtcttgtagataacatctttcctcccgttgtaaacatcacctggctcagcaacgggcatagcgtgactgaaggagttagtgagacctcatttctttctaaatccgatcattcatttttcaaaatcagttatctcactttcctgcccagcgcggatgagatttatgactgcaaagtcgaacactggggattggatgaacccctgctaaaacactgggggatacaagccgaagagggccagaggcggaaaaagctgggctag

SEQ ID NO: 285676 - DNA, 390 bp, Artificial Sequence
  derived and/or modified sequence
ggctgcctgggcaagcggatgatcctgaacaaggccctgatgctgggtgccttggccctgaccacggttatgagcccctgcggcggcgaggacatagttgcagatcacgtggccagttatggggtaaacctgtatcaatcatacggaccttcaggtcaatacagccatgaatttgatggggatgaggaattctatgtggatctagaaagaaaagagactgtttggcagctgcccctgttccgcagattccggcgctttgacccacagttcgccctgacaaacatcgcagttctgaaacataacctgaatatagtaataaagaggtctaattccacagcagcaaccaatgaagtgccagaggtgaccgtcttttcaaagtccccagtctag

SEQ ID NO: 285677 - DNA, 768 bp, Artificial Sequence
  derived and/or modified sequence
atgatcctgaacaaggctctcatgctgggggctttggcccttaccacggtcatgagtccctgtggaggcgaggacatcgttgcagatcacgtggcctcgtatggagtgaacctataccagtcctacggaccatctggacagtatagtcatgaattcgatggcgatgaggaattctacgtcgacttagagcgcaaagagaccgtgtggcagctgcccctattcaggcgatttagacgctttgatcctcagtttgcattgaccaacatcgcagtgctgaagcacaacctcaacatcgtgatcaagaggtccaacagtaccgctgctactaatgaggtgcccgaagttactgtgttcagcaagagtccagtcactctgggccagcctaacaccttgatctgcctggtggacaatatctttcccccagttgtgaatataacatggttaagtaacgggcactctgtgaccgaaggcgtttccgagaccagctttttatccaaatccgaccactccttcttcaagatatcctacctcactttccttccttctgctgatgaaatctacgattgcaaagtggagcattgggggcttgacgaacctttactgaaacactgggaacccgaaatccccacaccgatgtcagagttgaccgaaaccgtggtatgcgcgttaggcctgtctgtcgggcttgtgggtatcgtggttggcaccgtgttgataattagaggattacgaagtgtgggggcaagcaggcaccagggtcctctctag

SEQ ID NO: 285678 - DNA, 768 bp, Artificial Sequence
  derived and/or modified sequence
atgattctgaataaagcactgatgctgggagcccttgctctcacgaccgtgatgagtccgtgtgggggtgaagatattgtggccgatcatgtggctagctacggggtaaacctgtaccagagctacggaccatccggccaatacagccatgagttcgatggcgatgaggagttctatgtagacttagaacgcaaagaaacggtttggcaattacccctcttcagaaggttcaggcgatttgatccacagtttgccttgaccaacatagccgtgctgaagcataacttaaacatagtgataaagagaagcaacagcaccgcagctaccaacgaggtcccagaggtgacagtgttttccaaaagtccggtcaccctaggacagcctaataccctaatctgcctggtggataacatttttccgccagtggtcaatatcacatggctctctaatggtcatagtgtgaccgagggggtgagcgaaacatcctttctctctaaaagcgaccacagctttttcaagatcagttatcttacttttctcccatctgccgacgagatttatgactgtaaggtcgagcactggggtcttgatgaaccattgctgaaacattgggagccagagattccaacccctatgtcagagttgaccgagactgtggtctgtgctctggggctgagcgtcggacttgtcggtatcgttgtcggtacagtgctaattattcgcggtttgaggagcgtgggcgcttccagacaccaaggcccattgtag

SEQ ID NO: 285679 - DNA, 576 bp, Artificial Sequence
  derived and/or modified sequence
atgagcccttgtgggggagaggatatcgtggcggatcacgtggcctcatatggggttaatctctatcaaagttacggcccttcgggacagtactcgcatgaatttgatggtgatgaagagttttacgttgatcttgagagaaaagagaccgtatggcagctcccattgttccggagattccgtcgtttcgatcctcaatttgcactcacaaacatagccgtgctgaaacacaatctgaatattgtcataaaaagatctaactctacagccgcaaccaatgaggttcctgaagtcactgtgtttagtaaaagccccgttaccttaggacagcccaacacacttatctgtttagtcgataacatcttcccacccgtggtcaatatcacctggctgtccaacggtcactcagtgactgagggcgtctcagagacctcatttctgtctaagagcgatcattcattctttaagatctcctacttgacattcctgccgtcagcagatgaaatttacgactgcaaggttgagcattggggtctcgacgagcccctgttgaagcattggggactcttgcactag

SEQ ID NO: 285680 - DNA, 603 bp, Artificial Sequence
  derived and/or modified sequence
atgtctccctgtggtggtgaagacatcgttgccgatcacgtggcttcatacggcgtgaatctgtaccagagctacgggccttctggccagtactcccatgaatttgatggggatgaagagttttatgtggacttagagcggaaagaaactgtatggcagcttccactgttcaggcggtttcgccgtttcgatccacagtttgcattgacaaacatcgcagtgcttaaacataatctcaacattgtgatcaaacgatccaactccaccgccgctaccaatgaagtaccagaagtcacagtgttctcgaaatcccccgtgacgctcgggcaacccaacacactcatttgcttggtggacaacatctttcctccagttgtgaacattacttggttgtctaacgggcactccgtgactgagggggtgtcggaaacctctttcctatcaaaaagtgatcacagttttttcaagatctcttatctcaccttcctgccctccgctgatgagatatacgactgcaaggtggagcactgggggctggacgagccactcttaaaacactgggagagccagagtcgcgagagcgaagagtcaacaaaatcctag

SEQ ID NO: 285681 - DNA, 606 bp, Artificial Sequence
  derived and/or modified sequence
atgtcaccatgcggaggggaagacattgtcgccgatcatgtggcctcttacggggttaacctgtaccagtcttacggaccctccggacaatacagtcatgagtttgatggcgatgaagaattctatgtggatctggagaggaaggaaaccgtttggcagttacctttgttccggaggttcaggcgctttgacccacagttcgctcttacaaatatcgcagtgttgaaacataacctgaatatcgtgataaaaaggtcaaattctacagccgctacgaacgaggttcctgaggtcactgtattttccaaatcacctgtaactctaggccagccaaatacactcatctgcctggtggataacatctttcctcctgttgtaaacatcacctggttaagcaatggccatagtgtcacagagggggtatccgagacgtcgttcctgtccaagagtgatcattcatttttcaagatttcctatctgacattcctgcccagtgctgatgaaatttatgattgcaaggtggaacattggggcctggacgaacctctcctgaagcactggggaatccaggccgaggagggtcagcggaggaaaaagctgggttag

SEQ ID NO: 285682 - DNA, 390 bp, Artificial Sequence
  derived and/or modified sequence
gggtgcctcggaaagagaatgatcctcaataaggcgttaatgcttggagcgctggcccttaccaccgtgatgagcccatgtggcggtgaggatatagttgctgaccatgtggcaagctacggagttaacctctatcagagttatgggcctagcggccagtattctcatgagttcgacggcgacgaagagttttacgtggatctcgagagaaaagagaccgtgtggcagctgccactgttccgtcgttttaggcgcttcgatccacagtttgccttaacaaacattgccgtgctgaaacataacctgaacatcgtcattaagcgttcgaactctactgctgccacaaacgaagtgcccgaggtcacagtcttttcgaagtcgccagtgtag

SEQ ID NO: 285683 - DNA, 768 bp, Artificial Sequence
  derived and/or modified sequence
atgatcctgaacaaggccctgatgctgggcgccctggccctgaccaccgtgatgagcccctgcggcggcgaggacatcgtggccgaccacgtggccagctacggcgtgaacctgtaccagagctacggccccagcggccagtacagccacgagttcgacggcgacgaggagttctacgtggacctggagagaaaggagaccgtgtggcagctgcccctgttcagaagattcagaagattcgacccccagttcgccctgaccaacatcgccgtgctgaagcacaacctgaacatcgtgatcaagagaagcaacagcaccgccgccaccaacgaggtgcccgaggtgaccgtgttcagcaagagccccgtgaccctgggccagcccaacaccctgatctgcctggtggacaacatcttcccccccgtggtgaacatcacctggctgagcaacggccacagcgtgaccgagggcgtgagcgagaccagcttcctgagcaagagcgaccacagcttcttcaagatcagctacctgaccttcctgcccagcgccgacgagatctacgactgcaaggtggagcactggggcctggacgagcccctgctgaagcactgggagcccgagatccccacccccatgagcgagctgaccgagaccgtggtgtgcgccctgggcctgagcgtgggcctggtgggcatcgtggtgggcaccgtgctgatcatcagaggcctgagaagcgtgggcgccagcagacaccagggccccctgtag

SEQ ID NO: 285684 - DNA, 576 bp, Artificial Sequence
  derived and/or modified sequence
atgagcccctgcggcggcgaggacatcgtggccgaccacgtggccagctacggcgtgaacctgtaccagagctacggccccagcggccagtacagccacgagttcgacggcgacgaggagttctacgtggacctggagagaaaggagaccgtgtggcagctgcccctgttcagaagattcagaagattcgacccccagttcgccctgaccaacatcgccgtgctgaagcacaacctgaacatcgtgatcaagagaagcaacagcaccgccgccaccaacgaggtgcccgaggtgaccgtgttcagcaagagccccgtgaccctgggccagcccaacaccctgatctgcctggtggacaacatcttcccccccgtggtgaacatcacctggctgagcaacggccacagcgtgaccgagggcgtgagcgagaccagcttcctgagcaagagcgaccacagcttcttcaagatcagctacctgaccttcctgcccagcgccgacgagatctacgactgcaaggtggagcactggggcctggacgagcccctgctgaagcactggggcctgctgcactag

SEQ ID NO: 285685 - DNA, 603 bp, Artificial Sequence
  derived and/or modified sequence
atgagcccctgcggcggcgaggacatcgtggccgaccacgtggccagctacggcgtgaacctgtaccagagctacggccccagcggccagtacagccacgagttcgacggcgacgaggagttctacgtggacctggagagaaaggagaccgtgtggcagctgcccctgttcagaagattcagaagattcgacccccagttcgccctgaccaacatcgccgtgctgaagcacaacctgaacatcgtgatcaagagaagcaacagcaccgccgccaccaacgaggtgcccgaggtgaccgtgttcagcaagagccccgtgaccctgggccagcccaacaccctgatctgcctggtggacaacatcttcccccccgtggtgaacatcacctggctgagcaacggccacagcgtgaccgagggcgtgagcgagaccagcttcctgagcaagagcgaccacagcttcttcaagatcagctacctgaccttcctgcccagcgccgacgagatctacgactgcaaggtggagcactggggcctggacgagcccctgctgaagcactgggagagccagagcagagagagcgaggagagcaccaagagctag

SEQ ID NO: 285686 - DNA, 606 bp, Artificial Sequence
  derived and/or modified sequence
atgagcccctgcggcggcgaggacatcgtggccgaccacgtggccagctacggcgtgaacctgtaccagagctacggccccagcggccagtacagccacgagttcgacggcgacgaggagttctacgtggacctggagagaaaggagaccgtgtggcagctgcccctgttcagaagattcagaagattcgacccccagttcgccctgaccaacatcgccgtgctgaagcacaacctgaacatcgtgatcaagagaagcaacagcaccgccgccaccaacgaggtgcccgaggtgaccgtgttcagcaagagccccgtgaccctgggccagcccaacaccctgatctgcctggtggacaacatcttcccccccgtggtgaacatcacctggctgagcaacggccacagcgtgaccgagggcgtgagcgagaccagcttcctgagcaagagcgaccacagcttcttcaagatcagctacctgaccttcctgcccagcgccgacgagatctacgactgcaaggtggagcactggggcctggacgagcccctgctgaagcactggggcatccaggccgaggagggccagagaagaaagaagctgggctag

SEQ ID NO: 285687 - DNA, 390 bp, Artificial Sequence
  derived and/or modified sequence
ggctgcctgggcaagagaatgatcctgaacaaggccctgatgctgggcgccctggccctgaccaccgtgatgagcccctgcggcggcgaggacatcgtggccgaccacgtggccagctacggcgtgaacctgtaccagagctacggccccagcggccagtacagccacgagttcgacggcgacgaggagttctacgtggacctggagagaaaggagaccgtgtggcagctgcccctgttcagaagattcagaagattcgacccccagttcgccctgaccaacatcgccgtgctgaagcacaacctgaacatcgtgatcaagagaagcaacagcaccgccgccaccaacgaggtgcccgaggtgaccgtgttcagcaagagccccgtgtag

SEQ ID NO: 285688 - protein, 345 aa, Artificial Sequence
  derived and/or modified sequence
MLPCFQLLRIGGGRGGDLYTFHPPAGAGCTYRLGHRADLCDVALRPQQEPGLISGIHAELHAEPRGDDWRVSLEDHSSQGTLVNNVRLPRGHRLELSDGDLLTFGPEGPPGTSPSEFYFMFQQVRVKPQDFAAITIPRSRGEARVGAGFRPMLPSQGAPQRPLSTFSPAPKATLILNSIGSLSKLRPQPLTFSPSWGGPKSLPVPAPPGEVGTTPSAPPQRNRRKSVHRVLAELDDESEPPENPPPVLMEPRKKLRVDKAPLTPTGNRRGRPRKYPVSAPMAPPAVGGGEPCAAPCCCLPQEETVAWVQCDGCDVWFHVACVGCSIQAAREADFRCPGCRAGIQT

SEQ ID NO: 285689 - protein, 2089 aa, Artificial Sequence
  derived and/or modified sequence
MEDTQAIDWDVEEEEETEQSSESLRCNVEPVGRLHIFSGAHGPEKDFPLHLGKNVVGRMPDCSVALPFPSISKQHAEIEILAWDKAPILRDCGSLNGTQILRPPKVLSPGVSHRLRDQELILFADLLCQYHRLDVSLPFVSRGPLTVEETPRVQGETQPQRLLLAEDSEEEVDFLSERRMVKKSRTTSSSVIVPESDEEGHSPVLGGLGPPFAFNLNSDTDVEEGQQPATEEASSAARRGATVEAKQSEAEVVTEIQLEKDQPLVKERDNDTKVKRGAGNGVVPAGVILERSQPPGEDSDTDVDDDSRPPGRPAEVHLERAQPFGFIDSDTDAEEERIPATPVVIPMKKRKIFHGVGTRGPGAPGLAHLQESQAGSDTDVEEGKAPQAVPLEKSQASMVINSDTDDEEEVSAALTLAHLKESQPAIWNRDAEEDMPQRVVLLQRSQTTTERDSDTDVEEEELPVENREAVLKDHTKIRALVRAHSEKDQPPFGDSDDSVEADKSSPGIHLERSQASTTVDINTQVEKEVPPGSAIIHIKKHQVSVEGTNQTDVKAVGGPAKLLVVSLEEAWPLHGDCETDAEEGTSLTASVVADVRKSQLPAEGDAGAEWAAAVLKQERAHEVGAQGGPPVAQVEQDLPISRENLTDLVVDTDTLGESTQPQREGAQVPTGREREQHVGGTKDSEDNYGDSEDLDLQATQCFLENQGLEAVQSMEDEPTQAFMLTPPQELGPSHCSFQTTGTLDEPWEVLATQPFCLRESEDSETQPFDTHLEAYGPCLSPPRAIPGDQHPESPVHTEPMGIQGRGRQTVDKVMGIPKETAERVGPERGPLERETEKLLPERQTDVTGEEELTKGKQDREQKQLLARDTQRQESDKNGESASPERDRESLKVEIETSEEIQEKQVQKQTLPSKAFEREVERPVANRECDPAELEEKVPKVILERDTQRGEPEGGSQDQKGQASSPTPEPGVGAGDLPGPTSAPVPSGSQSGGRGSPVSPRRHQKGLLNCKMPPAEKASRIRAAEKVSRGDQESPDACLPPTVPEAPAPPQKPLNSQSQKHLAPPPLLSPLLPSIKPTVRKTRQDGSQEAPEAPLSSELEPFHPKPKIRTRKSSRMTPFPATSAAPEPHPSTSTAQPVTPKPTSQATRSRTNRSSVKTPEPVVPTAPELQPSTSTDQPVTSEPTSQVTRGRKSRSSVKTPETVVPTALELQPSTSTDRPVTSEPTSQATRGRKNRSSVKTPEPVVPTAPELQPSTSTDQPVTSEPTYQATRGRKNRSSVKTPEPVVPTAPELRPSTSTDRPVTPKPTSRTTRSRTNMSSVKTPETVVPTAPELQISTSTDQPVTPKPTSRTTRSRTNMSSVKNPESTVPIAPELPPSTSTEQPVTPEPTSRATRGRKNRSSGKTPETLVPTAPKLEPSTSTDQPVTPEPTSQATRGRTNRSSVKTPETVVPTAPELQPSTSTDQPVTPEPTSQATRGRTDRSSVKTPETVVPTAPELQASASTDQPVTSEPTSRTTRGRKNRSSVKTPETVVPAAPALQPSTSTDQPVTPEPTSRATRGRTNRSSVKTPESIVPIAPELQPSTSRNQLVTPEPTSRATRCRTNRSSVKTPEPVVPTAPEPHPTTSTDQPVTPKLTSRATRRKTNRSSVKTPKPVEPAASDLEPFTPTDQSVTPEAIAQGGQSKTLRSSTVRAMPVPTTPEFQSPVTTDQPISPEPITQPSCIKRQRAAGNPGSLAAPIDHKPCSAPLEPKSQASRNQRWGAVRAAESLTAIPEPASPQLLETPIHASQIQKVEPAGRSRFTPELQPKASQSRKRSLATMDSPPHQKQPQRGEVSQKTVIIKEEEEDTAEKPGKEEDVVTPKPGKRKRDQAEEEPNRIPSRSLRRTKLNQESTAPKVLFTGVVDARGERAVLALGGSLAGSAAEASHLVTDRIRRTVKFLCALGRGIPILSLDWLHQSRKAGFFLPPDEYVVTDPEQEKNFGFSLQDALSRARERRLLEGYEIYVTPGVQPPPPQMGEIISCCGGTYLPSMPRSYKPQRVVITCPQDFPHCSIPLRVGLPLLSPEFLLTGVLKQEAKPEAFVLSPLEMSST

SEQ ID NO: 285690 - DNA, 6506 bp, Artificial Sequence
  derived and/or modified sequence
caccatgtctaggaggaccgaggaaaggcgctctggccttaccagacacgtcggacgtctatgacacagcccctctatccgttgccggcagctggcgccagactctctggtcgcggtttggaactgcgcgggaagtgggtggtgggcgggcaagcggtagtgggttgtcccttggagctgcccaatcgacgtgcattattctgttggcgcacggcggccttcaattaccgtctcattaactgatctcagcagcctgggagacaccacctatttgaactctaagggggcggggctttgggtgtgcctccgctcgactggctgcggttgtgaaagacagcggcagaagccaatcagcaaataagctctttttcggcacacgcagtcgctccacctgggtcgcgaccgttactggtggcgcgcgcggggacttaaagtagatcatggaggacacccaggctattgactgggatgttgaagaagaggaggagacagagcaatccagtgaatccttgaggtgtaacgtggagccagtagggcggctacatatctttagtggtgcccatggaccagaaaaagatttcccactacacctcgggaagaatgtggtaggccgaatgcctgactgctctgtggccctgccctttccatctatctccaaacaacatgcagagattgaaatcttagcctgggacaaggcacctatcctccgagactgtgggagccttaatggtactcaaatcctgagacctcctaaggttttgagccctggggtgagtcaccgtctgagggaccaggaattgattctctttgctgacttgctctgccagtaccatcgcctggatgtctctctgccctttgtctcccggggccctctgacagtagaagagacacccagagtacagggagaaactcaaccccagaggcttctgttggctgaggactcggaggaggaagtagattttctttctgaaaggcgtatggtaaaaaaatcaaggaccacatcttcctctgtgatagttccagagagtgatgaagaggggcattccccggtcctgggcggccttgggccgccttttgccttcaatttgaacagtgacacagatgtggaagaaggtcagcaaccagccacagaggaggcctcctcagctgccagaagaggtgccactgtagaggcaaagcagtctgaagctgaagttgtaactgaaatccagcttgaaaaggatcagcctttagtgaaggagagggacaatgatacaaaagtcaagaggggtgcagggaatggggtggttccagctggggtgattctggagaggagccaacctcctggagaggacagtgacacagatgtggatgatgacagcaggcctcctggaaggccagctgaggtccatttggaaagggctcagccttttggcttcatcgacagcgacactgatgcggaagaagagaggatcccagcaaccccagttgtcattcctatgaagaagaggaagatcttccatggagtaggtacaaggggtcctggagcaccaggcctggcccatctgcaggagagccaggctggtagtgatacagatgtggaagaaggcaaggccccacaggctgtccctctggagaaaagccaagcttccatggttatcaacagcgatacagatgacgaggaagaagtctcagcagcgctgactttggcacatctgaaagagagccagcctgctatatggaacagagatgcagaagaggacatgccccaacgtgtggtccttctgcagcgaagccaaaccaccactgagagagacagtgacacagacgtggaggaggaagagctcccagtggaaaatagagaagctgtcctcaaggatcacacaaagattagagcccttgttagagcacattcagaaaaggaccaacctccttttggggacagtgatgacagtgtggaagcagataagagctcacctgggatccacctggagagaagccaagcctccaccacagtggacatcaacacacaagtggagaaggaagtcccgccagggtcagccattatacatataaagaagcatcaggtgtctgtggaggggacaaatcaaacagatgtgaaagcagttgggggaccagcaaagctgcttgtggtatctctagaggaagcctggcctctgcatggggactgtgaaacagatgcagaggagggcacctccctaacagcctcagtagttgcagatgtaagaaagagccagcttccagcagaaggggatgctggggcagagtgggctgcagctgttcttaagcaggagagagctcatgaggtgggggcccagggtgggccacctgtggcacaagtggagcaggacctccctatctcaagagagaacctcacagatctggtggtggacacagacactctaggggaatccacccagccacagagagagggagcccaggtccccacaggaagggagagagaacaacatgtgggtgggaccaaggactctgaagacaactatggtgattctgaagatctggacctacaagctacccagtgctttctggagaatcagggcctggaagcagtccagagcatggaggatgaacctacccaggccttcatgttgactccaccccaagagcttggcccttcccattgcagcttccagacaacaggtaccctagatgaaccatgggaggtcctggctacacagccattctgtctgagagagtctgaggactctgagacccagccttttgacacgcaccttgaggcctatggaccttgcctgtctccacctagggcaataccaggagaccaacatccagagagcccagttcacacagagccaatggggattcaaggcagagggaggcagactgtggataaagtcatgggtataccaaaagaaacagcagagagggtgggccctgagagagggccattggagagagaaactgagaaactgctaccagaaagacagacagatgtgacaggagaggaagaattaaccaaggggaaacaggacagagaacaaaaacagttgttagctagagacacccagagacaagaatctgacaaaaatggggaaagtgcaagtcctgaaagagatagggagagtttgaaggtagaaattgagacatctgaggaaatacaagagaaacaagtacagaagcagacccttccaagcaaagcatttgagagagaagtagagagaccagtagcaaacagagagtgcgatccagccgagttagaagagaaggtgcccaaagtgatcctggagagagatacacagagaggggagccagagggagggagccaggaccagaaagggcaggcctccagcccaacaccagagcctggggtgggggcgggggaccttccgggacctacctcagcccccgtaccttctgggagccagtcaggtggaaggggatccccagtgagccccaggaggcatcagaaaggcctcctgaattgcaagatgccacctgctgagaaggcttccaggatcagagctgctgagaaggtttccaggggcgatcaggaatctccagatgcttgtctgcctcctacagtacctgaagccccagccccaccccaaaagccccttaactctcagagccagaaacatcttgcacctccgccccttctttctccccttttaccttctatcaagccaaccgttcgtaagaccaggcaagatgggagtcaggaagctccagaggctcccttgtcctcagagctggagcctttccacccaaagcctaaaattagaactcggaagtcctccagaatgacaccctttccagctacctctgctgcccctaagctcgagccttccacttccacagaccaacctgtcactcctgagcccacatctcaggccaccaggggcaggacaaataggtcctctgtgaagacccctgaaacagttgtccccacagcccctgagctccagccttccacctccacagaccagcctgttacccctgagcctacgtctcaggctactaggggaagaacagatagatcctctgtcaagactcctgaaacagttgtccccacagcccctgagctacaggcttccgcctccacagaccagcctgtcacctctgagcccacatctcggaccactaggggaagaaaaaatcggtcctctgtcaagacccctgaaacagttgtgcccgcagcccctgagctccagccttccacctccacagaccaacctgtcacccctgagcccacatctcgggccactaggggcaggacaaataggtcctctgtcaagacccctgaatcaattgtccctatagcccctgagcttcagccttccacctccagaaaccagcttgtcacccctgagcccacatctcgggccactaggtgcaggacaaataggtcctctgtcaagacccctgagccagttgtccccacagcccctgagccccatcctaccacctccacagaccagcctgtcacccccaagctcacatctagggccactaggagaaagacaaataggtcctctgtcaagactcccaaaccagttgaaccagcagcctctgatcttgagccttttacccccacagaccagtccgtcacccctgaggccatagctcagggtggtcagagcaaaacactgaggtcttccacagtaagagctatgccggttcctaccacccctgaattccaatctcctgtcaccacagaccagcctatttcccctgagcctattactcaacccagttgcatcaagaggcagagagccgctgggaaccctggctccctcgcagctcccattgaccataagccttgctctgcacccttggaacctaaatcccaggcctcaaggaaccaaagatggggagcagtgagagcagctgaatcccttacagccattcctgagcctgcctctccccagcttcttgagacaccaattcatgcctcccagatccaaaaggtggaaccagcaggtagatctaggttcaccccggagctccagcctaaggcctctcaaagccgcaagaggtctttagctaccatggattcaccaccacatcaaaaacagccccaaagaggggaagtctcccagaagacagtgattatcaaggaagaggaagaagatactgcagagaagccagggaaggaagaggatgtcgtgactccaaaaccaggcaagagaaagagagaccaggcagaggaggagcccaacagaataccaagccgcagcctccgacggaccaaacttaaccaagaatcaacagcccccaaagtgctcttcacaggagtggtggatgctcggggagagcgggctgtgctggcactggggggaagtctggctggttcagcggcagaggcttcccacctggtcactgatcgcatccgccggacagtcaagttcctgtgtgccctggggcggggaatccccattctgtccctggactggctgcatcagtcccgcaaggctggtttcttcttacccccggatgaatatgtggtgaccgaccctgagcaagagaagaactttggctttagccttcaagacgcactgagcagggctcgggagcgaaggctgctagagggctatgagatctatgtgacccctggagtccagccaccaccacctcagatgggagagattattagctgctgtggaggcacatacctacccagcatgcctcggtcctataagcctcagagagttgtgatcacatgccctcaggacttccctcattgctccattccactacgggttgggctgcccctcctctcgcctgagttcctgctgactggagtgctgaagcaggaagccaagccagaggcctttgtcctctcccctttggagatgtcatccacctgagaactccactacccttttccctcccagaccacgaattagaagatatgtggaagaaagaactcagggcgttagaaaggattggggtatattgatacaacttgtcctggaacatgggtgggaccagaaatctttatgaataaatgaaaagataagggatttggaagccacaggttgttttttgtttgtttgtttgtttttttaatggccattttattttatttgtatttatagttttttatttgtatagatttaggggatacaagatttcttacatgcatgtattaaatggccattttaaaattagctagtttcatgctcagatgtcataagtggcagctatctttagccagactgttgcagttattgctcgatgccactcatggtgtcctacctcctatttggaaaccatctctatttttttcttactgagattcttactttggggtcaggaacttgaagggatgcttggagtgagtagatttgagggtccagttatggagtgctactaaaacattttcttctctcctggcctctggaagcatctttagctttgactttgggcaagtctctgtacttttctggccagcttttccaggatttataaaattagagcttcggcttgacctctgtgataaataaatattcactctgtgcctt

SEQ ID NO: 285691 - DNA, 7576 bp, Artificial Sequence
  derived and/or modified sequence
ttggatttaagaaaatgacctcaaaatgtccgtcagagacgtattcccaggaagaaagatattacttctactacaaaccaaatcaaaaggaaatgaaattccaatgcaacaggagtgaactgccacgcctacgggctgttctccaaactgcagcctccagccacgactgcaacgcgcaacccactttcatttctcatgagtcagcggacaccatgtctaggaggaccgaggaaaggcgctctggccttaccagacacgtcggacgtctatgacacagcccctctatccgttgccggcagctggcgccagactctctggtcgcggtttggaactgcgcgggaagtgggtggtgggcgggcaagcggtagtgggttgtcccttggagctgcccaatcgacgtgcattattctgttggcgcacggcggccttcaattaccgtctcattaactgatctcagcagcctgggagacaccacctatttgaactctaagggggcggggctttgggtgtgcctccgctcgactggctgcggttgtgaaagacagcggcagaagccaatcagcaaataagctctttttcggcacacgcagtcgctccacccgggtcgcgaccgttactggtggcgcgcgcggggacttaaagtagatcatggaggacacccaggctattgactgggatgttgaagaagaggaggagacagagcaatccagtgaatccttgaggtgtaacgtggagccagtagggcggctacatatctttagtggtgcccatggaccagaaaaagatttcccactacacctcgggaagaatgtggtaggccgaatgcctgactgctctgtggccctgccctttccatctatctccaaacaacatgcagagattgaaatcttagcctgggacaaggcacctatcctccgagactgtgggagccttaatggtactcaaatcctgagacctcctaaggttttgagccctggggtgagtcaccgtctgagggaccaggaattgattctctttgctgacttgctctgccagtaccatcgcctggatgtctctctgccctttgtctcccggggccctctgacagtagaagagacacccagagtacagggagaaactcaaccccagaggcttctgttggctgaggactcggaggaggaagtagattttctttctgaaaggcgtatggtaaaaaaatcaaggaccacatcttcctctgtgatagttccagagagtgatgaagaggggcattccccggtcctgggcggccttgggccgccttttgccttcaatttgaacagtgacacagatgtggaagaaggtcagcaaccagccacagaggaggcctcctcagctgccagaagaggtgccactgtagaggcaaagcagtctgaagctgaagttgtaactgaaatccagcttgaaaaggatcagcctttagtgaaggagagggacaatgatacaaaagtcaagaggggtgcagggaatggggtggttccagctggggtgattctggagaggagccaacctcctggagaggacagtgacacagatgtggatgatgacagcaggcctcctggaaggccagctgaggtccatttggaaagggctcagccttttggcttcatcgacagcgacactgatgcggaagaagagaggatcccagcaaccccagttgtcattcctatgaagaagaggaagatcttccatggagtaggtacaaggggtcctggagcaccaggcctggcccatctgcaggagagccaggctggtagtgatacagatgtggaagaaggcaaggccccacaggctgtccctctggagaaaagccaagcttccatggttatcaacagcgatacagatgacgaggaagaagtctcagcagcgctgactttggcacatctgaaagagagccagcctgctatatggaacagagatgcagaagaggacatgccccaacgtgtggtccttctgcagcgaagccaaaccaccactgagagagacagtgacacagacgtggaggaggaagagctcccagtggaaaatagagaagctgtcctcaaggatcacacaaagattagagcccttgttagagcacattcagaaaaggaccaacctccttttggggacagtgatgacagtgtggaagcagataagagctcacctgggatccacctggagagaagccaagcctccaccacagtggacatcaacacacaagtggagaaggaagtcccgccagggtcagccattatacatataaagaagcatcaggtgtctgtggaggggacaaatcaaacagatgtgaaagcagttgggggaccagcaaagctgcttgtggtatctctagaggaagcctggcctctgcatggggactgtgaaacagatgcagaggagggcacctccctaacagcctcagtagttgcagatgtaagaaagagccagcttccagcagaaggggatgctggggcagagtgggctgcagctgttcttaagcaggagagagctcatgaggtgggggcccagggtgggccacctgtggcacaagtggagcaggacctccctatctcaagagagaacctcacagatctggtggtggacacagacactctaggggaatccacccagccacagagagagggagcccaggtccccacaggaagggagagagaacaacatgtgggtgggaccaaggactctgaagacaactatggtgattctgaagatctggacctacaagctacccagtgctttctggagaatcagggcctggaagcagtccagagcatggaggatgaacctacccaggccttcatgttgactccaccccaagagcttggcccttcccattgcagcttccagacaacaggtaccctagatgaaccatgggaggtcctggctacacagccattctgtctgagagagtctgaggactctgagacccagccttttgacacgcaccttgaggcctatggaccttgcctgtctccacctagggcaataccaggagaccaacatccagagagcccagttcacacagagccaatggggattcaaggcagagggaggcagactgtggataaagtcatgggtataccaaaagaaacagcagagagggtgggccctgagagagggccattggagagagaaactgagaaactgctaccagaaagacagacagatgtgacaggagaggaagaattaaccaaggggaaacaggacagagaacaaaaacagttgttagctagagacacccagagacaagaatctgacaaaaatggggaaagtgcaagtcctgaaagagatagggagagtttgaaggtagaaattgagacatctgaggaaatacaagagaaacaagtacagaagcagacccttccaagcaaagcatttgagagagaagtagagagaccagtagcaaacagagagtgcgatccagccgagttagaagagaaggtgcccaaagtgatcctggagagagatacacagagaggggagccagagggagggagccaggaccagaaagggcaggcctccagcccaacaccagagcctggggtgggggcgggggaccttccgggacctacctcagcccccgtaccttctgggagccagtcaggtggaaggggatccccagtgagccccaggaggcatcagaaaggcctcctgaattgcaagatgccacctgctgagaaggcttccaggatcagagctgctgagaaggtttccaggggcgatcaggaatctccagatgcttgtctgcctcctacagtacctgaagccccagccccaccccaaaagccccttaactctcagagccagaaacatcttgcacctccgccccttctttctccccttttaccttctatcaagccaaccgttcgtaagaccaggcaagatgggagtcaggaagctccagaggctcccttgtcctcagagctggagcctttccacccaaagcctaaaattagaactcggaagtcctccagaatgacaccctttccagctacctctgctgcccctgagccccacccttccacctccacagcccagccagtcactcccaagcccacatctcaggccactaggagcaggacaaataggtcctctgtcaagacccctgaaccagttgtccccacagcccctgagctccagccttccacctccacagaccagcctgtcacctctgagcccacatctcaggttactaggggaagaaaaagtagatcctctgtcaagacccctgaaacagttgtgcccacagcccttgagctccagccttccacctccaccgaccgacctgtcacctctgaacccacctctcaggctactaggggaagaaaaaatagatcctctgtcaagacccctgaaccagttgtccccacagcccctgagctccagccttccacctccacagaccagcctgtcacttctgagcccacatatcaggctactaggggaagaaaaaatagatcctctgtcaagacccctgaaccagttgtgcccacagcccctgagctccggccttccacctccacagaccgacctgtcacccccaagcccacatctcggaccactaggagcaggacaaatatgtcctctgtcaagacccctgaaacagttgtccccacagcccctgagctccagatttccacctccacagaccaacctgtcacccctaagcccacatctcggaccactaggagcaggacaaatatgtcctctgtgaagaaccctgaatcaactgtccctatagcccctgagctcccaccttccacctccacagagcagcctgtcacccctgagcccacatctcgggctactaggggaagaaaaaatagatcctctggcaagacccctgaaacacttgtccccacagcccctaagctcgagccttccacttccacagaccaacctgtcactcctgagcccacatctcaggccaccaggggcaggacaaataggtcctctgtgaagacccctgaaacagttgtccccacagcccctgagctccagccttccacctccacagaccagcctgttacccctgagcctacgtctcaggctactaggggaagaacagatagatcctctgtcaagactcctgaaacagttgtccccacagcccctgagctacaggcttccgcctccacagaccagcctgtcacctctgagcccacatctcggaccactaggggaagaaaaaatcggtcctctgtcaagacccctgaaacagttgtgcccgcagcccctgcgctccagccttccacctccacagaccaacctgtcacccctgagcccacatctcgggccactaggggcaggacaaataggtcctctgtcaagacccctgaatcaattgtccctatagcccctgagcttcagccttccacctccagaaaccagcttgtcacccctgagcccacatctcgggccactaggtgcaggacaaataggtcctctgtcaagacccctgagccagttgtccccacagcccctgagccccatcctaccacctccacagaccagcctgtcacccccaagctcacatctagggccactaggagaaagacaaataggtcctctgtcaagactcccaaaccagttgaaccagcagcctctgatcttgagccttttacccccacagaccagtccgtcacccctgaggccatagctcagggtggtcagagcaaaacactgaggtcttccacagtaagagctatgccggttcctaccacccctgaattccaatctcctgtcaccacagaccagcctatttcccctgagcctattactcaacccagttgcatcaagaggcagagagccgctgggaaccctggctccctcgcagctcccattgaccataagccttgctctgcacccttggaacctaaatcccaggcctcaaggaaccaaagatggggagcagtgagagcagctgaatcccttacagccattcctgagcctgcctctccccagcttcttgagacaccaattcatgcctcccagatccaaaaggtggaaccagcaggtagatctaggttcaccccggagctccagcctaaggcctctcaaagccgcaagaggtctttagctaccatggattcaccaccacatcaaaaacagccccaaagaggggaagtctcccagaagacagtgattatcaaggaagaggaagaagatactgcagagaagccagggaaggaagaggatgtcgtgactccaaaaccaggcaagagaaagagagaccaggcagaggaggagcccaacagaataccaagccgcagcctccgacggaccaaacttaaccaagaatcaacagcccccaaagtgctcttcacaggagtggtggatgctcggggagagcgggctgtgctggcactggggggaagtctggctggttcagcggcagaggcttcccacctggtcactgatcgcatccgccggacagtcaagttcctgtgtgccctggggcggggaatccccattctgtccctggactggctgcatcagtcccgcaaggctggtttcttcttacccccggatgaatatgtggtgaccgaccctgagcaagagaagaactttggctttagccttcaagacgcactgagcagggctcgggagcgaaggctgctagagggctatgagatctatgtgacccctggagtccagccaccaccacctcagatgggagagattattagctgctgtggaggcacatacctacccagcatgcctcggtcctataagcctcagagagttgtgatcacatgccctcaggacttccctcattgctccattccactacgggttgggctgcccctcctctcgcctgagttcctgctgactggagtgctgaagcaggaagccaagccagaggcctttgtcctctcccctttggagatgtcatccacctgagaactccactacccttttccctcccagaccacgaattagaagatatgtggaagaaagaactcagggcgttagaaaggattggggtatattgatacaacttgtcctggaacatgggtgggaccagaaatctttatgaataaatgaaaagataagggatttggaagccacaggttgttttttgtttgtttgtttgtttttttaatggccattttattttatttgtatttatagttttttatttgtatagatttaggggatacaagatttcttacatgcatgtattaaatggccattttaaaattagctagtttcatgctcagatgtcataagtggcagctatctttagccagactgttgcagttattgctcgatgccactcatggtgtcctacctcctatttggaaaccatctctatttttttcttactgagattcttactttggggtcaggaacttgaagggatgcttggagtgagtagatttgagggtccagttatggagtgctactaaaacattttcttctctcctggcctctggaagcatctttagctttgactttgggcaagtctctgtacttttctggccagcttttccaggatttataaaattagagcttcggcttgacctctgtgataaataaatattcactctgtgcctta

SEQ ID NO: 285692 - DNA, 6506 bp, Artificial Sequence
  derived and/or modified sequence
caccatgtctaggaggaccgaggaaaggcgctctggccttaccagacacgtcggacgtctatgacacagcccctctatccgttgccggcagctggcgccagactctctggtcgcggtttggaactgcgcgggaagtgggtggtgggcgggcaagcggtagtgggttgtcccttggagctgcccaatcgacgtgcattattctgttggcgcacggcggccttcaattaccgtctcattaactgatctcagcagcctgggagacaccacctatttgaactctaagggggcggggctttgggtgtgcctccgctcgactggctgcggttgtgaaagacagcggcagaagccaatcagcaaataagctctttttcggcacacgcagtcgctccacccgggtcgcgaccgttactggtggcgcgcgcggggacttaaagtagatcatggaggacacccaggctattgactgggatgttgaagaagaggaggagacagagcaatccagtgaatccttgaggtgtaacgtggagccagtagggcggctacatatctttagtggtgcccatggaccagaaaaagatttcccactacacctcgggaagaatgtggtaggccgaatgcctgactgctctgtggccctgccctttccatctatctccaaacaacatgcagagattgaaatcttagcctgggacaaggcacctatcctccgagactgtgggagccttaatggtactcaaatcctgagacctcctaaggttttgagccctggggtgagtcaccgtctgagggaccaggaattgattctctttgctgacttgctctgccagtaccatcgcctggatgtctctctgccctttgtctcccggggccctctgacagtagaagagacacccagagtacagggagaaactcaaccccagaggcttctgttggctgaggactcggaggaggaagtagattttctttctgaaaggcgtatggtaaaaaaatcaaggaccacatcttcctctgtgatagttccagagagtgatgaagaggggcattccccggtcctgggcggccttgggccgccttttgccttcaatttgaacagtgacacagatgtggaagaaggtcagcaaccagccacagaggaggcctcctcagctgccagaagaggtgccactgtagaggcaaagcagtctgaagctgaagttgtaactgaaatccagcttgaaaaggatcagcctttagtgaaggagagggacaatgatacaaaagtcaagaggggtgcagggaatggggtggttccagctggggtgattctggagaggagccaacctcctggagaggacagtgacacagatgtggatgatgacagcaggcctcctggaaggccagctgaggtccatttggaaagggctcagccttttggcttcatcgacagcgacactgatgcggaagaagagaggatcccagcaaccccagttgtcattcctatgaagaagaggaagatcttccatggagtaggtacaaggggtcctggagcaccaggcctggcccatctgcaggagagccaggctggtagtgatacagatgtggaagaaggcaaggccccacaggctgtccctctggagaaaagccaagcttccatggttatcaacagcgatacagatgacgaggaagaagtctcagcagcgctgactttggcacatctgaaagagagccagcctgctatatggaacagagatgcagaagaggacatgccccaacgtgtggtccttctgcagcgaagccaaaccaccactgagagagacagtgacacagacgtggaggaggaagagctcccagtggaaaatagagaagctgtcctcaaggatcacacaaagattagagcccttgttagagcacattcagaaaaggaccaacctccttttggggacagtgatgacagtgtggaagcagataagagctcacctgggatccacctggagagaagccaagcctccaccacagtggacatcaacacacaagtggagaaggaagtcccgccagggtcagccattatacatataaagaagcatcaggtgtctgtggaggggacaaatcaaacagatgtgaaagcagttgggggaccagcaaagctgcttgtggtatctctagaggaagcctggcctctgcatggggactgtgaaacagatgcagaggagggcacctccctaacagcctcagtagttgcagatgtaagaaagagccagcttccagcagaaggggatgctggggcagagtgggctgcagctgttcttaagcaggagagagctcatgaggtgggggcccagggtgggccacctgtggcacaagtggagcaggacctccctatctcaagagagaacctcacagatctggtggtggacacagacactctaggggaatccacccagccacagagagagggagcccaggtccccacaggaagggagagagaacaacatgtgggtgggaccaaggactctgaagacaactatggtgattctgaagatctggacctacaagctacccagtgctttctggagaatcagggcctggaagcagtccagagcatggaggatgaacctacccaggccttcatgttgactccaccccaagagcttggcccttcccattgcagcttccagacaacaggtaccctagatgaaccatgggaggtcctggctacacagccattctgtctgagagagtctgaggactctgagacccagccttttgacacgcaccttgaggcctatggaccttgcctgtctccacctagggcaataccaggagaccaacatccagagagcccagttcacacagagccaatggggattcaaggcagagggaggcagactgtggataaagtcatgggtataccaaaagaaacagcagagagggtgggccctgagagagggccattggagagagaaactgagaaactgctaccagaaagacagacagatgtgacaggagaggaagaattaaccaaggggaaacaggacagagaacaaaaacagttgttagctagagacacccagagacaagaatctgacaaaaatggggaaagtgcaagtcctgaaagagatagggagagtttgaaggtagaaattgagacatctgaggaaatacaagagaaacaagtacagaagcagacccttccaagcaaagcatttgagagagaagtagagagaccagtagcaaacagagagtgcgatccagccgagttagaagagaaggtgcccaaagtgatcctggagagagatacacagagaggggagccagagggagggagccaggaccagaaagggcaggcctccagcccaacaccagagcctggggtgggggcgggggaccttccgggacctacctcagcccccgtaccttctgggagccagtcaggtggaaggggatccccagtgagccccaggaggcatcagaaaggcctcctgaattgcaagatgccacctgctgagaaggcttccaggatcagagctgctgagaaggtttccaggggcgatcaggaatctccagatgcttgtctgcctcctacagtacctgaagccccagccccaccccaaaagccccttaactctcagagccagaaacatcttgcacctccgccccttctttctccccttttaccttctatcaagccaaccgttcgtaagaccaggcaagatgggagtcaggaagctccagaggctcccttgtcctcagagctggagcctttccacccaaagcctaaaattagaactcggaagtcctccagaatgacaccctttccagctacctctgctgcccctaagctcgagccttccacttccacagaccaacctgtcactcctgagcccacatctcaggccaccaggggcaggacaaataggtcctctgtgaagacccctgaaacagttgtccccacagcccctgagctccagccttccacctccacagaccagcctgttacccctgagcctacgtctcaggctactaggggaagaacagatagatcctctgtcaagactcctgaaacagttgtccccacagcccctgagctacaggcttccgcctccacagaccagcctgtcacctctgagcccacatctcggaccactaggggaagaaaaaatcggtcctctgtcaagacccctgaaacagttgtgcccgcagcccctgagctccagccttccacctccacagaccaacctgtcacccctgagcccacatctcgggccactaggggcaggacaaataggtcctctgtcaagacccctgaatcaattgtccctatagcccctgagcttcagccttccacctccagaaaccagcttgtcacccctgagcccacatctcgggccactaggtgcaggacaaataggtcctctgtcaagacccctgagccagttgtccccacagcccctgagccccatcctaccacctccacagaccagcctgtcacccccaagctcacatctagggccactaggagaaagacaaataggtcctctgtcaagactcccaaaccagttgaaccagcagcctctgatcttgagccttttacccccacagaccagtccgtcacccctgaggccatagctcagggtggtcagagcaaaacactgaggtcttccacagtaagagctatgccggttcctaccacccctgaattccaatctcctgtcaccacagaccagcctatttcccctgagcctattactcaacccagttgcatcaagaggcagagagccgctgggaaccctggctccctcgcagctcccattgaccataagccttgctctgcacccttggaacctaaatcccaggcctcaaggaaccaaagatggggagcagtgagagcagctgaatcccttacagccattcctgagcctgcctctccccagcttcttgagacaccaattcatgcctcccagatccaaaaggtggaaccagcaggtagatctaggttcaccccggagctccagcctaaggcctctcaaagccgcaagaggtctttagctaccatggattcaccaccacatcaaaaacagccccaaagaggggaagtctcccagaagacagtgattatcaaggaagaggaagaagatactgcagagaagccagggaaggaagaggatgtcgtgactccaaaaccaggcaagagaaagagagaccaggcagaggaggagcccaacagaataccaagccgcagcctccgacggaccaaacttaaccaagaatcaacagcccccaaagtgctcttcacaggagtggtggatgctcggggagagcgggctgtgctggcactggggggaagtctggctggttcagcggcagaggcttcccacctggtcactgatcgcatccgccggacagtcaagttcctgtgtgccctggggcggggaatccccattctgtccctggactggctgcatcagtcccgcaaggctggtttcttcttacccccggatgaatatgtggtgaccgaccctgagcaagagaagaactttggctttagccttcaagacgcactgagcagggctcgggagcgaaggctgctagagggctatgagatctatgtgacccctggagtccagccaccaccacctcagatgggagagattattagctgctgtggaggcacatacctacccagcatgcctcggtcctataagcctcagagagttgtgatcacatgccctcaggacttccctcattgctccattccactacgggttgggctgcccctcctctcgcctgagttcctgctgactggagtgctgaagcaggaagccaagccagaggcctttgtcctctcccctttggagatgtcatccacctgagaactccactacccttttccctcccagaccacgaattagaagatatgtggaagaaagaactcagggcgttagaaaggattggggtatattgatacaacttgtcctggaacatgggtgggaccagaaatctttatgaataaatgaaaagataagggatttggaagccacaggttgttttttgtttgtttgtttgtttttttaatggccattttattttatttgtatttatagttttttatttgtatagatttaggggatacaagatttcttacatgcatgtattaaatggccattttaaaattagctagtttcatgctcagatgtcataagtggcagctatctttagccagactgttgcagttattgctcgatgccactcatggtgtcctacctcctatttggaaaccatctctatttttttcttactgagattcttactttggggtcaggaacttgaagggatgcttggagtgagtagatttgagggtccagttatggagtgctactaaaacattttcttctctcctggcctctggaagcatctttagctttgactttgggcaagtctctgtacttttctggccagcttttccaggatttataaaattagagcttcggcttgacctctgtgataaataaatattcactctgtgcctt

SEQ ID NO: 285693 - DNA, 6506 bp, Artificial Sequence
  derived and/or modified sequence
caccatgtctaggaggaccgaggaaaggcgctctggccttaccagacacgtcggacgtctatgacacagcccctctatccgttgccggcagctggcgccagactctctggtcgcggtttggaactgcgcgggaagtgggtggtgggcgggcaagcggtagtgggttgtcccttggagctgcccaatcgacgtgcattattctgttggcgcacggcggccttcaattaccgtctcattaactgatctcagcagcctgggagacaccacctatttgaactctaagggggcggggctttgggtgtgcctccgctcgactggctgcggttgtgaaagacagcggcagaagccaatcagcaaataagctctttttcggcacacgcagtcgctccacccgggtcgcgaccgttactggtggcgcgcgcggggacttaaagtagatcatggaggacacccaggctattgactgggatgttgaagaagaggaggagacagagcaatccagtgaatccttgaggtgtaacgtggagccagtagggcggctacatatctttagtggtgcccatggaccagaaaaagatttcccactacacctcgggaagaatgtggtaggccgaatgcctgactgctctgtggccctgccctttccatctatctccaaacaacatgcagagattgaaatcttagcctgggacaaggcacctatcctccgagactgtgggagccttaatggtactcaaatcctgagacctcctaaggttttgagccctggggtgagtcaccgtctgagggaccaggaattgattctctttgctgacttgctctgccagtaccatcgcctggatgtctctctgccctttgtctcccggggccctctgacagtagaagagacacccagagtacagggagaaactcaaccccagaggcttctgttggctgaggactcggaggaggaagtagattttctttctgaaaggcgtatggtaaaaaaatcaaggaccacatcttcctctgtgatagttccagagagtgatgaagaggggcattccccggtcctgggcggccttgggccgccttttgccttcaatttgaacagtgacacagatgtggaagaaggtcagcaaccagccacagaggaggcctcctcagctgccagaagaggtgccactgtagaggcaaagcagtctgaagctgaagttgtaactgaaatccagcttgaaaaggatcagcctttagtgaaggagagggacaatgatacaaaagtcaagaggggtgcagggaatggggtggttccagctggggtgattctggagaggagccaacctcctggagaggacagtgacacagatgtggatgatgacagcaggcctcctggaaggccagctgaggtccatttggaaagggctcagccttttggcttcatcgacagcgacactgatgcggaagaagagaggatcccagcaaccccagttgtcattcctatgaagaagaggaagatcttccatggagtaggtacaaggggtcctggagcaccaggcctggcccatctgcaggagagccaggctggtagtgatacagatgtggaagaaggcaaggccccacaggctgtccctctggagaaaagccaagcttccatggttatcaacagcgatacagatgacgaggaagaagtctcagcagcgctgactttggcacatctgaaagagagccagcctgctatatggaacagagatgcagaagaggacatgccccaacgtgtggtccttctgcagcgaagccaaaccaccactgagagagacagtgacacagacgtggaggaggaagagctcccagtggaaaatagagaagctgtcctcaaggatcacacaaagattagagcccttgttagagcacattcagaaaaggaccaacctccttttggggacagtgatgacagtgtggaagcagataagagctcacctgggatccacctggagagaagccaagcctccaccacagtggacatcaacacacaagtggagaaggaagtcccgccagggtcagccattatacatataaagaagcatcaggtgtctgtggaggggacaaatcaaacagatgtgaaagcagttgggggaccagcaaagctgcttgtggtatctctagaggaagcctggcctctgcatggggactgtgaaacagatgcagaggagggcacctccctaacagcctcagtagttgcagatgtaagaaagagccagcttccagcagaaggggatgctggggcagagtgggctgcagctgttcttaagcaggagagagctcatgaggtgggggcccagggtgggccacctgtggcacaagtggagcaggacctccctatctcaagagagaacctcacagatctggtggtggacacagacactctaggggaatccacccagccacagagagagggagcccaggtccccacaggaagggagagagaacaacatgtgggtgggaccaaggactctgaagacaactatggtgattctgaagatctggacctacaagctacccagtgctttctggagaatcagggcctggaagcagtccagagcatggaggatgaacctacccaggccttcatgttgactccaccccaagagcttggcccttcccattgcagcttccagacaacaggtaccctagatgaaccatgggaggtcctggctacacagccattctgtctgagagagtctgaggactctgagacccagccttttgacacgcaccttgaggcctatggaccttgcctgtctccacctagggcaataccaggagaccaacatccagagagcccagttcacacagagccaatggggattcaaggcagagggaggcagactgtggataaagtcatgggtataccaaaagaaacagcagagagggtgggccctgagagagggccattggagagagaaactgagaaactgctaccagaaagacagacagatgtgacaggagaggaagaattaaccaaggggaaacaggacagagaacaaaaacagttgttagctagagacacccagagacaagaatctgacaaaaatggggaaagtgcaagtcctgaaagagatagggagagtttgaaggtagaaattgagacatctgaggaaatacaagagaaacaagtacagaagcagacccttccaagcaaagcatttgagagagaagtagagagaccagtagcaaacagagagtgcgatccagccgagttagaagagaaggtgcccaaagtgatcctggagagagatacacagagaggggagccagagggagggagccaggaccagaaagggcaggcctccagcccaacaccagagcctggggtgggggcgggggaccttccgggacctacctcagcccccgtaccttctgggagccagtcaggtggaaggggatccccagtgagccccaggaggcatcagaaaggcctcctgaattgcaagatgccacctgctgagaaggcttccaggatcagagctgctgagaaggtttccaggggcgatcaggaatctccagatgcttgtctgcctcctacagtacctgaagccccagccccaccccaaaagccccttaactctcagagccagaaacatcttgcacctccgccccttctttctccccttttaccttctatcaagccaaccgttcgtaagaccaggcaagatgggagtcaggaagctccagaggctcccttgtcctcagagctggagcctttccacccaaagcctaaaattagaactcggaagtcctccagaatgacaccctttccagctacctctgctgcccctaagctcgagccttccacttccacagaccaacctgtcactcctgagcccacatctcaggccaccaggggcaggacaaataggtcctctgtgaagacccctgaaacagttgtccccacagcccctgagctccagccttccacctccacagaccagcctgttacccctgagcctacgtctcaggctactaggggaagaacagatagatcctctgtcaagactcctgaaacagttgtccccacagcccctgagctacaggcttccgcctccacagaccagcctgtcacctctgagcccacatctcggaccactaggggaagaaaaaatcggtcctctgtcaagacccctgaaacagttgtgcccgcagcccctgcgctccagccttccacctccacagaccaacctgtcacccctgagcccacatctcgggccactaggggcaggacaaataggtcctctgtcaagacccctgaatcaattgtccctatagcccctgagcttcagccttccacctccagaaaccagcttgtcacccctgagcccacatctcgggccactaggtgcaggacaaataggtcctctgtcaagacccctgagccagttgtccccacagcccctgagccccatcctaccacctccacagaccagcctgtcacccccaagctcacatctagggccactaggagaaagacaaataggtcctctgtcaagactcccaaaccagttgaaccagcagcctctgatcttgagccttttacccccacagaccagtccgtcacccctgaggccatagctcagggtggtcagagcaaaacactgaggtcttccacagtaagagctatgccggttcctaccacccctgaattccaatctcctgtcaccacagaccagcctatttcccctgagcctattactcaacccagttgcatcaagaggcagagagccgctgggaaccctggctccctcgcagctcccattgaccataagccttgctctgcacccttggaacctaaatcccaggcctcaaggaaccaaagatggggagcagtgagagcagctgaatcccttacagccattcctgagcctgcctctccccagcttcttgagacaccaattcatgcctcccagatccaaaaggtggaaccagcaggtagatctaggttcaccccggagctccagcctaaggcctctcaaagccgcaagaggtctttagctaccatggattcaccaccacatcaaaaacagccccaaagaggggaagtctcccagaagacagtgattatcaaggaagaggaagaagatactgcagagaagccagggaaggaagaggatgtcgtgactccaaaaccaggcaagagaaagagagaccaggcagaggaggagcccaacagaataccaagccgcagcctccgacggaccaaacttaaccaagaatcaacagcccccaaagtgctcttcacaggagtggtggatgctcggggagagcgggctgtgctggcactggggggaagtctggctggttcagcggcagaggcttcccacctggtcactgatcgcatccgccggacagtcaagttcctgtgtgccctggggcggggaatccccattctgtccctggactggctgcatcagtcccgcaaggctggtttcttcttacccccggatgaatatgtggtgaccgaccctgagcaagagaagaactttggctttagccttcaagacgcactgagcagggctcgggagcgaaggctgctagagggctatgagatctatgtgacccctggagtccagccaccaccacctcagatgggagagattattagctgctgtggaggcacatacctacccagcatgcctcggtcctataagcctcagagagttgtgatcacatgccctcaggacttccctcattgctccattccactacgggttgggctgcccctcctctcgcctgagttcctgctgactggagtgctgaagcaggaagccaagccagaggcctttgtcctctcccctttggagatgtcatccacctgagaactccactacccttttccctcccagaccacgaattagaagatatgtggaagaaagaactcagggcgttagaaaggattggggtatattgatacaacttgtcctggaacatgggtgggaccagaaatctttatgaataaatgaaaagataagggatttggaagccacaggttgttttttgtttgtttgtttgtttttttaatggccattttattttatttgtatttatagttttttatttgtatagatttaggggatacaagatttcttacatgcatgtattaaatggccattttaaaattagctagtttcatgctcagatgtcataagtggcagctatctttagccagactgttgcagttattgctcgatgccactcatggtgtcctacctcctatttggaaaccatctctatttttttcttactgagattcttactttggggtcaggaacttgaagggatgcttggagtgagtagatttgagggtccagttatggagtgctactaaaacattttcttctctcctggcctctggaagcatctttagctttgactttgggcaagtctctgtacttttctggccagcttttccaggatttataaaattagagcttcggcttgacctctgtgataaataaatattcactctgtgcctt

SEQ ID NO: 285694 - DNA, 6506 bp, Artificial Sequence
  derived and/or modified sequence
caccatgtctaggaggaccgaggaaaggcgctctggccttaccagacacgtcggacgtctatgacacagcccctctatccgttgccggcagctggcgccagactctctggtcgcggtttggaactgcgcgggaagtgggtggtgggcgggcaagcggtagtgggttgtcccttggagctgcccaatcgacgtgcattattctgttggcgcacggcggccttcaattaccgtctcattaactgatctcagcagcctgggagacaccacctatttgaactctaagggggcggggctttgggtgtgcctccgctcgactggctgcggttgtgaaagacagcggcagaagccaatcagcaaataagctctttttcggcacacgcagtcgctccacccgggtcgcgaccgttactggtggcgcgcgcggggacttaaagtagatcatggaggacacccaggctattgactgggatgttgaagaagaggaggagacagagcaatccagtgaatccttgaggtgtaacgtggagccagtagggcggctacatatctttagtggtgcccatggaccagaaaaagatttcccactacacctcgggaagaatgtggtaggccgaatgcctgactgctctgtggccctgccctttccatctatctccaaacaacatgcagagattgaaatcttagcctgggacaaggcacctatcctccgagactgtgggagccttaatggtactcaaatcctgagacctcctaaggttttgagccctggggtgagtcaccgtctgagggaccaggaattgattctctttgctgacttgctctgccagtaccatcgcctggatgtctctctgccctttgtctcccggggccctctgacagtagaagagacacccagagtacagggagaaactcaaccccagaggcttctgttggctgaggactcggaggaggaagtagattttctttctgaaaggcgtatggtaaaaaaatcaaggaccacatcttcctctgtgatagttccagagagtgatgaagaggggcattccccggtcctgggcggccttgggccgccttttgccttcaatttgaacagtgacacagatgtggaagaaggtcagcaaccagccacagaggaggcctcctcagctgccagaagaggtgccactgtagaggcaaagcagtctgaagctgaagttgtaactgaaatccagcttgaaaaggatcagcctttagtgaaggagagggacaatgatacaaaagtcaagaggggtgcagggaatggggtggttccagctggggtgattctggagaggagccaacctcctggagaggacagtgacacagatgtggatgatgacagcaggcctcctggaaggccagctgaggtccatttggaaagggctcagccttttggcttcatcgacagcgacactgatgcggaagaagagaggatcccagcaaccccagttgtcattcctatgaagaagaggaagatcttccatggagtaggtacaaggggtcctggagcaccaggcctggcccatctgcaggagagccaggctggtagtgatacagatgtggaagaaggcaaggccccacaggctgtccctctggagaaaagccaagcttccatggttatcaacagcgatacagatgacgaggaagaagtctcagcagcgctgactttggcacatctgaaagagagccagcctgctatatggaacagagatgcagaagaggacatgccccaacgtgtggtccttctgcagcgaagccaaaccaccactgagagagacagtgacacagacgtggaggaggaagagctcccagtggaaaatagagaagctgtcctcaaggatcacacaaagattagagcccttgttagagcacattcagaaaaggaccaacctccttttggggacagtgatgacagtgtggaagcagataagagctcacctgggatccacctggagagaagccaagcctccaccacagtggacatcaacacacaagtggagaaggaagtcccgccagggtcagccattatacatataaagaagcatcaggtgtctgtggaggggacaaatcaaacagatgtgaaagcagttgggggaccagcaaagctgcttgtggtatctctagaggaagcctggcctctgcatggggactgtgaaacagatgcagaggagggcacctccctaacagcctcagtagttgcagatgtaagaaagagccagcttccagcagaaggggatgctggggcagagtgggctgcagctgttcttaagcaggagagagctcatgaggtgggggcccagggtgggccacctgtggcacaagtggagcaggacctccctatctcaagagagaacctcacagatctggtggtggacacagacactctaggggaatccacccagccacagagagagggagcccaggtccccacaggaagggagagagaacaacatgtgggtgggaccaaggactctgaagacaactatggtgattctgaagatctggacctacaagctacccagtgctttctggagaatcagggcctggaagcagtccagagcatggaggatgaacctacccaggccttcatgttgactccaccccaagagcttggcccttcccattgcagcttccagacaacaggtaccctagatgaaccatgggaggtcctggctacacagccattctgtctgagagagtctgaggactctgagacccagccttttgacacgcaccttgaggcctatggaccttgcctgtctccacctagggcaataccaggagaccaacatccagagagcccagttcacacagagccaatggggattcaaggcagagggaggcagactgtggataaagtcatgggtataccaaaagaaacagcagagagggtgggccctgagagagggccattggagagagaaactgagaaactgctaccagaaagacagacagatgtgacaggagaggaagaattaaccaaggggaaacaggacagagaacaaaaacagttgttagctagagacacccagagacaagaatctgacaaaaatggggaaagtgcaagtcctgaaagagatagggagagtttgaaggtagaaattgagacatctgaggaaatacaagagaaacaagtacagaagcagacccttccaagcaaagcatttgagagagaagtagagagaccagtagcaaacagagagtgcgatccagccgagttagaagagaaggtgcccaaagtgatcctggagagagatacacagagaggggagccagagggagggagccaggaccagaaagggcaggcctccagcccaacaccagagcctggggtgggggcgggggaccttccgggacctacctcagcccccgtaccttctgggagccagtcaggtggaaggggatccccagtgagccccaggaggcatcagaaaggcctcctgaattgcaagatgccacctgctgagaaggcttccaggatcagagctgctgagaaggtttccaggggcgatcaggaatctccagatgcttgtctgcctcctacagtacctgaagccccagccccaccccaaaagccccttaactctcagagccagaaacatcttgcacctccgccccttctttctccccttttaccttctatcaagccaaccgttcgtaagaccaggcaagatgggagtcaggaagctccagaggctcccttgtcctcagagctggagcctttccacccaaagcctaaaattagaactcggaagtcctccagaatgacaccctttccagctacctctgctgcccctaagctcgagccttccacttccacagaccaacctgtcactcctgagcccacatctcaggccaccaggggcaggacaaataggtcctctgtgaagacccctgaaacagttgtccccacagcccctgagctccagccttccacctccacagaccagcctgttacccctgagcctacgtctcaggctactaggggaagaacagatagatcctctgtcaagactcctgaaacagttgtccccacagcccctgagctacaggcttccgcctccacagaccagcctgtcacctctgagcccacatctcggaccactaggggaagaaaaaatcggtcctctgtcaagacccctgaaacagttgtgcccgcagcccctgagctccagccttccacctccacagaccaacctgtcacccctgagcccacatctcgggccactaggggcaggacaaataggtcctctgtcaagacccctgaatcaattgtccctatagcccctgagcttcagccttccacctccagaaaccagcttgtcacccctgagcccacatctcgggccactaggtgcaggacaaataggtcctctgtcaagacccctgagccagttgtccccacagcccctgagccccatcctaccacctccacagaccagcctgtcacccccaagctcacatctagggccactaggagaaagacaaataggtcctctgtcaagactcccaaaccagttgaaccagcagcgtctgatcttgagccttttacccccacagaccagtccgtcacccctgaggccatagctcagggtggtcagagcaaaacactgaggtcttccacagtaagagctatgccggttcctaccacccctgaattccaatctcctgtcaccacagaccagcctatttcccctgagcctattactcaacccagttgcatcaagaggcagagagccgctgggaaccctggctccctcgcagctcccattgaccataagccttgctctgcacccttggaacctaaatcccaggcctcaaggaaccaaagatggggagcagtgagagcagctgaatcccttacagccattcctgagcctgcctctccccagcttcttgagacaccaattcatgcctcccagatccaaaaggtggaaccagcaggtagatctaggttcaccccggagctccagcctaaggcctctcaaagccgcaagaggtctttagctaccatggattcaccaccacatcaaaaacagccccaaagaggggaagtctcccagaagacagtgattatcaaggaagaggaagaagatactgcagagaagccagggaaggaagaggatgtcgtgactccaaaaccaggcaagagaaagagagaccaggcagaggaggagcccaacagaataccaagccgcagcctccgacggaccaaacttaaccaagaatcaacagcccccaaagtgctcttcacaggagtggtggatgctcggggagagcgggctgtgctggcactggggggaagtctggctggttcagcggcagaggcttcccacctggtcactgatcgcatccgccggacagtcaagttcctgtgtgccctggggcggggaatccccattctgtccctggactggctgcatcagtcccgcaaggctggtttcttcttacccccggatgaatatgtggtgaccgaccctgagcaagagaagaactttggctttagccttcaagacgcactgagcagggctcgggagcgaaggctgctagagggctatgagatctatgtgacccctggagtccagccaccaccacctcagatgggagagattattagctgctgtggaggcacatacctacccagcatgcctcggtcctataagcctcagagagttgtgatcacatgccctcaggacttccctcattgctccattccactacgggttgggctgcccctcctctcgcctgagttcctgctgactggagtgctgaagcaggaagccaagccagaggcctttgtcctctcccctttggagatgtcatccacctgagaactccactacccttttccctcccagaccacgaattagaagatatgtggaagaaagaactcagggcgttagaaaggattggggtatattgatacaacttgtcctggaacatgggtgggaccagaaatctttatgaataaatgaaaagataagggatttggaagccacaggttgttttttgtttgtttgtttgtttttttaatggccattttattttatttgtatttatagttttttatttgtatagatttaggggatacaagatttcttacatgcatgtattaaatggccattttaaaattagctagtttcatgctcagatgtcataagtggcagctatctttagccagactgttgcagttattgctcgatgccactcatggtgtcctacctcctatttggaaaccatctctatttttttcttactgagattcttactttggggtcaggaacttgaagggatgcttggagtgagtagatttgagggtccagttatggagtgctactaaaacattttcttctctcctggcctctggaagcatctttagctttgactttgggcaagtctctgtacttttctggccagcttttccaggatttataaaattagagcttcggcttgacctctgtgataaataaatattcactctgtgcctt

SEQ ID NO: 285695 - DNA, 850 bp, Artificial Sequence
  derived and/or modified sequence
gaccgttactggtggcgcgcgcggggacttaaagtagatcatggaggacacccaggctattgactgggatgttgaagaagaggaggagacagagcaatccagtgaatccttgaggtgtaacgtggagccagtagggcggctacatatctttagtggtgcccatggaccagaaaaagatttcccactacacctcgggaagaatgtggtaggccgaatgcctgactgctctgtggccctgccctttccatctatctccaaacaacatgcagagattgaaatcttagcctgggacaaggcacctatcctccgagactgtgggagccttaatggtactcaaatcctgagctccagccttccacctccacagaccagcctgttacccctgagcctacgtctcaggctactaggggaagaacagatagatcctctgtcaagactcctgaaacagttgtccccacagcccctgagctacaggcttccgcctccacagaccagcctgtcacctctgagcccacatctcggaccactaggggaagaaaaaatcggtcctctgtcaagacccctgaaacagttgtgcccgcagcccctgcgctccagccttccacctccacagaccaacctgtcacccctgagcccacatctcgggccactaggggcaggacaaataggtcctctgtcaagacccctgaatcaattgtccctatagcccctgagcttcagccttccacctccagaaaccagcttgtcacccctgagcccacatctcgggccactaggtgcaggacaaataggtcctctgtcaagacccctgagccagttgtccccacagcccctgagccccatcctacca

SEQ ID NO: 285696 - protein, 1655 aa, Artificial Sequence
  derived and/or modified sequence
MYHRLDVSLPFVSRGPLTVEETPRVQGETQPQRLLLAEDSEEEVDFLSERRMVKKSRTTSSSVIVPESDEEGHSPVLGGLGPPFAFNLNSDTDVEEGQQPATEEASSAARRGATVEAKQSEAEVVTEIQLEKDQPLVKERDNDTKVKRGAGNGVVPAGVILERSQPPGEDSDTDVDDDSRPPGRPAEVHLERAQPFGFIDSDTDAEEERIPATPVVIPMKKRKIFHGVGTRGPGAPGLAHLQESQAGSDTDVEEGKAPQAVPLEKSQASMVINSDTDDEEEVSAALTLAHLKESQPAIWNRDAEEDMPQRVVLLQRSQTTTERDSDTDVEEEELPVENREAVLKDHTKIRALVRAHSEKDQPPFGDSDDSVEADKSSPGIHLERSQASTTVDINTQVEKEVPPGSAIIHIKKHQVSVEGTNQTDVKAVGGPAKLLVVSLEEAWPLHGDCETDAEEGTSLTASVVADVRKSQLPAEGDAGAEWAAAVLKQERAHEVGAQGGPPVAQVEQDLPISRENLTDLVVDTDTLGESTQPQREGAQVPTGREREQHVGGTKDSEDNYGDSEDLDLQATQCFLENQGLEVQSMEDEPTQAFMLTPPQELGPSHCSFQTTGLLNCKMPPAEKASRIRAAEKVSRGDQESPDACLPPTVPEAPAPPQKPLNSQSQKHLAPPPLLSPLLPSIKPTVRKTRQDGSQEAPEAPLSSELEPFHPKPKIRTRKSSRMTPFPATSAAPEPHPSTSTAQPVTPKPTSQATRSRTNRSSVKTPEPVVPTAPELQPSTSTDQPVTSEPTSQVTRGRKSRSSVKTPETVVPTALELQPSTSTDRPVTSEPTSQATRGRKNRSSVKTPEPVVPTAPELQPSTSTDQPVTSEPTYQATRGRKNRSSVKTPEPVVPTAPELRPSTSTDRPVTPKPTSRTTRSRTNMSSVKNPESTVPIAPELPPSTSTEQPVTPEPTSRATRGRKNRSSGKTPETLVPTAPKLEPSTSTDQPVTPEPTSQATRGRTNRSSVKTPETVVPTAPELQPSTSTDQPVTPEPTSQATRGRTDRSSVKTPETVVPTAPELQASASTDQPVTSEPTSRTTRGRKNRSSVKTPETVVPAAPALQPSTSTDQPVTPEPTSRATRGRTNRSSVKTPESIVPIAPELQPSTSRNQLVTPEPTSRATRCRTNRSSVKTPEPVVPTAPEPHPTTSTDQPVTPKLTSRATRRKTNRSSVKTPKPVEPAASDLEPFTPTDQSVTPEAIAQGGQSKTLRSSTVRAMPVPTTPEFQSPVTTDQPISPEPITQPSCIKRQRAAGNPGSLAAPIDHKPCSAPLEPKSQASRNQRWGAVRAAESLTAIPEPASPQLLETPIHASQIQKVEPAGRSRFTPELQPKASQSRKRSLATMDSPPHQKQPQRGEVSQKTVIIKEEEEDTAEKPGKEEDVVTPKPGKRKRDQAEEEPNRIPSRSLRRTKLNQESTAPKVLFTGVVDARGERAVLALGGSLAGSAAEASHLVTDRIRRTVKFLCALGRGIPILSLDWLHQSRKAGFFLPPDEYVVTDPEQEKNFGFSLQDALSRARERRLLEGYEIYVTPGVQPPPPQMGEIISCCGGTYLPSMPRSYKPQRVVITCPQDFPHCSIPLRVGLPLLSPEFLLTGVLKQEAKPEAFVLSPLEMSST

SEQ ID NO: 285697 - DNA, 4968 bp, Artificial Sequence
  derived and/or modified sequence
atgtatcatagattggatgtttccctaccattcgtctcccgcggacccctcaccgtggaggaaacaccaagagtgcagggagaaactcagccccagcggctactgcttgccgaggacagcgaagaagaagtcgactttctgagcgagaggcgcatggtcaaaaaatctcggacaacctcttcttcggtaatcgtgcccgagtccgatgaggagggtcacagtcctgtcctgggagggttgggtccgcccttcgctttcaacctcaactctgatacagacgttgaggaaggtcagcagcccgcaaccgaagaagcatcatcagccgcccgccgcggcgccacagtggaggctaagcagtccgaggcagaagtggtgactgagatacagctcgagaaggaccagccactcgtgaaggagcgggacaatgatacaaaggtgaaacggggtgcagggaatggcgtggttccagccggcgtgatcttggaacggtcccagccgccaggagaggacagcgacaccgacgtcgacgatgatagccggcccccaggcagacccgctgaagtccaccttgagcgtgcccaacctttcggttttatagattccgacacggatgctgaagaggagagaattccagccacccctgtggttataccaatgaagaagcggaagatctttcatggtgtcggtacccgcggaccgggcgctcccggacttgcacacttacaggagtctcaggctgggagcgatacagatgtcgaagaaggaaaggcccctcaggccgttcccttggagaagtcccaagctagtatggtcatcaactccgacacagacgacgaagaggaagtgtcagcagccctgaccctggcccatcttaaagagtcccagccagctatctggaatcgcgatgctgaggaggacatgccacagcgcgtagtactactgcaacgaagccaaaccacgactgagcgggactcagatacggacgtggaagaagaagagctgccggtagagaaccgggaagcagttttgaaagatcatactaaaattcgcgcactggtacgggcccatagcgagaaggatcaaccgccctttggtgattcagacgatagcgtggaggctgacaagtccagtccagggatacatctggagcgtagtcaggcttctacaaccgttgacataaatactcaagttgagaaggaagttcctcccgggagtgccattattcacataaaaaagcaccaggtgagcgtcgaaggtacaaatcaaaccgatgtcaaggcagtgggtggccctgcgaagctgctggtcgttagtctcgaggaagcctggcccctgcatggagactgcgagacggatgccgaggaaggcacctctctaaccgcaagcgtggtggcagacgtgcgtaagtctcaactgccggccgaaggggatgccggagccgagtgggccgcggctgtattgaagcaggagcgggcccatgaagtaggcgcacagggcggcccccccgtcgcacaggtggaacaggatctcccaatctcgcgggagaacctgacagatctggtagtcgacacagatactttaggcgagtcgacacaacctcagcgggaaggcgcccaagtgcccacgggacgggagcgagaacagcacgtggggggaacgaaagatagcgaagataattatggcgactccgaggacctggatctccaggccacacagtgcttccttgagaatcagggtttggaagtgcagtccatggaagatgagcctacacaggcgttcatgcttacgccccctcaagagcttgggccttcgcactgctcttttcagacaacggggctcctgaactgtaagatgccaccagccgagaaggcttcgcgtattcgagccgccgagaaagtgtccagaggcgatcaggagtctcctgatgcatgtctccctcctaccgtgccagaggctcccgccccgccccaaaagcctctcaattcccaaagccagaaacaccttgcacccccccctttgttatcccccctgctgccctctattaagcccacagtccggaagacaagacaggatggctctcaagaggccccagaagctcccctttcctccgagctggaaccattccaccctaaacctaaaatcagaacaaggaagtctagcaggatgacacctttccccgctacatcagccgcaccggagccacacccaagcacaagtacagcccagcccgtgactcctaagcctacaagccaggccacacggtcacgaaccaacagatcctctgtgaagactcccgaacccgtcgtacctaccgcaccagaactgcagcccagcactagtacagaccaaccagtcactagcgaaccaacgtcgcaggtgactaggggccgaaaaagcagatcttcagtgaagactcccgaaaccgttgtacctaccgcactggaactgcaacctagcacatctaccgacaggcctgttactagcgagcctacatcccaggcaactcgtggaaggaaaaatcgcagctccgtgaagacacccgaacctgtagtgcccaccgcaccagaactgcaaccatcgacaagtaccgatcagcccgtcaccagtgagccaacttaccaggcaacccgcggccgaaagaaccggagctccgttaagacgccggaaccggtggtgcccactgcgcctgagcttaggccctccacctctaccgaccgtcccgtcacccctaagcctacaagcagaacgaccagatcccggacgaatatgtctagcgtaaagaatcccgagtctaccgttcccatcgccccggaattgccaccttccaccagcacggagcagcctgtgaccccagagccaacaagtagggcaacacggggacggaagaacagatcctcaggtaagactcctgaaactctggtgcctaccgcccctaaactggagccgtctacctccacagaccagcctgtgacacccgagcccacaagtcaggccactcgcggccggaccaataggtcgtctgtgaaaacccccgagaccgttgtaccgactgctccagagctccagccttctacctccaccgaccagcctgtcacgcccgagccaaccagccaagccacaaggggcaggaccgatcggtcgtcagttaaaactccagagaccgtcgtccctactgcccctgaactgcaagcctccgcctctactgaccaacctgtgacgagcgaacccaccagtcgtaccactcggggcaggaaaaaccggtcttctgtgaagaccccagagacagtagttcccgccgcgcccgctctgcagccctccacctccacagaccagcccgtgacccctgagccaactagtcgagctacccggggccgtaccaaccgtagcagcgtgaaaactcccgagtcaatcgtgcctatcgcgccggaattacagcccagtacctcacgcaatcaattagtgacccccgaacccactagccgggccacaagatgtcggactaaccgctccagtgttaagacaccggaaccagtagtgcctacagcccctgagccccatccaaccacgtcaacggatcagccagtgacgcctaagctgacgtccagggccacaagaagaaagacaaacaggtcatcggtcaaaactccaaaaccagtcgaacccgcagcatcagatcttgaaccctttaccccaaccgaccagagcgtaactcccgaggccatcgcacagggtgggcagtctaaaacactccggagttctaccgttagagccatgcccgtccccaccacaccagagtttcagagtccagtcaccaccgatcagcctatttctccggagccaatcacccagccctcatgcattaagcgccaacgggctgcagggaatcccggcagcctggccgcccccatcgaccacaaaccatgctctgctcctctggagcctaagagccaggcctccagaaatcagaggtggggggctgtaagagccgcagagtcccttacagccattcctgagcctgcctcaccccagctcttagagaccccaattcatgcttcacaaatacagaaggtggaacctgctggcagatcccggttcacccccgagctgcaacctaaggcctcccaatcccgaaaaagaagtctcgcaacaatggactcacccccacatcaaaaacagcctcagagaggagaagtgagccagaagaccgtgatcatcaaagaagaggaagaagatactgcagaaaagcccggcaaggaggaggatgtcgtcacccccaagcctgggaagaggaaaagggaccaggctgaggaagagcccaaccgcattccctcccgaagtctcaggcggacgaagcttaatcaggaatctacagcccccaaggtcttgtttacgggggtggtggacgccagaggggaacgcgccgtgctcgctctcggcggcagccttgcgggatctgctgccgaagcctcacatcttgtcacagataggatacggcggacggtgaaattcttatgtgccttgggtagggggattcctatccttagtttggactggttgcatcagagcagaaaggctggtttctttctcccccccgacgagtacgtagtcaccgacccggagcaggagaagaatttcgggttttctttacaggacgccctgtctcgcgccagagaaaggaggctgctggaaggatatgagatttatgtgactcccggcgtccagccaccacctcctcagatgggagagatcatctcgtgttgcggtgggacttatctgccatccatgccccggtcatacaaacctcagagagttgtgatcacatgcccccaggacttcccccactgctcgatcccattacgcgtgggactccctctgctaagtcccgagttcctgctgaccggggtgctgaagcaagaggccaagccggaggccttcgtactgtctccgctagagatgagcagcacatag

SEQ ID NO: 285698 - DNA, 4968 bp, Artificial Sequence
  derived and/or modified sequence
atgtaccaccggctggatgtgtccctgccctttgtgtcccggggccccctgactgtggaggagaccccccgggtgcagggcgagacccagccccagaggctgctgctggccgaggacagcgaggaggaggtggacttcctgtctgagaggaggatggtgaagaagagcaggaccaccagcagcagcgtcatcgtgcctgagagtgatgaggagggccacagccctgtgctgggcggcctgggccccccatttgccttcaacctgaacagcgacacagatgtggaggagggccagcagcctgccacagaggaggccagcagcgctgcccggcggggggccaccgtggaggccaagcagagcgaggccgaggtggtgacagagatccagctggagaaggaccagcccctggtgaaggagcgggacaatgacaccaaggtgaagagaggagctggaaatggagtggtgcctgctggggtcatcctggagaggagccagcccccaggagaagattctgacacagatgtggatgatgacagcaggcctcctggccggcctgctgaggtgcacctggagcgggcccagcccttcggcttcatcgacagcgacacagatgctgaggaggagcgcatcccagccacccctgtggtgatccccatgaagaagaggaagatcttccacggcgtgggcacccggggccctggggcccctggcctggcccacctgcaggagagccaggccggcagtgacacagatgtggaggagggcaaggccccccaggccgtgcccctggagaagagccaggcctccatggtgatcaacagcgacacagatgatgaggaggaggtgtctgctgccctgaccctggcccacctgaaggagagccagcctgccatctggaacagagatgctgaggaggacatgccccagagggtggtgctgctgcagaggagccagaccaccacagagcgggacagcgacacagatgtggaggaggaggagctgcctgtggagaaccgggaggccgtgctgaaggaccacaccaagatccgggccctggtgcgggcccacagcgagaaggaccagcccccatttggagacagtgatgacagcgtggaggccgacaagagcagccctggcatccacctggagaggagccaggccagcaccaccgtggacatcaacacccaggtggagaaggaggtgcccccaggcagcgccatcatccacatcaagaagcaccaggtgtctgtggagggcaccaaccagacagatgtgaaggctgtgggcggccctgccaagctgctggtggtgtccctggaggaggcctggcccctgcacggggactgtgaaacagatgctgaggagggcaccagcctgacagcctctgtggtggctgatgtgaggaagagccagctgcctgcagaaggagatgctggagctgagtgggccgctgctgtgctgaagcaggagcgggcccacgaggtgggcgcccagggcggcccccctgtggcccaggtggagcaggacctgcccatcagccgggagaacctgacagacctggtggtggacacagacaccctgggggagagcacccagccccagcgggagggcgcccaggtgcccaccggccgggagcgggagcagcacgtgggcggcaccaaggacagcgaggacaactacggggacagcgaggacctggacctgcaggccacccagtgcttcctggagaaccagggcctggaggtgcagagcatggaggatgagcccacccaggccttcatgctgaccccaccccaggagctgggccccagccactgcagcttccagaccaccggcctgctgaactgcaagatgcctcctgctgagaaggccagccgcatccgggctgctgagaaggtgtccagaggagaccaggagagcccagatgcctgcctgccccccaccgtgcctgaggccccagccccaccccagaagcccctgaacagccagagccagaagcacctggcccccccacccctgctgagccccctgctgcccagcatcaagcccaccgtgaggaagacccggcaggacggcagccaggaggcccctgaggcccccctgagcagcgagctggagcccttccaccccaagcccaagatccgcaccaggaagagcagcaggatgacccccttccctgccaccagcgctgcccctgagccccaccccagcaccagcacagcccagcctgtgacccccaagcccaccagccaggccaccaggagcaggaccaacagaagctctgtgaagaccccagagcctgtggtgcccacagcccctgagctgcagcccagcaccagcacagaccagcctgtgaccagcgagcccaccagccaggtgacccggggcaggaagagccgcagctctgtgaagaccccagagaccgtggtgcccacagccctggagctgcagcccagcaccagcacagacaggcctgtgaccagcgagcccaccagccaggccacccggggcaggaagaacagaagctctgtgaagaccccagagcctgtggtgcccacagcccctgagctgcagcccagcaccagcacagaccagcctgtgaccagcgagcccacctaccaggccacccggggcaggaagaacagaagctctgtgaagaccccagagcctgtggtgcccacagcccctgagctgcggcccagcaccagcacagacaggcctgtgacccccaagcccaccagcaggaccaccaggagcaggaccaacatgagctctgtgaagaaccctgagagcacagtgcccatcgcccctgagctgccccccagcaccagcacagagcagcctgtgaccccagagcccaccagccgggccacccggggcaggaagaacagaagcagcggcaagaccccagagaccctggtgcccacagcccccaagctggagcccagcaccagcacagaccagcctgtgaccccagagcccaccagccaggccacccggggccgcaccaacagaagctctgtgaagaccccagagaccgtggtgcccacagcccctgagctgcagcccagcaccagcacagaccagcctgtgaccccagagcccaccagccaggccacccggggccgcacagacaggagctctgtgaagaccccagagaccgtggtgcccacagcccctgagctgcaggccagcgccagcacagaccagcctgtgaccagcgagcccaccagcaggaccacccggggcaggaagaacagaagctctgtgaagaccccagagaccgtggtgcctgctgccccagccctgcagcccagcaccagcacagaccagcctgtgaccccagagcccaccagccgggccacccggggccgcaccaacagaagctctgtgaagaccccagagagcatcgtgcccatcgcccctgagctgcagcccagcaccagcaggaaccagctggtgaccccagagcccaccagccgggccacccgctgcaggaccaacagaagctctgtgaagaccccagagcctgtggtgcccacagcccctgagccccaccccaccaccagcacagaccagcctgtgacccccaagctgaccagccgggccaccaggaggaagaccaacagaagctctgtgaagacccccaagcctgtggagcctgctgccagtgacctggagcccttcacccccacagaccagagcgtgaccccagaggccatcgcccagggcggccagagcaagaccctgcggagcagcacagtgcgggccatgcctgtgcccaccaccccagagttccagagccctgtgaccacagaccagcccatcagccctgagcccatcacccagcccagctgcatcaagaggcagagagctgctggcaaccctggcagcctggccgcccccatcgaccacaagccctgcagcgcccccctggagcccaagagccaggccagcaggaaccagcgctggggcgctgtgcgggctgctgagagcctgacagccatccctgagcccgccagcccccagctgctggagacccccatccacgccagccagatccagaaggtggagcccgccggccgcagccgcttcaccccagagctgcagcccaaggccagccagagcaggaagaggagcctggccaccatggacagccccccccaccagaagcagccccagagaggagaggtgtcccagaagacagtcatcatcaaggaggaggaggaggacacagctgagaagccaggcaaggaggaggatgtggtgacccccaagccaggcaagaggaagagggaccaggccgaggaggagcccaaccgcatccccagccgcagcctgcggaggaccaagctgaaccaggagagcacagcccccaaggtgctcttcaccggggtggtggatgcccggggggagagagctgtgctggccctgggcggcagcctggccggcagcgctgctgaggccagccacctggtgacagaccgcatccggaggacagtgaagttcctgtgtgccctgggccggggcatccccatcctgagcctggactggctgcaccagagcaggaaggccggcttcttcctgcccccagatgaatatgtggtgacagatcctgagcaggagaagaactttggcttcagcctgcaggatgccctgagccgggcccgggagcggcggctgctggagggctatgagatctacgtgaccccaggagtgcagcccccaccaccccagatgggagagatcatcagctgctgcggcggcacctacctgcccagcatgcccaggagctacaagccccagagggtggtgatcacctgcccccaggacttcccccactgcagcatccccctgcgggtgggcctgcccctgctgagccctgagttcctgctgactggagtgctgaagcaggaggccaagccagaggcctttgtgctgagccccctggagatgagcagcacctag

SEQ ID NO: 285699 - DNA, 5648 bp, Artificial Sequence
  derived and/or modified sequence
ccacggctccccgggagccatcttggttcccccagaaggcgggaggggcgtaccttgggtgcgactgggcggaggtgacttggaagttcgcttctcggactgtaatactcatccttacctggcgccccgctccgagtttagatcatggaggacacccaggctattgactgggatgttgaagaagaggaggagacagagcaatccagtgaatccttgaggtgtaacgtggagccagtagggcggctacatatctttagtggtgcccatggaccagaaaaagatttcccactacacctcgggaagaatgtggtaggccgaatgcctgactgctctgtggccctgccctttccatctatctccaaacaacatgcagagattgaaatcttagcctgggacaaggcacctatcctccgagactgtgggagccttaatgtaccatcgcctggatgtctctctgccctttgtctcccggggccctctgacagtagaagagacacccagagtacagggagaaactcaaccccagaggcttctgttggctgaggactcggaggaggaagtagattttctttctgaaaggcgtatggtaaaaaaatcaaggaccacatcttcctctgtgatagttccagagagtgatgaagaggggcattccccggtcctgggcggccttgggccgccttttgccttcaatttgaacagtgacacagatgtggaagaaggtcagcaaccagccacagaggaggcctcctcagctgccagaagaggtgccactgtagaggcaaagcagtctgaagctgaagttgtaactgaaatccagcttgaaaaggatcagcctttagtgaaggagagggacaatgatacaaaagtcaagaggggtgcagggaatggggtggttccagctggggtgattctggagaggagccaacctcctggagaggacagtgacacagatgtggatgatgacagcaggcctcctggaaggccagctgaggtccatttggaaagggctcagccttttggcttcatcgacagcgacactgatgcggaagaagagaggatcccagcaaccccagttgtcattcctatgaagaagaggaagatcttccatggagtaggtacaaggggtcctggagcaccaggcctggcccatctgcaggagagccaggctggtagtgatacagatgtggaagaaggcaaggccccacaggctgtccctctggagaaaagccaagcttccatggttatcaacagcgatacagatgacgaggaagaagtctcagcagcgctgactttggcacatctgaaagagagccagcctgctatatggaacagagatgcagaagaggacatgccccaacgtgtggtccttctgcagcgaagccaaaccaccactgagagagacagtgacacagacgtggaggaggaagagctcccagtggaaaatagagaagctgtcctcaaggatcacacaaagattagagcccttgttagagcacattcagaaaaggaccaacctccttttggggacagtgatgacagtgtggaagcagataagagctcacctgggatccacctggagagaagccaagcctccaccacagtggacatcaacacacaagtggagaaggaagtcccgccagggtcagccattatacatataaagaagcatcaggtgtctgtggaggggacaaatcaaacagatgtgaaagcagttgggggaccagcaaagctgcttgtggtatctctagaggaagcctggcctctgcatggggactgtgaaacagatgcagaggagggcacctccctaacagcctcagtagttgcagatgtaagaaagagccagcttccagcagaaggggatgctggggcagagtgggctgcagctgttcttaagcaggagagagctcatgaggtgggggcccagggtgggccacctgtggcacaagtggagcaggacctccctatctcaagagagaacctcacagatctggtggtggacacagacactctaggggaatccacccagccacagagagagggagcccaggtccccacaggaagggagagagaacaacatgtgggtgggaccaaggactctgaagacaactatggtgattctgaagatctggacctacaagctacccagtgctttctggagaatcagggcctggaagtccagagcatggaggatgaacctacccaggccttcatgttgactccaccccaagagcttggcccttcccattgcagcttccagacaacaggcctcctgaattgcaagatgccacctgctgagaaggcttccaggatcagagctgctgagaaggtttccaggggcgatcaggaatctccagatgcttgtctgcctcctacagtacctgaagccccagccccaccccaaaagccccttaactctcagagccagaaacatcttgcacctccgccccttctttctccccttttaccttctatcaagccaaccgttcgtaagaccaggcaagatgggagtcaggaagctccagaggctcccttgtcctcagagctggagcctttccacccaaagcctaaaattagaactcggaagtcctccagaatgacaccctttccagctacctctgctgcccctgagccccacccttccacctccacagcccagccagtcactcccaagcccacatctcaggccactaggagcaggacaaataggtcctctgtcaagacccctgaaccagttgtccccacagcccctgagctccagccttccacctccacagaccagcctgtcacctctgagcccacatctcaggttactaggggaagaaaaagtagatcctctgtcaagacccctgaaacagttgtgcccacagcccttgagctccagccttccacctccaccgaccgacctgtcacctctgaacccacctctcaggctactaggggaagaaaaaatagatcctctgtcaagacccctgaaccagttgtccccacagcccctgagctccagccttccacctccacagaccagcctgtcacttctgagcccacatatcaggctactaggggaagaaaaaatagatcctctgtcaagacccctgaaccagttgtgcccacagcccctgagctccggccttccacctccacagaccgacctgtcacccctaagcccacatctcggaccactaggagcaggacaaatatgtcctctgtgaagaaccctgaatcaactgtccctatagcccctgagctcccaccttccacctccacagagcagcctgtcacccctgagcccacatctcgggctactaggggaagaaaaaatagatcctctggcaagacccctgaaacacttgtccccacagcccctaagctcgagccttccacttccacagaccaacctgtcactcctgagcccacatctcaggccaccaggggcaggacaaataggtcctctgtgaagacccctgaaacagttgtccccacagcccctgagctccagccttccacctccacagaccagcctgttacccctgagcctacgtctcaggctactaggggaagaacagatagatcctctgtcaagactcctgaaacagttgtccccacagcccctgagctacaggcttccgcctccacagaccagcctgtcacctctgagcccacatctcggaccactaggggaagaaaaaatcggtcctctgtcaagacccctgaaacagttgtgcccgcagcccctgcgctccagccttccacctccacagaccaacctgtcacccctgagcccacatctcgggccactaggggcaggacaaataggtcctctgtcaagacccctgaatcaattgtccctatagcccctgagcttcagccttccacctccagaaaccagcttgtcacccctgagcccacatctcgggccactaggtgcaggacaaataggtcctctgtcaagacccctgagccagttgtccccacagcccctgagccccatcctaccacctccacagaccagcctgtcacccccaagctcacatctagggccactaggagaaagacaaataggtcctctgtcaagactcccaaaccagttgaaccagcagcctctgatcttgagccttttacccccacagaccagtccgtcacccctgaggccatagctcagggtggtcagagcaaaacactgaggtcttccacagtaagagctatgccggttcctaccacccctgaattccaatctcctgtcaccacagaccagcctatttcccctgagcctattactcaacccagttgcatcaagaggcagagagccgctgggaaccctggctccctcgcagctcccattgaccataagccttgctctgcacccttggaacctaaatcccaggcctcaaggaaccaaagatggggagcagtgagagcagctgaatcccttacagccattcctgagcctgcctctccccagcttcttgagacaccaattcatgcctcccagatccaaaaggtggaaccagcaggtagatctaggttcaccccggagctccagcctaaggcctctcaaagccgcaagaggtctttagctaccatggattcaccaccacatcaaaaacagccccaaagaggggaagtctcccagaagacagtgattatcaaggaagaggaagaagatactgcagagaagccagggaaggaagaggatgtcgtgactccaaaaccaggcaagagaaagagagaccaggcagaggaggagcccaacagaataccaagccgcagcctccgacggaccaaacttaaccaagaatcaacagcccccaaagtgctcttcacaggagtggtggatgctcggggagagcgggctgtgctggcactggggggaagtctggctggttcagcggcagaggcttcccacctggtcactgatcgcatccgccggacagtcaagttcctgtgtgccctggggcggggaatccccattctgtccctggactggctgcatcagtcccgcaaggctggtttcttcttacccccggatgaatatgtggtgaccgaccctgagcaagagaagaactttggctttagccttcaagacgcactgagcagggctcgggagcgaaggctgctagagggctatgagatctatgtgacccctggagtccagccaccaccacctcagatgggagagattattagctgctgtggaggcacatacctacccagcatgcctcggtcctataagcctcagagagttgtgatcacatgccctcaggacttccctcattgctccattccactacgggttgggctgcccctcctctcgcctgagttcctgctgactggagtgctgaagcaggaagccaagccagaggcctttgtcctctcccctttggagatgtcatccacctgagaactccactacccttttccctcccagaccacgaattagaagatatgtggaagaaagaactcagggcgttagaaaggattggggtatattgatacaacttgtcctggaacatgggtgggaccagaaatctttatgaataaatgaaaagataagggatttggaagccacaggttgttttttgtttgtttgtttgtttttttaatggccattttattttatttgtatttatagttttttatttgtatagatt

SEQ ID NO: 285700 - DNA, 3751 bp, Artificial Sequence
  derived and/or modified sequence
caccatgtctaggaggaccgaggaaaggcgctctggccttaccagacacgtcggacgtctatgacacagcccctctatccgttgccggcagctggcgccagactctctggtcgcggtttggaactgcgcgggaagtgggtggtgggcgggcaagcggtagtgggttgtcccttggagctgcccaatcgacgtgcattattctgttggcgcacggcggccttcaattaccgtctcattaactgatctcagcagcctgggagacaccacctatttgaactctaagggggcggggctttgggtgtgcctccgctcgactggctgcggttgtgaaagacagcggcagaagccaatcagcaaataagctctttttcggcacacgcagtcgctccacccgggtcgcgaccgttactggtggcgcgcgcggggacttaaagtagatcatggaggacacccaggctattgactgggatgttgaagaagaggaggagacagagcaatccagtgaatccttgaggtgtaacgtggagccagtagggcggctacatatctttagtggtgcccatggaccagaaaaagatttcccactacacctcgggaagaatgtggtaggccgaatgcctgactgctctgtggccctgccctttccatctatctccaaacaacatgcagagattgaaatcttagcctgggacaaggcacctatcctccgagactgtgggagccttaatggtactcaaatcctgagacctcctaaggttttgagccctggggtgagtcaccgtctgagggaccaggaattgattctctttgctgacttgctctgccagtaccatcgcctggatgtctctctgccctttgtctcccggggccctctgacagtagaagagacacccagagtacagggagaaactcaaccccagaggcttctgttggctgaggactcggaggaggaagtagattttctttctgaaaggcgtatggtaaaaaaatcaaggaccacatcttcctctgtgatagttccagagagtgatgaagaggggcattccccggtcctgggcggccttgggccgccttttgccttcaatttgaacagtgacacagatgtggaagaaggtcagcaaccagccacagaggaggcctcctcagctgccagaagaggtgccactgtagaggcaaagcagtctgaagctgaagttgtaactgaaatccagcttgaaaaggatcagcctttagtgaaggagagggacaatgatacaaaagtcaagaggggtgcagggaatggggtggttccagctggggtgattctggagaggagccaacctcctggagaggacagtgacacagatgtggatgatgacagcaggcctcctggaaggccagctgaggtccatttggaaagggctcagccttttggcttcatcgacagaccaacctgtcacccctaagcccacatctcggaccactaggagcaggacaaatatgtcctctgtgaagaaccctgaatcaactgtccctatagcccctgagctcccaccttccacctccacagagcagcctgtcacccctgagcccacatctcgggctactaggggaagaaaaaatagatcctctggcaagacccctgaaacacttgtccccacagcccctaagctcgagccttccacttccacagaccaacctgtcactcctgagcccacatctcaggccaccaggggcaggacaaataggtcctctgtgaagacccctgaaacagttgtccccacagcccctgagctccagccttccacctccacagaccagcctgttacccctgagcctacgtctcaggctactaggggaagaacagatagatcctctgtcaagactcctgaaacagttgtccccacagcccctgagctacaggcttccgcctccacagaccagcctgtcacctctgagcccacatctcggaccactaggggaagaaaaaatcggtcctctgtcaagacccctgaaacagttgtgcccgcagcccctgcgctccagccttccacctccacagaccaacctgtcacccctgagcccacatctcgggccactaggggcaggacaaataggtcctctgtcaagacccctgaatcaattgtccctatagcccctgagcttcagccttccacctccagaaaccagcttgtcacccctgagcccacatctcgggccactaggtgcaggacaaataggtcctctgtcaagacccctgagccagttgtccccacagcccctgagccccatcctaccacctccacagaccagcctgtcacccccaagctcacatctagggccactaggagaaagacaaataggtcctctgtcaagactcccaaaccagttgaaccagcagcctctgatcttgagccttttacccccacagaccagtccgtcacccctgaggccatagctcagggtggtcagagcaaaacactgaggtcttccacagtaagagctatgccggttcctaccacccctgaattccaatctcctgtcaccacagaccagcctatttcccctgagcctattactcaacccagttgcatcaagaggcagagagccgctgggaaccctggctccctcgcagctcccattgaccataagccttgctctgcacccttggaacctaaatcccaggcctcaaggaaccaaagatggggagcagtgagagcagctgaatcccttacagccattcctgagcctgcctctccccagcttcttgagacaccaattcatgcctcccagatccaaaaggtggaaccagcaggtagatctaggttcaccccggagctccagcctaaggcctctcaaagccgcaagaggtctttagctaccatggattcaccaccacatcaaaaacagccccaaagaggggaagtctcccagaagacagtgattatcaaggaagaggaagaagatactgcagagaagccagggaaggaagaggatgtcgtgactccaaaaccaggcaagagaaagagagaccaggcagaggaggagcccaacagaataccaagccgcagcctccgacggaccaaacttaaccaagaatcaacagcccccaaagtgctcttcacaggagtggtggatgctcggggagagcgggctgtgctggcactggggggaagtctggctggttcagcggcagaggcttcccacctggtcactgatcgcatccgccggacagtcaagttcctgtgtgccctggggcggggaatccccattctgtccctggactggctgcatcagtcccgcaaggctggtttcttcttacccccggatgaatatgtggtgaccgaccctgagcaagagaagaactttggctttagccttcaagacgcactgagcagggctcgggagcgaaggctgctagagggctatgagatctatgtgacccctggagtccagccaccaccacctcagatgggagagattattagctgctgtggaggcacatacctacccagcatgcctcggtcctataagcctcagagagttgtgatcacatgccctcaggacttccctcattgctccattccactacgggttgggctgcccctcctctcgcctgagttcctgctgactggagtgctgaagcaggaagccaagccagaggcctttgtcctctcccctttggagatgtcatccacctgagaactccactacccttttccctcccagaccacgaattagaagatatgtggaagaaagaactcagggcgtt

SEQ ID NO: 285701 - DNA, 4968 bp, Artificial Sequence
  derived and/or modified sequence
atgtaccaccggctggacgtgagcctgcccttcgtgagccggggcccgttgaccgtcgaggagacaccgcgggttcagggtgagactcagccacaacggctgttgctggccgaggattccgaagaagaggtagattttttgtcagaacgaaggatggtaaagaaatccagaaccacaagttcctctgtcatcgtgccagagagcgatgaggaaggccactcgccagtgctaggaggtctgggcccgccgtttgccttcaacctcaattctgacacagatgtggaggagggccaacagccagccaccgaggaggcttcgagcgcagctcgcaggggcgctaccgtagaagcgaaacagtccgaggcagaggtagttaccgaaatacagctggagaaggaccaacctttggtaaaagaacgtgacaacgacactaaggtgaagaggggcgctggaaatggggtcgtgccggccggcgtcattctggagaggtcccagccccctggcgaggattccgacaccgatgtggatgacgacagtcggccgcctgggaggccagcagaggtccatctggaaagagcccagcctttcggcttcatcgacagtgacaccgacgccgaagaggaacggatccctgctactcccgtggtgatcccgatgaagaaaagaaaaatctttcacggggtcggaacacgaggtccaggtgcacctggcttagcacacctccaagagtcacaggcgggcagtgacacagatgttgaagaaggcaaagcacctcaggcggtgccgctagagaagagtcaggccagtatggtcattaactccgataccgacgacgaggaagaggtttcagcggccctgacactcgctcacctaaaagagtcgcagccggccatctggaaccgggatgctgaagaagatatgccacaaagagtggttctgttgcagaggtcgcaaacgaccacagaacgtgattctgacaccgatgtcgaagaagaagagctgcccgtggagaatcgggaggctgtgctaaaagaccatacgaagatccgagcactcgttcgagcacactccgaaaaggaccaaccccctttcggtgattccgatgatagtgtcgaggctgacaaaagctcacctggcattcatctggaacgctcacaagcatccactaccgtcgacatcaatactcaagtggagaaagaggtaccacctggttccgccattatccatatcaaaaagcaccaggtctccgtcgaggggaccaaccagacagacgtgaaggctgtgggcggacccgctaaactgttagtcgtgagtctcgaggaagcctggcctctccacggcgattgcgagactgacgccgaagagggtacctcactaacagccagcgtagtggccgatgtgcgaaagagccaactgcccgccgagggggatgctggtgccgagtgggcggcagccgtgttgaagcaggagagggctcacgaggtaggtgctcagggaggcccgccagtggcccaagtggaacaggatctcccaattagcagagaaaacctaacagacctggtggtagataccgataccttgggtgaaagtactcagcctcagcgggagggggctcaggttcctactggacgggaacgggagcagcacgtcggtggtactaaagacagtgaggacaactacggagacagtgaggatctagacctacaggcaacgcagtgcttcctcgaaaatcaaggtttagaggtgcaaagtatggaagatgagcccacgcaagccttcatgctaactccaccacaggaactgggtccctctcattgcagtttccagacaactggcctcctcaattgtaaaatgccaccagctgagaaggcttctcggatccgtgccgctgagaaggtgtcccgcggcgatcaggaatcacctgatgcatgcctccctcctacggtgccagaagctccagcacctcctcagaagcctttgaactcgcaaagtcagaagcacctggcccccccacctctgctttctccactgctgccctcaataaaaccgacagtgcgcaaaacccggcaggatggaagccaggaggcccctgaagcccccctgtcatccgagctcgaaccttttcatcccaagccgaaaatccgaacccggaaatccagtagaatgactccatttcctgctacaagcgcagccccagaaccacaccccagcactagcacagcccaaccggtcactcctaagcccacctctcaggctacacgaagcaggaccaacagatcttctgttaaaaccccagagcccgtcgtgcctactgcccccgagctgcagccttcaacaagcaccgaccaaccagttactagtgaacccacctcccaggttacgaggggacgaaagtctcgctcatcagttaaaactcccgagaccgtggttcctaccgctctagagctgcaacccagcacaagcactgacagaccagtgacatcggagccaaccagtcaagctacccggggcaggaagaacaggtcttccgtgaagactccagagcccgtagttcctaccgctccagagcttcagccttctaccagcaccgatcagccagtgacctcggaaccgacgtaccaggccacacggggccgaaagaatcgcagttcggtgaaaacgccggagcctgtagtgccaactgccccagagctcaggccctctaccagcaccgaccgtcccgtcactccaaagccaacctcccgaacaacccggtccaggacaaacatgagctcagtaaaaaatccggaatccactgtgcccatcgcacctgagctgccgccgtctacatccactgaacagcctgtgactccagagcctacgtccagggcaacaagagggagaaaaaatagaagctcaggaaaaacaccggaaaccctggtgccaactgcgcccaagcttgagccaagtacgtcaaccgatcagccggtgactcccgagccaacctcccaggctacccgcggtagaaccaatcgttcatcagtgaagacgcccgaaacagtagtgcctactgcccctgagttgcaaccatcaacgtcaactgaccaacctgtcacccccgagccaacatcccaggcgacgcgagggcggacggaccgatctagtgtgaaaacccctgagaccgtggtccctacggcgccagaacttcaggcatctgcctcaactgatcaacccgtgactagtgaaccaacgtctagaaccactcgcggcagaaagaaccggtcctccgtgaaaactccggagacggtcgtaccagccgcacccgctttacaaccctcaacaagtactgatcagcctgtgacacccgagcccacttccagggctactagaggtcggactaatcgctccagtgtaaagacgcccgagtctattgtgcccatcgctccagagctccaaccgagtacttcccgaaaccagctggtaacccctgaacccaccagcagagccaccaggtgtagaactaatagatccagtgtgaaaacccccgagcccgtggtgcccactgcgccggagcctcacccaactacatctacggatcagccagtcacccctaaactcacttcacgcgccacccgcagaaagacgaacagaagttcagtgaaaacacctaagcccgtggagcccgccgccagcgacctcgagcccttcactcctaccgaccagagcgtaaccccggaagcaatcgcccaaggtggccagtcaaaaactctccgctcatccaccgtccgcgctatgcctgtacccaccaccccagagtttcagtctcccgtgacaaccgaccagccaatcagtcccgagccaattacgcaaccaagctgtataaagagacagcgggcggccggcaatcctggctccctcgccgcgcctatcgatcacaaaccttgctcggcccccctggaaccaaaatcccaagcctcacgaaatcagcggtggggcgccgtgagggctgctgaaagcctgacggccatacccgagccggcatccccacagttgctggaaacccctatacatgcctcacagatccaaaaggtagagcccgccggtagaagtcggttcaccccagaactgcagcccaaggcctcccagagccggaaacgatctttggctacaatggactctccccctcatcagaagcaacctcagaggggcgaagtctcacaaaagacagtcattataaaggaagaggaggaggataccgcggaaaagcctggcaaggaagaggacgtagtgacgcctaaacccggcaaaagaaaaagagatcaagccgaggaagaacccaaccggatcccctctcgctcattacgcaggacgaagctcaatcaagagtctacagcacctaaggtgctgttcactggagtggtggacgcacgcggggaacgggccgtcctggctttgggggggagcctggccggaagtgccgcggaagcaagccacctggtaaccgaccgtattagacggactgtgaagttcctctgtgctctgggacgggggattcctattctgtctctcgactggttgcaccagagtcggaaggccggcttcttcttgccccccgacgaatatgtggtgaccgaccccgagcaagagaaaaattttggttttagcttacaagacgccctctcccgtgcccgggaacgaagactccttgaagggtacgagatctacgtgacacccggcgttcagccgccacctcctcagatgggtgagattattagctgctgtggcggaacctacctgccttcaatgccgcgatcatataagccccagagggtggtgatcacctgcccccaagatttcccgcattgttctatacccctgagggtgggcctgccgctgctctcaccagagtttctcttgacaggcgtactgaagcaggaggcaaagccagaagcctttgtattgagccccctggagatgagctccacatag

SEQ ID NO: 285702 - DNA, 4968 bp, Artificial Sequence
  derived and/or modified sequence
atgtatcatcgactggatgtgagccttccattcgtgtcccgcggaccgctgactgtcgaagagactccaagagtgcaaggtgagactcagccgcagaggcttcttcttgcggaggacagcgaggaagaggtcgactttctgtcagagaggcggatggtgaaaaagtcccggacaacatcctcatcagtcatcgtccccgaaagtgatgaggaagggcactcacctgtccttggtgggctaggacctcccttcgcttttaatctgaattcggacactgatgtggaggagggccagcagcctgcaacggaagaagcaagcagcgccgctaggcggggagctacggtggaggccaagcagtcagaggccgaggtggtgactgaaatacaattggagaaagaccagcctctggttaaggagagagacaacgacactaaagtgaaacgcggagctggaaacggagttgtccccgctggcgtgattctggaacgttcacagccacccggagaagatagcgacaccgacgttgatgatgacagtagacctcccggacgtccggcagaggtgcatctggaaagagcgcagcctttcggcttcatcgatagtgacactgacgcagaggaggaacggattccagctacgcccgtagtcatccctatgaagaagcgcaaaatttttcacggggtaggtacacgaggcccaggcgcaccaggattagcccatctccaggagtcccaggccggttccgatacagatgtggaagaaggcaaagccccacaggctgtgccactggaaaagagccaggcttccatggtgatcaactctgacacggacgatgaggaggaagtgtctgcagcattaaccctagcccatctgaaggagtcacagccagctatttggaaccgggatgccgaggaagacatgccccaacgggttgtgttgctccagcggtctcagacaacaaccgaacgggattccgacactgacgtagaagaggaagagctgccggtggagaatagggaagccgttctgaaggatcatactaaaattcgcgctctggtgcgggctcactccgaaaaagaccagcccccttttggggattctgatgattctgtggaagctgataagtccagcccaggcattcaccttgagagaagccaggcaagtaccactgtggatatcaacacacaagtggaaaaggaagtgccccctgggtccgctattatacatattaaaaaacaccaagtgtctgtagagggaactaatcaaaccgacgtcaaggcggtcggtggcccagccaaactcctcgttgtcagcctcgaggaagcctggcctttgcacggcgattgcgagacggacgccgaggaggggacgagtctgacagcatccgtggtcgcagacgtgcgaaagtctcagcttcctgccgaaggcgatgcgggagccgagtgggcggctgctgttttaaaacaagaaagagctcatgaggtgggcgctcaggggggaccaccagtggcccaggtggaacaggatctgccgatcagccgtgagaaccttaccgacctggtggttgacaccgatacactaggagaatcaacccagccacagcgtgagggggcacaggtacccactggtagggagcgggaacagcacgtgggaggaactaaagactcagaagataattacggtgacagcgaggacttggaccttcaggcaactcagtgcttcttagaaaaccaggggctggaggtccaatcgatggaagacgagcctacgcaggccttcatgctcactccccctcaggagctgggacccagtcattgttccttccagactactggcctattgaattgtaagatgcctcccgctgagaaggcgagtaggatccgggctgctgagaaggtgagtcgcggtgatcaggaaagcccggatgcctgcctgccaccgactgtcccagaagctccggctcccccacagaaaccactcaattctcagtcccagaagcatctcgctcccccaccccttctgagcccactcctgccctccattaaaccaacagtacgtaaaacaagacaggacggctcacaagaagcccctgaggcgccactgtcctccgagctagaaccttttcatccaaaacctaagattcgtacgagaaagtcttccagaatgaccccatttccagccaccagcgcagctcctgagccccatcccagtacctctacggcccagcctgtgacacccaagccgaccagccaagccacccgctctcgcaccaaccggtcatcagtgaaaaccccggagcccgtcgtgcccactgctcctgagctccagccctctacttccacagatcagccagtaacttctgagcctaccagtcaggtcacacggggacgcaaatccagaagctcagtcaagactccagagaccgtggtcccgacggctcttgaactccaaccatcaacttcaaccgataggccagttacatctgagcccacgtcacaagccacacggggtaggaagaaccggagctcagtcaaaacgcccgagccagtggtacctaccgctcctgagctccagcctagtacgtcgaccgatcagcctgtgacttctgaaccaacataccaggccacccgcggaagaaaaaatcgaagcagcgttaagaccccagagcctgtggtgcctactgccccagagctgagaccctccacttcaaccgatcggccagtgacccctaaaccaactagcagaacaaccaggagcaggaccaatatgagttcggtgaaaaaccctgaatccaccgtacctatcgcacccgagctccccccttcaacgtcaacagagcaaccagtgacccccgaacctaccagccgggctacaagggggagaaagaatagaagctcgggaaagacccccgagaccctggtaccaaccgcgcctaagctggagcctagtacaagcactgatcagcccgtcacaccagaacctaccagccaagccactagaggccgaacaaatcgcagctccgtgaagacccccgagaccgtggtcccaactgctccagagttgcagccctccactagcaccgatcagccagttacccccgaacctacttcccaggccacccgagggcgaacagaccggtctagtgtaaaaacaccagaaacagtagtgcctaccgctccggaattacaggcctctgcttccacagatcagccagtgacctccgagccaaccagccgtactacaaggggacgaaagaaccggtctagtgtgaagactccggagacagtggtgcctgcagcgccagctctccaaccatctacatccaccgaccagccggtgacgcccgaaccgacctcaagggccacacggggaagaacaaacaggagctccgtcaaaactccagaaagcatcgtacccattgctcctgagctacagccctctacgtcaagaaaccagcttgtgactcctgagccaacctcccgcgcaacaaggtgcagaacaaatcgatcaagtgtgaagacgcccgaaccagtggtgcctactgctcctgagccccatcccacaacatctaccgaccagccggttactcctaagctgacttcacgcgcaaccaggcggaagacgaatcggtcaagcgtaaaaacccctaaacctgtggaaccagcagcgagtgacctggagcccttcacccctaccgatcagtccgtgacaccagaagccattgctcagggtggccagtctaaaaccttgagatcttccaccgtccgggctatgccggtgccgactaccccggaatttcaatcccctgtcacaacagatcaaccgatttcacccgaacctataactcagccctcctgcatcaagaggcagagggctgcaggcaatcccggtagccttgctgcacccatcgatcataaaccatgctctgctccgctggaaccgaaatctcaggcctctcggaaccagcggtggggcgctgtgcgcgcagctgagtctctgactgctattccagagccggcttcaccgcagctcctggagacaccaatccacgcctcccagattcagaaggtcgaaccggctggacgctccaggttcacccctgagctgcagcctaaggcctcacaaagtcggaagaggagcctggccactatggacagccctcctcatcagaagcagcctcagaggggcgaagtgtctcagaagaccgtgattatcaaagaggaggaagaggatacggccgagaaacccggaaaggaagaggatgtcgtcacacccaagcctgggaaacggaagcgcgaccaggccgaagaggagcccaataggattcccagccgatcacttcgcaggacgaagctgaatcaggagagtactgctccgaaagtgttgttcacgggcgtggtcgatgcgcgaggcgaacgggctgtcctggcactcgggggtagtctggccggtagtgctgccgaggcctctcacctggtgaccgatcgaatacggagaaccgttaaatttctgtgtgccctgggcagaggaattcccatactatctctcgactggttgcaccagagccgcaaagccggtttcttcctgcctcccgacgagtatgtcgtcacagatcccgaacaggaaaagaattttgggttcagcttgcaggacgcactcagcagggccagggagagacggctgctggagggctatgagatttatgtgactcccggagtccagcccccaccgccacagatgggcgaaatcatttcctgttgcggtggtacatatttacccagcatgcctcggtcttataaacctcaacgagtggttataacctgcccccaggattttccccactgcagcatccccctgcgggtcggcctcccactcctgtccccggaattcctgctcaccggcgttcttaagcaggaggcaaagccagaggccttcgtgctttctcctctggagatgagctcaacatag

SEQ ID NO: 285703 - DNA, 4968 bp, Artificial Sequence
  derived and/or modified sequence
atgtaccacagactggacgtgagcctgcccttcgtgagcagaggccccctgaccgtggaggagacccccagagtgcagggcgagacccagccccagagactgctgctggccgaggacagcgaggaggaggtggacttcctgagcgagagaagaatggtgaagaagagcagaaccaccagcagcagcgtgatcgtgcccgagagcgacgaggagggccacagccccgtgctgggcggcctgggcccccccttcgccttcaacctgaacagcgacaccgacgtggaggagggccagcagcccgccaccgaggaggccagcagcgccgccagaagaggcgccaccgtggaggccaagcagagcgaggccgaggtggtgaccgagatccagctggagaaggaccagcccctggtgaaggagagagacaacgacaccaaggtgaagagaggcgccggcaacggcgtggtgcccgccggcgtgatcctggagagaagccagccccccggcgaggacagcgacaccgacgtggacgacgacagcagaccccccggcagacccgccgaggtgcacctggagagagcccagcccttcggcttcatcgacagcgacaccgacgccgaggaggagagaatccccgccacccccgtggtgatccccatgaagaagagaaagatcttccacggcgtgggcaccagaggccccggcgcccccggcctggcccacctgcaggagagccaggccggcagcgacaccgacgtggaggagggcaaggccccccaggccgtgcccctggagaagagccaggccagcatggtgatcaacagcgacaccgacgacgaggaggaggtgagcgccgccctgaccctggcccacctgaaggagagccagcccgccatctggaacagagacgccgaggaggacatgccccagagagtggtgctgctgcagagaagccagaccaccaccgagagagacagcgacaccgacgtggaggaggaggagctgcccgtggagaacagagaggccgtgctgaaggaccacaccaagatcagagccctggtgagagcccacagcgagaaggaccagccccccttcggcgacagcgacgacagcgtggaggccgacaagagcagccccggcatccacctggagagaagccaggccagcaccaccgtggacatcaacacccaggtggagaaggaggtgccccccggcagcgccatcatccacatcaagaagcaccaggtgagcgtggagggcaccaaccagaccgacgtgaaggccgtgggcggccccgccaagctgctggtggtgagcctggaggaggcctggcccctgcacggcgactgcgagaccgacgccgaggagggcaccagcctgaccgccagcgtggtggccgacgtgagaaagagccagctgcccgccgagggcgacgccggcgccgagtgggccgccgccgtgctgaagcaggagagagcccacgaggtgggcgcccagggcggcccccccgtggcccaggtggagcaggacctgcccatcagcagagagaacctgaccgacctggtggtggacaccgacaccctgggcgagagcacccagccccagagagagggcgcccaggtgcccaccggcagagagagagagcagcacgtgggcggcaccaaggacagcgaggacaactacggcgacagcgaggacctggacctgcaggccacccagtgcttcctggagaaccagggcctggaggtgcagagcatggaggacgagcccacccaggccttcatgctgacccccccccaggagctgggccccagccactgcagcttccagaccaccggcctgctgaactgcaagatgccccccgccgagaaggccagcagaatcagagccgccgagaaggtgagcagaggcgaccaggagagccccgacgcctgcctgccccccaccgtgcccgaggcccccgcccccccccagaagcccctgaacagccagagccagaagcacctggcccccccccccctgctgagccccctgctgcccagcatcaagcccaccgtgagaaagaccagacaggacggcagccaggaggcccccgaggcccccctgagcagcgagctggagcccttccaccccaagcccaagatcagaaccagaaagagcagcagaatgacccccttccccgccaccagcgccgcccccgagccccaccccagcaccagcaccgcccagcccgtgacccccaagcccaccagccaggccaccagaagcagaaccaacagaagcagcgtgaagacccccgagcccgtggtgcccaccgcccccgagctgcagcccagcaccagcaccgaccagcccgtgaccagcgagcccaccagccaggtgaccagaggcagaaagagcagaagcagcgtgaagacccccgagaccgtggtgcccaccgccctggagctgcagcccagcaccagcaccgacagacccgtgaccagcgagcccaccagccaggccaccagaggcagaaagaacagaagcagcgtgaagacccccgagcccgtggtgcccaccgcccccgagctgcagcccagcaccagcaccgaccagcccgtgaccagcgagcccacctaccaggccaccagaggcagaaagaacagaagcagcgtgaagacccccgagcccgtggtgcccaccgcccccgagctgagacccagcaccagcaccgacagacccgtgacccccaagcccaccagcagaaccaccagaagcagaaccaacatgagcagcgtgaagaaccccgagagcaccgtgcccatcgcccccgagctgccccccagcaccagcaccgagcagcccgtgacccccgagcccaccagcagagccaccagaggcagaaagaacagaagcagcggcaagacccccgagaccctggtgcccaccgcccccaagctggagcccagcaccagcaccgaccagcccgtgacccccgagcccaccagccaggccaccagaggcagaaccaacagaagcagcgtgaagacccccgagaccgtggtgcccaccgcccccgagctgcagcccagcaccagcaccgaccagcccgtgacccccgagcccaccagccaggccaccagaggcagaaccgacagaagcagcgtgaagacccccgagaccgtggtgcccaccgcccccgagctgcaggccagcgccagcaccgaccagcccgtgaccagcgagcccaccagcagaaccaccagaggcagaaagaacagaagcagcgtgaagacccccgagaccgtggtgcccgccgcccccgccctgcagcccagcaccagcaccgaccagcccgtgacccccgagcccaccagcagagccaccagaggcagaaccaacagaagcagcgtgaagacccccgagagcatcgtgcccatcgcccccgagctgcagcccagcaccagcagaaaccagctggtgacccccgagcccaccagcagagccaccagatgcagaaccaacagaagcagcgtgaagacccccgagcccgtggtgcccaccgcccccgagccccaccccaccaccagcaccgaccagcccgtgacccccaagctgaccagcagagccaccagaagaaagaccaacagaagcagcgtgaagacccccaagcccgtggagcccgccgccagcgacctggagcccttcacccccaccgaccagagcgtgacccccgaggccatcgcccagggcggccagagcaagaccctgagaagcagcaccgtgagagccatgcccgtgcccaccacccccgagttccagagccccgtgaccaccgaccagcccatcagccccgagcccatcacccagcccagctgcatcaagagacagagagccgccggcaaccccggcagcctggccgcccccatcgaccacaagccctgcagcgcccccctggagcccaagagccaggccagcagaaaccagagatggggcgccgtgagagccgccgagagcctgaccgccatccccgagcccgccagcccccagctgctggagacccccatccacgccagccagatccagaaggtggagcccgccggcagaagcagattcacccccgagctgcagcccaaggccagccagagcagaaagagaagcctggccaccatggacagccccccccaccagaagcagccccagagaggcgaggtgagccagaagaccgtgatcatcaaggaggaggaggaggacaccgccgagaagcccggcaaggaggaggacgtggtgacccccaagcccggcaagagaaagagagaccaggccgaggaggagcccaacagaatccccagcagaagcctgagaagaaccaagctgaaccaggagagcaccgcccccaaggtgctgttcaccggcgtggtggacgccagaggcgagagagccgtgctggccctgggcggcagcctggccggcagcgccgccgaggccagccacctggtgaccgacagaatcagaagaaccgtgaagttcctgtgcgccctgggcagaggcatccccatcctgagcctggactggctgcaccagagcagaaaggccggcttcttcctgccccccgacgagtacgtggtgaccgaccccgagcaggagaagaacttcggcttcagcctgcaggacgccctgagcagagccagagagagaagactgctggagggctacgagatctacgtgacccccggcgtgcagcccccccccccccagatgggcgagatcatcagctgctgcggcggcacctacctgcccagcatgcccagaagctacaagccccagagagtggtgatcacctgcccccaggacttcccccactgcagcatccccctgagagtgggcctgcccctgctgagccccgagttcctgctgaccggcgtgctgaagcaggaggccaagcccgaggccttcgtgctgagccccctggagatgagcagcacctag

SEQ ID NO: 285704 - protein, 1105 aa, Artificial Sequence
  derived and/or modified sequence
MAAMAPALTDAAAEAHHIRFKLAPPSSTLSPGSAENNGNANILIAANGTKRKAIAAEDPSLDFRNNPTKEDLGKLQPLVASYLCSDVTSVPSKESLKLQGVFSKQTVLKSHPLLSQSYELRAELLGRQPVLEFSLENLRTMNTSGQTALPQAPVNGLAKKLTKSSTHSDHDNSTSLNGGKRALTSSALHGGEMGGSESGDLKGGMTNCTLPHRSLDVEHTTLYSNNSTANKSSVNSMEQPALQGSSRLSPGTDSSSNLGGVKLEGKKSPLSSILFSALDSDTRITALLRRQADIESRARRLQKRLQVVQAKQVERHIQHQLGGFLEKTLSKLPNLESLRPRSQLMLTRKAEAALRKAASETTTSEGLSNFLKSNSISEELERFTASGIANLRCSEQAFDSDVTDSSSGGESDIEEEELTRADPEQRHVPLRRRSEWKWAADRAAIVSRWNWLQAHVSDLEYRIRQQTDIYKQIRANKGLIVLGEVPPPEHTTDLFLPLSSEVKTDHGTDKLIESVSQPLENHGAPIIGHISESLSTKSCGALRPVNGVINTLQPVLADHIPGDSSDAEEQLHKKQRLNLVSSSSDGTCVAARTRPVLSCKKRRLVRPNSIVPLSKKVHRNSTIRPGCDVNPSCALCGSGSINTMPPEIHYEAPLLERLSQLDSCVHPVLAFPDDVPTSLHFQSMLKSQWQNKPFDKIKPPKKLSLKHRAPMPGSLPDPARKDRHKLVSSFLTTAKLSHHQTRPDRTHRQHLDDVGAVPMVERVTAPKAERLLNPPPPVHDPNHSKMRLRDHSSERSEVLKHHTDMSSSSYLAATHHPPHSPLVRQLSTSSDSPAPASSSSQVTASTSQQPVRRRRGESSFDINNIVIPMSVAATTRVEKLQYKEILTPSWREVDLQSLKGSPDEENEEIEDLSDAAFAALHAKCEEMERARWLWTTSVPPQRRGSRSYRSSDGRTTPQLGSANPSTPQPASPDVSSSHSLSEYSHGQSPRSPISPELHSAPLTPVARDTPRHLASEDTRCSTPELGLDEQSVQPWERRTFPLAHSPQAECEDQLDAQERAARCTRRTSGSKTGRETEAAPTSPPTVPLKSRHLVAAATAQRPTHR

SEQ ID NO: 285705 - DNA, 3318 bp, Artificial Sequence
  derived and/or modified sequence
atggccgccatggcccccgccctgaccgacgccgccgccgaggcccaccacatcagattcaagctggccccccccagcagcaccctgagccccggcagcgccgagaacaacggcaacgccaacatcctgatcgccgccaacggcaccaagagaaaggccatcgccgccgaggaccccagcctggacttcagaaacaaccccaccaaggaggacctgggcaagctgcagcccctggtggccagctacctgtgcagcgacgtgaccagcgtgcccagcaaggagagcctgaagctgcagggcgtgttcagcaagcagaccgtgctgaagagccaccccctgctgagccagagctacgagctgagagccgagctgctgggcagacagcccgtgctggagttcagcctggagaacctgagaaccatgaacaccagcggccagaccgccctgccccaggcccccgtgaacggcctggccaagaagctgaccaagagcagcacccacagcgaccacgacaacagcaccagcctgaacggcggcaagagagccctgaccagcagcgccctgcacggcggcgagatgggcggcagcgagagcggcgacctgaagggcggcatgaccaactgcaccctgccccacagaagcctggacgtggagcacaccaccctgtacagcaacaacagcaccgccaacaagagcagcgtgaacagcatggagcagcccgccctgcagggcagcagcagactgagccccggcaccgacagcagcagcaacctgggcggcgtgaagctggagggcaagaagagccccctgagcagcatcctgttcagcgccctggacagcgacaccagaatcaccgccctgctgagaagacaggccgacatcgagagcagagccagaagactgcagaagagactgcaggtggtgcaggccaagcaggtggagagacacatccagcaccagctgggcggcttcctggagaagaccctgagcaagctgcccaacctggagagcctgagacccagaagccagctgatgctgaccagaaaggccgaggccgccctgagaaaggccgccagcgagaccaccaccagcgagggcctgagcaacttcctgaagagcaacagcatcagcgaggagctggagagattcaccgccagcggcatcgccaacctgagatgcagcgagcaggccttcgacagcgacgtgaccgacagcagcagcggcggcgagagcgacatcgaggaggaggagctgaccagagccgaccccgagcagagacacgtgcccctgagaagaagaagcgagtggaagtgggccgccgacagagccgccatcgtgagcagatggaactggctgcaggcccacgtgagcgacctggagtacagaatcagacagcagaccgacatctacaagcagatcagagccaacaagggcctgatcgtgctgggcgaggtgcccccccccgagcacaccaccgacctgttcctgcccctgagcagcgaggtgaagaccgaccacggcaccgacaagctgatcgagagcgtgagccagcccctggagaaccacggcgcccccatcatcggccacatcagcgagagcctgagcaccaagagctgcggcgccctgagacccgtgaacggcgtgatcaacaccctgcagcccgtgctggccgaccacatccccggcgacagcagcgacgccgaggagcagctgcacaagaagcagagactgaacctggtgagcagcagcagcgacggcacctgcgtggccgccagaaccagacccgtgctgagctgcaagaagagaagactggtgagacccaacagcatcgtgcccctgagcaagaaggtgcacagaaacagcaccatcagacccggctgcgacgtgaaccccagctgcgccctgtgcggcagcggcagcatcaacaccatgccccccgagatccactacgaggcccccctgctggagagactgagccagctggacagctgcgtgcaccccgtgctggccttccccgacgacgtgcccaccagcctgcacttccagagcatgctgaagagccagtggcagaacaagcccttcgacaagatcaagccccccaagaagctgagcctgaagcacagagcccccatgcccggcagcctgcccgaccccgccagaaaggacagacacaagctggtgagcagcttcctgaccaccgccaagctgagccaccaccagaccagacccgacagaacccacagacagcacctggacgacgtgggcgccgtgcccatggtggagagagtgaccgcccccaaggccgagagactgctgaacccccccccccccgtgcacgaccccaaccacagcaagatgagactgagagaccacagcagcgagagaagcgaggtgctgaagcaccacaccgacatgagcagcagcagctacctggccgccacccaccaccccccccacagccccctggtgagacagctgagcaccagcagcgacagccccgcccccgccagcagcagcagccaggtgaccgccagcaccagccagcagcccgtgagaagaagaagaggcgagagcagcttcgacatcaacaacatcgtgatccccatgagcgtggccgccaccaccagagtggagaagctgcagtacaaggagatcctgacccccagctggagagaggtggacctgcagagcctgaagggcagccccgacgaggagaacgaggagatcgaggacctgagcgacgccgccttcgccgccctgcacgccaagtgcgaggagatggagagagccagatggctgtggaccaccagcgtgcccccccagagaagaggcagcagaagctacagaagcagcgacggcagaaccaccccccagctgggcagcgccaaccccagcaccccccagcccgccagccccgacgtgagcagcagccacagcctgagcgagtacagccacggccagagccccagaagccccatcagccccgagctgcacagcgcccccctgacccccgtggccagagacacccccagacacctggccagcgaggacaccagatgcagcacccccgagctgggcctggacgagcagagcgtgcagccctgggagagaagaaccttccccctggcccacagcccccaggccgagtgcgaggaccagctggacgcccaggagagagccgccagatgcaccagaagaaccagcggcagcaagaccggcagagagaccgaggccgcccccaccagcccccccaccgtgcccctgaagagcagacacctggtggccgccgccaccgcccagagacccacccacagatag

SEQ ID NO: 285706 - DNA, 3318 bp, Artificial Sequence
  derived and/or modified sequence
atggcggccatggcccctgccctaacagatgctgccgccgaggcccatcatatccgcttcaagctggcaccaccatcaagcacgctttcaccaggaagcgctgagaataatggaaatgccaatatccttattgcagcaaacgggacaaaacggaaggccatcgctgctgaagatccttccctcgactttaggaacaaccccacgaaggaggacctgggtaaactgcagcctctagtggcctcctatctttgttcagacgtcacttctgtgcccagcaaagagtccctgaaactgcagggagttttcagcaaacagacagtgctcaagtcgcaccccctgctttctcagagttacgagctgagggcagagctcttaggtcgccaacctgtgctggagttttcactggagaatctcaggacaatgaatactagtggccagactgcactgccccaagccccagtgaatggcctcgcaaaaaagctaacgaaaagttccacccatagcgaccacgataattctaccagcttgaacggcgggaagcgggccctgacctccagtgcactccatgggggagagatgggcgggtcagaatctggagacttgaaaggaggcatgactaactgcaccttaccacataggtccttggatgtcgagcatactactctctacagtaacaactctaccgcaaataaatcaagcgtgaatagtatggaacaacccgccttgcaggggtcaagccggctgtctcccggcacagacagctcttcaaacttggggggcgtcaagctggagggtaaaaaatcacccctcagctctattctgttttctgctctggatagtgatacccggataaccgctctcttgcgccggcaggcggacattgaaagtcgggcccgacgattacaaaaaaggctgcaagtggttcaagctaaacaggtcgaacggcacatccagcatcaactgggtgggtttctcgaaaaaaccctgagcaaactgcctaatttagaatccttacgccctaggtctcagctcatgttaaccaggaaggcagaggccgctctgcggaaagccgcctctgagaccaccacctctgaggggctgtctaacttcctaaaatcaaattctatcagcgaggagctggagcggttcaccgcaagtggtatcgcaaatctcagatgctcagaacaagcatttgattccgatgtgacagacagctcttccggcggcgagagcgacatagaggaagaggagttgactcgagccgaccctgagcagcgccacgtccccctgagacgacggtctgagtggaaatgggcagccgaccgtgccgcgattgtgtcccgctggaactggcttcaagctcacgtctccgacctcgagtatcggataaggcagcaaactgacatatacaagcagattagggcgaataagggtctgatcgtgctcggagaagtgccccctcccgagcacaccactgatttatttctacctctgtccagtgaggtcaagactgatcacggtactgataagctcatagagtctgtgtctcagcccctcgaaaaccatggtgccccaattattgggcatatttcagaaagtctctctacaaagtcatgtggcgctttacgcccggttaatggcgtcatcaatacactgcagcccgtcctcgctgatcatatccccggggatagtagtgatgccgaggagcagctccacaaaaaacagcgcctcaatctggtgtctagttctagtgatggcacttgcgtggccgccaggacaagaccagtgctgagctgtaaaaaacggcgattagtgcgccctaatagcattgttcctttgagtaagaaggttcaccggaattccaccattcgcccaggctgtgatgtgaatccttcctgtgcactctgtggcagcggttctatcaataccatgccacccgagattcattatgaagcacccctgcttgagcgtctgagccagcttgattcctgcgtgcacccagtgctggcatttccagatgacgtccccacctcattgcatttccagagtatgctgaaatctcagtggcagaataagccttttgacaaaatcaagcctccaaaaaagttgtccctgaagcacagggcccccatgccaggctctttgccagaccctgcaagaaaagaccgacataaactggtgtcctccttcctcacaaccgcaaagcttagccatcatcagaccaggcctgacaggactcacaggcagcacctcgacgatgtcggtgcagtcccaatggtggagcgggtcacggctcccaaagcagagcgcctgctcaatccaccgcctcctgtgcatgatcccaatcactccaaaatgaggctgagagatcatagctctgagcgatctgaagtgctcaagcaccatactgatatgagcagcagttcctatctcgcagccacacaccacccaccacactcacccctggtccggcagctgtccacaagctcagattcacccgcccctgcatcttcgagttcacaggtcacagcaagcaccagtcagcagccggttcgaaggcgaaggggcgagagttctttcgatatcaacaacatagtgattccaatgtcggttgccgctacaacccgcgtagagaaacttcagtacaaggagatactgactccttcgtggagggaagtcgacctgcagtcgcttaagggctctcctgatgaggagaatgaggagatcgaagatctgtccgatgctgcattcgctgcactgcatgccaaatgtgaggaaatggaacgggctagatggctttggactacctccgtgccacctcagaggcgaggaagcagatcctatcgtagttcagatgggcgcaccacaccccagcttgggtccgccaatccctccactccacaacctgcgagccccgacgtttcatcaagtcattctttgtcagaatattcacacgggcaatcacccagaagtccgatcagtccggaactacactccgcccccctgactccagtggccagagatacgccacgacacttggcttcggaagacaccagatgtagtactcctgaacttgggctcgatgaacagagtgtccagccctgggagaggcgtaccttcccactcgcccattctccgcaagccgagtgtgaagaccagttagatgcacaggaacgtgcagcaaggtgcacgaggaggacttctggatctaaaacaggtcgggagactgaagccgccccaacatctcctccgacagtgcccctcaaaagccgccaccttgttgccgcagccacggcgcagcggcccactcacaggtag

SEQ ID NO: 285707 - DNA, 3318 bp, Artificial Sequence
  derived and/or modified sequence
atggccgccatggccccagccctgacagatgctgctgctgaggcccaccacatccgcttcaagctggccccacccagcagcaccctgagccctggcagcgcagaaaataatggaaatgccaacatcctgattgctgccaacggcaccaagaggaaggccatcgctgctgaggaccccagcctggacttcaggaacaaccccaccaaggaggacctgggcaagctgcagcccctggtggccagctacctgtgcagtgatgtgacctctgtgcccagcaaggagagcctgaagctgcagggcgtcttcagcaagcagacagtgctgaagagccaccccctgctgagccagagctatgagctgcgggcagagctgctgggccggcagcctgtgctggagttcagcctggagaacctgcggaccatgaacaccagcggccagacagccctgccccaggcccctgtgaatggcctggccaagaagctgaccaagagcagcacccacagcgaccatgacaacagcaccagcctgaatggaggcaagagggccctgaccagcagcgccctgcatggaggagagatgggcggcagcgagagcggggacctgaagggcggcatgaccaactgcaccctgccccacaggagcctggatgtggagcacaccaccctgtacagcaacaacagcacagccaacaagagctctgtgaacagcatggagcagcctgccctgcagggcagcagccggctgagccctggaacagacagcagcagcaacctgggcggcgtgaagctggagggcaagaagagccccctgagcagcatcctcttcagcgccctggacagcgacacccgcatcacagccctgctgcggcggcaggccgacatcgagagccgggcccggcggctgcagaagaggctgcaggtggtgcaggccaagcaggtggagcggcacatccagcaccagctgggcggcttcctggagaagaccctgagcaagctgcccaacctggagagcctgcggcccaggagccagctgatgctgaccaggaaggccgaggccgccctgaggaaggccgccagcgagaccaccaccagcgagggcctgagcaacttcctgaagagcaacagcatcagcgaggagctggagcgcttcaccgccagcggcatcgccaacctgcgctgcagcgagcaggcctttgacagtgatgtgacagacagcagcagtggaggagagagtgacatcgaggaggaggagctgaccagggctgaccctgagcagagacatgtgcccctgcggcggcgctctgagtggaagtgggccgctgacagagctgccatcgtgagccgctggaactggctgcaggcccacgtgtctgacctggagtaccgcatccggcagcagacagacatctacaagcagatccgggccaacaagggcctcatcgtgctgggggaggtgcccccacctgagcacaccacagacctcttcctgcccctgagcagcgaggtgaagacagaccacggcacagacaagctgattgagagcgtgtcccagcccctggagaaccacggggcccccatcatcggccacatcagcgagagcctgagcaccaagagctgtggggccctgcggcctgtgaatggagtcatcaacaccctgcagcctgtgctggccgaccacatccctggggacagcagtgatgctgaggagcagctgcacaagaagcagaggctgaacctggtgagcagcagcagtgatggcacctgtgtggccgcccggaccaggcctgtgctgagctgcaagaagaggcggctggtgcggcccaacagcatcgtgcccctgagcaagaaggtgcacaggaacagcaccatccggcccggctgtgatgtgaaccccagctgtgccctgtgtggcagcggcagcatcaacaccatgcctcctgagatccactatgaggcccccctgctggagcggctgagccagctggacagctgtgtgcaccctgtgctggccttcccagatgatgtgcccaccagcctgcacttccagagcatgctgaagagccagtggcagaacaagccctttgacaagatcaagccacccaagaagctgagcctgaagcaccgggcccccatgcctggcagcctgcctgaccctgccaggaaggacagacacaagctggtgtcctccttcctgaccacagccaagctgagccaccaccagaccaggccagacaggacccaccggcagcacctggatgatgtgggcgctgtgcccatggtggagcgggtgacagcccccaaggccgagcggctgctgaaccccccacctcctgtgcatgaccccaaccacagcaagatgaggctgcgggaccacagcagcgagaggtctgaggtgctgaagcaccacacagacatgagcagcagcagctacctggccgccacccaccaccccccccacagccccctggtgcggcagctgagcaccagcagtgacagccctgccccagccagcagcagcagccaggtgacagccagcaccagccagcagcctgtgagaagaagaagaggagagagcagctttgacatcaacaacatcgtcatccccatgtctgtggccgccaccaccagggtggagaagctgcagtacaaggagatcctgacccccagctggagggaggtggacctgcagagcctgaagggcagcccagatgaagaaaatgaggagattgaggacctgagtgatgctgcctttgctgccctgcacgccaagtgtgaggagatggagcgggcccgctggctgtggaccacctctgtgcccccccagaggcggggcagccgcagctaccgcagcagtgatggccgcaccaccccccagctgggcagcgccaaccccagcaccccccagcctgccagcccagatgtgagcagcagccacagcctgtctgagtacagccacggccagagccccaggagccccatcagccctgagctgcacagcgcccccctgacccctgtggcccgggacacccccaggcacctggccagcgaggacacccgctgcagcaccccagagctgggcctggatgagcagagcgtgcagccctgggagaggaggaccttccccctggcccacagcccccaggctgaatgtgaggaccagctggatgcccaggagcgggccgcccgctgcaccaggaggaccagcggcagcaagacaggccgggagacagaggccgcccccaccagccccccaacagtgcccctgaagagccgccacctggtggccgccgccacagcccagaggcccacccacaggtag

SEQ ID NO: 285708 - DNA, 3318 bp, Artificial Sequence
  derived and/or modified sequence
atggccgccatggcccccgccctgaccgacgccgccgccgaggcccatcacatccgcttcaaattggcacccccctcgtcgaccctgagccccggaagcgccgaaaataacggtaatgcgaatatcctgatcgcggctaacggtaccaaaagaaaagccatcgcagcagaagatccttccttggattttaggaataatcctacgaaagaggacctgggcaagctgcagccacttgtcgcatcatatttatgctccgacgtgactagtgttccttccaaggaaagcctcaagttgcagggcgtgttctccaaacagacagtgctcaaaagtcacccccttctgtcccaatcatacgaactgcgcgctgaactcctgggccggcagcctgtgctcgaattcagcctggagaatctgcgcactatgaataccagtggacagactgcactgcctcaggcgcctgttaacggcctggcaaagaagttgacaaagagttccacacatagcgatcacgataacagcacatcactgaacggcggaaagcgggcgctcacgagttcagccctccacggcggagaaatgggagggtctgagtcaggcgatctcaaggggggcatgacgaactgtaccttgccccacagaagcctggatgtggagcacactactctgtactctaataattcgacagccaacaagtcaagtgttaattctatggaacaaccggccctgcagggatcttccagactgagccctgggaccgacagttccagtaatctgggaggggtaaagctggaggggaaaaaatcccccttatcttccattctgttcagtgcacttgattctgacaccagaatcaccgccttgctgagaagacaggccgacatcgagtctcgggcccgacggctgcaaaaaagactccaggtagttcaagcaaaacaggttgaaaggcatattcagcatcagctggggggtttcctcgagaagacactcagtaagctgcccaatctggagagcctccgaccgagatcccaactgatgctgaccagaaaggccgaagctgctttgcggaaagcagctagcgagaccacaaccagcgagggcctgagcaatttcctgaagtccaactctatcagtgaggagttggaacggttcacagcatcaggaatcgcgaacctgcgctgttctgagcaggcgtttgattctgatgtgactgactcatctagtggaggcgagagcgacatcgaggaggaagaactcacccgagccgatcccgaacagagacatgtacctctgcgacgcaggtccgaatggaagtgggccgctgatagggccgcaatagtgagccgttggaactggctgcaagctcacgtttcagatctggagtatcgtatcaggcagcagaccgacatctacaaacagattagagcaaacaagggattgatcgtgctcggtgaagtccctccccccgagcacaccacggacctgttcctgcctctgagcagtgaagtgaagactgaccatggtacagacaagctcatcgaatccgtgagtcagccattagagaatcatggagcgcccatcataggccacatctccgagtctctgtccacaaagagttgtggtgcactccgcccagtgaatggggtgattaacacactgcagcccgttctggccgatcacattcccggtgacagcagtgatgccgaagagcagctgcacaagaagcagcggctcaaccttgtgtcgtctagcagtgacgggacctgcgtagcagcccggacccggcccgtattatcctgcaaaaagcggcggttggtgcggcctaacagcatcgtccccctgagcaagaaagttcaccgtaattccacgattcggccggggtgtgacgtcaatcctagttgtgccctctgcggcagtgggagtatcaacactatgcccccagaaatacactacgaggcaccgctgcttgagcggctgagtcagctggattcctgcgtgcaccccgttctcgcatttcccgatgatgttcccacatctctgcacttccaaagcatgctcaaaagtcagtggcagaacaaaccttttgacaaaataaaacctccaaagaagctgtcgcttaagcacagagccccaatgcctggttctcttcccgaccctgcccgaaaggacaggcacaagctggtcagtagttttcttaccacagcgaagctgtctcaccaccagacccggcctgaccgtacccatcgtcagcaccttgacgacgtaggggctgtccccatggtggagagagtgaccgctccaaaagctgagcgccttcttaacccgcctcctccggtccatgatcctaaccacagcaagatgaggttacgggatcacagcagcgaaaggtctgaagtcctcaaacaccatactgacatgtcaagctcctcatacctcgcggcaactcatcacccccctcacagcccactggtgcggcagctttctacgagttccgatagtccagcaccggcttccagctcttcccaggtcactgcatccacaagtcagcaacccgtgaggcgaaggcgaggggaatcatcctttgatatcaataatatcgtcataccaatgtcagtggctgccaccacaagggtcgagaaactgcagtacaaggagatcttgactcccagctggagagaggttgatctccaaagtctgaagggctctccggacgaagagaacgaggagattgaggatctgtccgacgccgcctttgccgctctgcacgccaagtgtgaggagatggagcgtgctcggtggctctggacaacttcggtgccccctcagagacggggctcgcgatcctaccggagctccgatgggcgcacaactccacagttggggtcagctaacccgtccacgccacaacccgccagccctgacgttagtagcagccactctctcagtgagtattcccatgggcaatcgccccgaagccctatctcccctgagcttcattctgcaccactcactccagttgccagagacacaccaaggcatctggcatcagaagataccagatgttcgactcccgagctgggcctggacgaacagtctgtgcagccctgggagcggcggacttttccacttgctcactccccccaagcggagtgcgaagaccaattggacgctcaagaacgcgctgctcggtgtacaagaagaacgagcggcagtaagactgggcgagagaccgaagcagctcctacctctccgcctacagtcccgttaaagtctcgacacttagtggcagccgcaaccgcccagaggccgacccaccggtag

SEQ ID NO: 285709 - DNA, 3318 bp, Artificial Sequence
  derived and/or modified sequence
atggccgctatggctcctgccttgacagacgcagctgctgaggctcaccacatccgtttcaagctcgccccaccctcttccaccctctctccaggatcggccgaaaacaatggcaacgccaatattttaattgctgccaacggaacaaagcgaaaagctatcgcagctgaagacccaagccttgactttagaaacaaccccacaaaagaggatttaggcaaactgcagcccctggtagcaagttatctgtgctctgatgtcacttccgtgcctagcaaagaatcattaaaactgcagggggtgtttagcaaacagactgtcttgaaatcacacccgcttttgtcacagagttacgaattgagagcagaactccttggtcggcagcctgttttagagttttcactcgaaaacctgagaacaatgaatacctcgggccaaacagctctcccccaagcccctgtgaacggcctagcgaaaaagctcaccaaatcaagtacacatagtgaccatgacaactcgacatcgttaaatggcggaaagcgggctctgacatcgtccgccttgcacggaggcgaaatgggaggctccgaatccggggacctgaaaggcggtatgaccaactgtacactgcctcatcgttccctcgatgtggaacacacaactctttattctaataatagcacagcaaacaagagctcagtgaactctatggagcagccagctctgcagggctcttcccgcttgtctcccggaacagactcctcatcaaacctgggaggcgttaagttggaggggaagaagtccccccttagctccattctgttctctgctctggatagtgacactcggatcactgccctgctgagacgccaggcagacattgaaagtagagctcgaagactgcagaagcgcctgcaagttgtccaagccaaacaggtcgaacgccacatccagcaccaactgggaggctttctcgagaagaccctgagcaagctgccgaacttggaatccctgcgaccccgttctcaactaatgctcactcgcaaggccgaggctgcgcttaggaaagccgcttccgaaacaaccacatcggaaggactcagtaacttccttaaaagcaattcgatatctgaggagcttgagagattcaccgcaagcggtatagctaatcttaggtgcagcgagcaggcattcgactcagatgtcacagacagttcaagcggaggagagtccgacattgaggaagaggaattgacaagggccgatccagagcagaggcatgtgccgctccggagaagaagcgaatggaagtgggcagcagaccgagcagctatcgtgagtcgatggaattggctccaggcgcacgtttccgatctggaataccgtatccgacagcagacagatatctataaacagattagggcaaataagggtttgattgtgctgggggaggtgccgccacccgagcacacgaccgacttgtttctgcccctttcgtccgaggtcaaaaccgatcacggcaccgataaactcattgaatcggtttcacagcccctggagaaccatggagctcccatcatcggccatattagtgagtctctctccacaaaatcatgcggggcactgagaccagtgaacggggtgataaataccctccagcccgttttagctgaccatatccccggagactcttctgatgcagaagagcagttgcacaaaaaacagaggctcaatttggtcagctccagtagcgatggaacctgcgttgctgcccgaaccagacccgtactgtcatgcaaaaaacgtcggttggtgagacctaatagcatcgtgcctctgtccaaaaaagtgcatagaaacagcacaataaggcccggatgcgacgtcaacccttcctgcgcactgtgtggatcgggcagcatcaacactatgccacccgaaatccactacgaagccccactcctggaaaggctcagccagctggacagttgcgtgcaccccgttctagcctttcccgatgatgtgcccaccagcctccactttcagagcatgctcaaaagtcaatggcagaacaagccctttgacaaaatcaagcccccaaaaaaactgtccctgaagcacagagcacccatgccgggtagcttacccgacccagcaaggaaggacaggcacaaactcgtttcatcgtttcttacgaccgccaagctcagtcatcatcagactcgccctgatcgcacccaccgtcaacacctggacgacgtcggggctgtcccgatggtcgagcgggtgacagcacccaaagccgagaggctacttaacccaccgcctccagtgcatgatccaaatcatagcaagatgcgcctacgagatcattcatcggaacgttcggaggtgttaaagcatcatacagacatgtcaagttcatcctacctcgcagcaacacatcacccaccgcactcccccctcgtccgccagctgagcacatcttcagattccccagcacctgccagttcgtcttcacaggtaacagcaagtacttcccagcaacctgtgagaagacgtcgcggagagtcttcctttgacatcaataacatagtgatccccatgagcgtggccgcaacaactagagtagaaaagttgcagtataaagagattctcacgcccagttggagggaagtcgacctccaatcacttaagggatctccagacgaagagaacgaggagatcgaagatcttagtgacgccgcattcgccgctctgcacgctaagtgtgaagagatggaaagggccagatggttgtggactactagcgtgccaccacaacggagaggttcccgttcctaccgcagtagtgatggtcggaccactccacagctgggttccgccaacccatcgacaccccagccggcatccccagacgtgtcttctagtcattcattaagcgaatattctcacggacagtctccacggagccctatcagtcctgagctccattcggcacctctcactccagttgctcgcgacaccccccgacacctcgcatccgaggacactagatgcagcacacccgagctgggcctggacgagcagtctgtccaaccctgggagaggaggaccttccccctcgcgcactcgccgcaggcggaatgtgaggaccagctggacgctcaggagcgggctgcaaggtgcacgagacggacatcaggttcgaagaccggaagagaaactgaggcggcacctacctctccacccactgtgcccctgaaaagtcgtcacctggttgccgcagccaccgctcagcggcctacccatcggtag

SEQ ID NO: 285710 - DNA, 4735 bp, Artificial Sequence
  derived and/or modified sequence
agtctgttctctggggaggcagtaaggggccgtggagctggcctcggcctcggcatcgggagaggctggacttcctgtctctctgtgctgaatggctgcgatggcgcccgctctcactgacgcagcagctgaagcacaccatatccggttcaaactggctcccccatcctctaccttgtcccctggcagtgccgaaaataacggcaacgccaacatccttattgctgccaacggaaccaaaagaaaagccattgctgcagaggatcccagcctagatttccgaaataatcctaccaaggaagacttgggaaagctgcaaccactggtggcatcttatctctgctctgatgtaacatctgttccctcaaaggagtctttgaagttgcaaggggtcttcagcaagcagacagtccttaaatctcatcctctcttatctcagtcctatgaactccgagctgagctgttggggagacagccagttttggagttttccttagaaaatcttagaaccatgaatacgagtggtcagacagctctgccacaagcacctgtaaatgggttggctaagaaattgactaaaagttcaacacattctgatcatgacaattccacttccctcaatgggggaaaacgggctctcacttcatctgctcttcatgggggtgaaatgggaggatctgaatctggggacttgaaggggggtatgaccaattgcactcttccacatagaagccttgatgtagaacacacaactttgtatagcaataatagcactgcaaacaaatcttctgtcaattccatggaacagccggcacttcaaggaagcagtaggttatcacctggtacagactccagctctaacttggggggtgtcaaattggagggtaaaaagtctcccctgtcttccattcttttcagtgctttagattctgacacaaggataacagctttactgcggcgacaggctgacattgagagccgtgcccgcagattacaaaagcgcttacaggttgtgcaagccaagcaggttgagaggcatatacaacatcagctgggtggatttttggagaagactttgagcaaactgccaaacttggaatccttgagaccacggagccagttgatgctgactcgaaaggctgaagctgccttgagaaaagctgccagtgagaccaccacttcagagggacttagcaactttctgaaaagcaattcaatttcagaagaattggagagatttacagctagtggcatagccaacttgaggtgcagtgaacaggcatttgattcagatgtcactgacagtagttcaggaggggagtctgatattgaagaggaagaactgaccagagctgatcccgagcagcgtcatgtacccctgagacgcaggtcagaatggaaatgggctgcagaccgggcagctattgtcagccgctggaactggcttcaggctcatgtttctgacttggaatatcgaattcgtcagcaaacagacatttacaaacagatacgtgctaataaggggttgatagttcttggggaggtacctcccccagagcatacaacagacttatttcttccgcttagttctgaggtgaagacagatcatgggactgataaattgattgagtctgtttctcagccattggaaaaccatggtgcccctattattggtcatatttcagagtcactgtctaccaaatcatgtggagcactcagacctgtcaatggagttattaacactcttcagcctgtcttggcagaccacattccaggtgacagctctgatgctgaggaacaattacataagaagcaacgactgaatctcgtctcttcatcatctgatggcacctgtgtggcagcccggacacgtcctgtactgagctgtaagaagcggaggcttgttcgacccaacagcatcgttcctctttccaagaaggttcaccggaacagcacaatccgccctggctgtgatgtgaatccctcctgcgcactgtgtggttcaggcagcatcaacaccatgcctcccgaaattcactatgaagcccctctgttggaacgtctttcccagttggactcttgtgttcatcctgttctagcatttccagatgatgttcccacaagcctgcatttccagagcatgctgaaatctcagtggcagaacaagccttttgacaaaatcaaacctcccaaaaagttatcgcttaagcacagagcacccatgccgggcagtctgccagatccagctcgtaaggacaggcacaaattggtcagctccttcctaacaacagccaagctgtcccatcaccaaacccggcctgacaggacccacaggcagcacttagacgatgtgggggccgtgcccatggtggagcgagtgacagcgccaaaagcagagcgcttgctcaacccaccaccacccgtgcatgacccaaaccacagcaaaatgagattgcgagaccattcatctgagagaagtgaagtgttgaagcatcacacagacatgagcagttcgagctacttggcagccacccaccatcctccacacagtcccttggtgcgacagctctccacctcctcagattcccctgcacccgccagctctagctcacaggttacagccagcacatcgcagcagccagtaaggaggagaaggggagagagctcattcgatattaacaacattgtcatcccaatgtctgttgctgcaacaactcgcgtagagaaactgcaatacaaggaaatccttacgcccagctggcgggaggttgatcttcagtctctgaaggggagtcctgatgaggagaatgaagagattgaggacctatccgatgcagcctttgccgccctgcatgccaaatgtgaggagatggagagggcacggtggctgtggaccacgagtgtgccaccccagcggcggggcagcaggtcctacaggtcatcagacggccggacaaccccccagctgggcagtgccaacccctccaccccccagcctgcctcccctgatgtcagcagtagccactctttgtcagaatactcccatggtcagtcccctaggagccccattagcccggaactgcactcagcacccctcacccctgtggctcgggacactccgcgacacttagccagtgaggatacccgttgttccacaccagagctggggctggatgaacagtctgtccagccctgggagcggcggaccttccccctggcgcacagtccccaggcggagtgtgaggaccagctggatgcacaggagcgagcagcccgctgcactcgacgcacctcaggcagcaagactggccgggagacagaggcagcgcccacctcgcctcccactgtccccctcaagagtcggcatctggtggcagcagccacagctcagcgcccgactcacagatgagcgggagacagccatctaaacagactcactaactattggcattaaagcttcagaaatctctgcgtttgatattcaaacatcatatgccggaaattttcacagtttttagtgaacttaaggaatttagatcctactttggtatttttttttcttgttttaatttttgttttgtttttgtttccatgttttcttgtcacacacctgagcacttcctcccgttggcaaacagaagttcaggatgagaccctgctggcctggtcctggcacatcctctgcactgttgaatcactggacttactgatcttagatgaccaccccctccctcacacctgtgggcagggcagaacagcctggcgggcagagggctacagtttagcatggccttcttgagctagggtggaatggggcagggtgctctggactcttaccccctcccctcccatctgtggcttggctctgctgtggccctcctggctgggtccccttggttttttgtgctggaacatccccaccagagcctctctgccataactgccagctgctctccccgagtgctcagctggcagaacacctttcctttctcacccagaacttaagagactgattttttgtttcatctgcatttggtcttctctgttttgactctctcactgcagtaacctggctgtggctgctcaggttcccctcctcatgccccttggtacccttccctgtctgctctcccatgccatgtacacacccacaacccatccttccacttggaatatttttaccacctatcctgatctttgaaggtagggttaggactacttaacctctattcccactcccctgcaaactgggggttgtgggaagtgagcagccatctccctgtgtgattttttttttttttccctctgattcactttgccatgtttccttcacatccagatccctgtcggtgttagttccactcttggtctttcacgctccccttgcctgtggaacattgtctggtcctagctgtggttcccattgttcccccttcacccttctctgttaaccttgtgcctgtctcctgtatgatcacatcaccaaaaagggggaggggggagaagactctttttttttggccattttgtaatcgtataaaaatagtagacaactgcttaatggttggggttttttcacaattttcaacattagtgatttttttttctgtttgcaagttaaagggtttgtcattgtttctttaaaaaaaaaatacaataatgcaccatatccctatgcataaagtgcttcttctatttataaggttgaaaattctgaataacccttttagcattg

SEQ ID NO: 285711 - protein, 902 aa, Artificial Sequence
  derived and/or modified sequence
MAVYTYLRLIVDHHGTAQLQALRQKEVDFCISLLRERFMECLMIGRDLVRLLQNVARIPEFELLWKDIIHNPQALSPQFTGILQLLQSRTSRKFLACRLTPDMETKLLFMTSRVRFGQQKRYQDWFQRQYLSTPDSQSLRCDLIRYICGVVHPSNEVLSSDILPRWAIIGWLLTTCTSNVAASNAKLALFYDWLFFSPDKDSIMNIEPAILVMHHSMKPHPAITATLLDFMCRIIPNFYPPLEGHVRQGVFSSLNHIVEKRVLAHLAPLFDNPKLDKELRAMLREKFPEFCSSPSPPVEVKIEEPVSMEMDNHMSDKDESCYDNAEAAFSDDEEDLNSKGKKREFRFHPIKETVVEEPVDITPYLDQLDESLRDKVLQLQKGSDTEAQCEVMQEIVDQVLEEDFDSEQLSVLASCLQELFKAHFRGEVLPEEITEESLEESVGKPLYLIFRNLCQMQEDNSSFSLLLDLLSELYQKQPKIGYHLLYYLRASKAAAGKMNLYESFAQATQLGDLHTCLMMDMKACQEDDVRLLCHLTPSIYTEFPDETLRSGELLNMIVAVIDSAQLQELVCHVMMGNLVMFRKDSVLNILIQSLDWETFEQYCAWQLFLAHNIPLETIIPILQHLKYKEHPEALSCLLLQLRREKPSEEMVKMVLSRPCHPDDQFTTSILRHWCMKHDELLAEHIKSLLIKNNSLPRKRQSLRSSSSKLAQLTLEQILEHLDNLRLNLTNTKQNCMPSTLGVQCRRCCPGPDYAWSQAGGRGRTPGATTHTRDKTTCACCLISSQTSDCFSFPALPFLPLVFSQTPILQALQHVQASCDEAHKMKFSDLFSLAEEYEDSSTKPPKSRRKAALSSPRSRKNATQPPNAEEESGSSSASEEEDTKPKPTKRKRKGSSAVGSDSD

SEQ ID NO: 285712 - DNA, 4704 bp, Artificial Sequence
  derived and/or modified sequence
ccttccactatggccgcttctgtgtggtgtggggagacgctggtcctccccgtcctcccatagcgcttattgcctcaccctcaccccctaggggccggatccaaaggcgctgcactccccaagccttggggcatcagccaggaaggtttcctacctcctaattcaggggcaggactcctcttttccccccacggggaaaagaggcagaaacttaggggtttccctcctttcttagggtcagacgctcttagggtccacttcttcaggggcggaagcctctcctacccttcccatagggacacaggcctttaccccactgtacttcggagccaacgcctttccctcagcactgccaccccagagtcaggacccagaggactgtgccttcgcccccaacgcaggcgcggccttttggagaggagggaggagtggagaggacaggggcccttgctctcccctccccaacttgttcctcttgccccccagtccctggcaatccagagatcccgatatctaggactgtccatccatccactccctgaccttttcccggctcctggctgcagccatggagttgcagaagggaaaaggggcggcagcagcagcagctgcttcgggagcagcgggaggtggaggaggaggagcgggagcaggagccccaggaggggggaggctgctactttcaaccagtttggatgccaaggatgagttagaggagagattggaaaggtgtatgagcattgtgacatcgatgactgctggtgtctcggagagagaagccaatgatgccctcaatgcgtatgtgtgcaaaggcctcccccagcatgaagaaatctgcctgggcctgtttactctcatcctcactgaacctgcccaagcccagaagtgttaccgggacttagctctggtgagtcgtgatggcatgaatattgtcctgaataaaatcaaccagatacttatggagaagtacctgaagctgcaggatacctgccgtactcagttggtgtggttggtacgggaactggtgaagagtggggttctgggagccgatggtgtttgtatgacgtttatgaagcagattgcaggtggagatgttacagccaaaaatatctggttggcagaaagtgttctggatatcctgacagagcaaagggagtgggtcctgaagagcagcatcctcattgccatggctgtttacacgtacctccgcctcatcgtggaccaccatgggactgcccagctccaggccctgcgacagaaggaagtagacttctgcatctcactgcttcgggaacggttcatggaatgtctgatgattggtcgggatctcgtaagactacttcagaatgttgctaggataccagaatttgaactgctttggaaagatattatccataatcctcaggccttgagtcctcagttcacaggtatcctacagcttcttcagtcaagaacatcccgaaaattcctagcatgtcgtctaaccccggacatggagactaaactcctcttcatgacatcccgggtgcgatttggtcaacaaaagcgataccaagattggttccagcgccagtacctgtcaactccagatagtcagtctctgcgctgtgacctcattcgctacatctgtggggtagtccacccttctaatgaagtactgagttcagatatcttgccccggtgggccatcattggttggctcctgacaacgtgcacgtcaaatgtcgctgcctccaatgccaagctggctttgttttatgactggctgttctttagtccagacaaggatagcattatgaacatagaaccagccatcctggtcatgcaccactccatgaagccccacccagccatcactgccacactcctggacttcatgtgccgcatcattcccaacttctatccaccattggagggccacgtgcggcagggtgtcttttcctccctcaaccacattgtggagaaacgggtcttggcacacctagctcccctgtttgacaaccctaagttggataaggagctgcgggcaatgctgagagagaagtttcctgagttctgcagctcaccctccccacctgtggaagtcaaaattgaggagccagtttccatggagatggacaaccatatgtcggataaggatgagagttgctatgacaatgcagaggcagccttcagtgacgatgaagaggatctcaacagcaaaggaaagaagagggagtttcgcttccaccctatcaaggagacagttgtggaggagccagttgatatcaccccttaccttgaccagttggatgagtccctgagggacaaagtactccagctacagaaggggagtgatacggaggcccagtgtgaggtcatgcaggaaattgtggaccaggtcctggaggaagactttgactcggagcagctgtctgtccttgcttcctgcctacaggagctcttcaaggcccactttcgaggggaggtcctgcctgaggagattactgaggagtccctggaggagtctgtaggaaagcctctgtacctaatatttaggaacctatgtcagatgcaggaagacaacagcagcttctctctacttctagaccttctctccgagctatatcagaagcagcccaagattggctaccacctgctctactacctgagggccagcaaagccgccgcagggaagatgaacctgtacgagtcatttgcccaggctacccagctgggcgatctgcacacctgcctgatgatggacatgaaggcctgccaggaggacgatgtgcggctcctgtgccacctcacgccctccatctacacagagtttccagatgaaaccttgaggagcggagagctgctgaacatgatcgtggctgttattgactctgcacagctccaggagctggtctgccacgtgatgatgggtaacctggttatgtttcgaaaagactcagttctcaacatactcattcagagcctagactgggagacctttgagcagtattgtgcctggcagctctttctggcccacaatattcccctggagaccataatccccatcctgcagcacctcaaatacaaggagcacccagaggccctgtcctgcctactgcttcaactccgaagagaaaagcccagcgaggagatggtgaagatggtgctgagccggccctgccatcctgacgaccagttcaccaccagcatcctgcggcactggtgcatgaaacatgacgagctgctggccgagcacatcaagtccctgctcatcaagaacaacagcctgcctcgcaagagacagagcctgaggagctctagcagcaagctggcccagctgactctggagcagatcctggagcacttggacaatctgcggctcaacctgaccaacaccaagcagaactgtatgccttccaccctcggcgtccagtgtagacggtgctgccctggcccagactatgcctggagccaggctgggggcaggggcaggacacccggggccacaacccacactcgggataaaacaacctgtgcgtgctgtttaataagctcccagacatctgattgtttttccttccctgctctcccttttcttcctctagtttttagccagacgccaattctccaggcgctgcagcatgtccaagcgagctgtgacgaagcccacaagatgaaattcagtgatctcttctccctggcggaggaatatgaggactcttccaccaagccacccaagagccggcgaaaagcagctctgtccagccctcgaagtcgaaagaatgccacacagccccccaatgccgaagaagagtcgggctccagcagtgcttcagaagaggaagacacgaaaccgaagcctaccaagcggaaacgaaaagggtcctctgcagtgggctctgacagtgactgaggccctgcattccccatcccacccccggctggactgccctctccttcttggtgattcaaaggttaatagaggctgaggagattgcaggggaaacacccttgctgcatccccaagctcccccggtggaaggaggagctttctcctctggctgagtttgagaagctgccatgcagcccctagccccttccctcctcctggggcctccagcccctcacactgctgttcccagtgatatttgggatctgactgaagccagaggctctgtaaaatcagaccatagtggaagtcctcagccccctggccccttccgcaatctcctcccccagtctcccaaagagccatttcaacagagaagggaaatgacaaaggggcagctggccagataagctaggatgagagcagagactcagtgtgtgggtgtcccttcctgcttccccttcaggtcttggtttgttctgaagggacgttttatagtcactatccacatgccagtgtgaaatgggcatctatgacgtggtcagggtgtccattcctaatcatggggcagatgccacaagcattcagaaaggagtctgaaagggtggccacagccccacgtggtgtgccctggaggcttaggttggtctgaggttggcacctcaatctacaccagagcccagggagtcccagaggcaagtttcacagaattgtcaaatgatcccatttccttgagtctgtttttttttttgtttttttttgttttttttttggcagagataatcgtgtcttaaaagttgtttttaaatgacaataaaacaagccagaatgtc

SEQ ID NO: 285713 - protein, 357 aa, Artificial Sequence
  derived and/or modified sequence
MGLRGDSQATLFDPQLHDGSCICERVASIVDVSMDSGSLVLSAIGDLPGGSSPSEDSCLLELQGSVRSVDYVLFRSIQRSRAGYCLSLDCGLRGPFEESPLPRRPPRAARSYSCSAPEAPPPLGAPTAARSCHRLEGWPPWVGPCFPDSSGSLTPPGHRPPHPASPPPLLLPRSHSDPGITTSSDTADFRDLYTKVLEEEAASVSSADTGLCSEACLFRLARCPSPKLLRARSAEKRRPVPTFQKVPLPSGPAPAHSLGDLKGSWPGRGLVTRFLQISRKAPDPSGTGAHGHKQVPRSLWGRPGRESLHLRSCGDLSSSSCGVSCLAAGWSVVPAPTASASTGAAGRLGSDLGFLSH

SEQ ID NO: 285714 - DNA, 1074 bp, Artificial Sequence
  derived and/or modified sequence
atgggcctgagaggcgacagccaggccaccctgttcgacccccagctgcacgacggcagctgcatctgcgagagagtggccagcatcgtggacgtgagcatggacagcggcagcctggtgctgagcgccatcggcgacctgcccggcggcagcagccccagcgaggacagctgcctgctggagctgcagggcagcgtgagaagcgtggactacgtgctgttcagaagcatccagagaagcagagccggctactgcctgagcctggactgcggcctgagaggccccttcgaggagagccccctgcccagaagaccccccagagccgccagaagctacagctgcagcgcccccgaggcccccccccccctgggcgcccccaccgccgccagaagctgccacagactggagggctggcccccctgggtgggcccctgcttccccgacagcagcggcagcctgaccccccccggccacagacccccccaccccgccagccccccccccctgctgctgcccagaagccacagcgaccccggcatcaccaccagcagcgacaccgccgacttcagagacctgtacaccaaggtgctggaggaggaggccgccagcgtgagcagcgccgacaccggcctgtgcagcgaggcctgcctgttcagactggccagatgccccagccccaagctgctgagagccagaagcgccgagaagagaagacccgtgcccaccttccagaaggtgcccctgcccagcggccccgcccccgcccacagcctgggcgacctgaagggcagctggcccggcagaggcctggtgaccagattcctgcagatcagcagaaaggcccccgaccccagcggcaccggcgcccacggccacaagcaggtgcccagaagcctgtggggcagacccggcagagagagcctgcacctgagaagctgcggcgacctgagcagcagcagctgcggcgtgagctgcctggccgccggctggagcgtggtgcccgcccccaccgccagcgccagcaccggcgccgccggcagactgggcagcgacctgggcttcctgagccactag

SEQ ID NO: 285715 - DNA, 1499 bp, Artificial Sequence
  derived and/or modified sequence
ggcccttctcggtgcccctcttccctagggagatgcgatgagccggtgcccccgcgtcctcatcgtcgccccgggcacggtgcccgtccagtgcccgtggtggggagggagcactccgcggtccctccgtgacgcccctcgcttggccccccccacagctggcgtccctcggccatgccccaggggacccagccagggggtgggctctagagcgagtggggtggagaggagaaaggacggggccttgggcgcctctgagatgctcccaagtgccagggagggccgagcgaggcgcaggcaaccgggcagcaggcatgatgccctcgcctagtgactccagccgctcgctgaccagccggcccagcaccaggggccttacccacctccgcctccaccgaccctggctgcaggccctgcttacgctggggctggtccaagtgctcctgggcatcctggtggtcaccttcagcatggtggcctcttccgtcaccaccaccgagagcatcaagaggtcctgcccgtcttgggctgggttctcgaacctgctcttcagcgtctgtgggctcaccatttgtgccgctataatctgtacactctctgctattgtctgctgcatccaaatcttctccctggacctcgtgcatacgctgacttcagggacctttataccaaagtgcttgaggaagaagctgcttctgtttcctctgcagatacagggctctgctctgaagcctgcctcttccgcctagcccgctgcccttcccccaagttgctacgtgcccggtcagccgagaaacggcgccctgtgcccaccttccaaaaagttcccctgccctcgggccctgcacctgcccactccctgggggacctaaagggcagctggccaggtcggggcctggtcactcgtttcctccagatatccaggaaagccccagaccccagtgggactggagctcatggacataagcaggtgccccggagcctgtggggccggcctggccgagagagcctccaccttcgcagctgcggagatctgagctctagctcttccctgcggcgtctcctgtctggccgcaggctggagcgtggtacccgcccccacagcctcagcctcaacgggggcagccgggagactgggctctgacctaggcttcttgtcacactgaacacatccagccacaggcaccagctggttgggaccagcagcccccagcatcctcttgcactggctggcacaaaaagaaacctgctgtataccccccaaagtgtccctttccctcctacctctggggtctcttgctgcttgcctctgctgctctggactgggagagcttctgtcctgtgctgcatgggtatttagactgtgggggagatgccccttcttatagcactggaggaggaaaacaaattcttgtccccctcagaatgagagtggctctttctgatttgcaagggcactatggtcagggcaaaggcatggcccaggtgtttaagtacag

SEQ ID NO: 285716 - DNA, 1074 bp, Artificial Sequence
  derived and/or modified sequence
atgggtctgcggggcgacagccaggcaacactgttcgacccacagctgcacgacggctcctgtatttgcgagagggtcgcatccatcgtggatgtttcaatggactcaggaagtcttgtgctttctgctattggagatctgccaggtgggagttccccatcagaggactcttgccttcttgagttgcagggtagcgtgaggtcagtagattacgtgctgtttagatctatccagcggagcagagcaggttactgtctctccctggattgtgggcttcgggggccctttgaagagtctccattaccacgacgccccccccgggctgcccgctcatacagctgctcagcgccggaggctccacccccccttggggcaccaaccgcggcacgcagctgtcacagattagaggggtggcccccttgggttggtccatgcttccctgattcaagcgggagccttactcccccggggcatcgcccaccgcacccagcctcaccaccgccactgttgctccccaggtcgcactccgaccctggcatcacaacctcctctgatactgcggattttcgagacctgtacacaaaggtgctcgaggaggaggcagcatccgtgtcttcagccgacacaggtttgtgtagcgaggcatgcctttttcggctcgctcgctgccccagcccaaagctcctgagagctcggtcagccgaaaagcggcgacctgtgcctactttccaaaaggtacccctcccatcgggccccgccccagctcactctctgggggacctcaaaggaagctggcctggccgaggactggttacacgattcctgcaaatttctcgcaaagcacccgacccatccggaacaggagcccacggccacaagcaggttcccagatcactttgggggaggccagggcgtgagtccctgcatttgcgcagctgcggggacctcagttcttcctcttgcggagtatcctgtctagctgctggttggtcagttgtccctgcccccaccgcctctgcttccaccggggcggcaggtcgccttggcagcgacttgggctttcttagtcattag

SEQ ID NO: 285717 - DNA, 1074 bp, Artificial Sequence
  derived and/or modified sequence
atgggcctgcggggggacagccaggccaccctgtttgacccccagctgcatgatggcagctgcatctgtgagcgggtggccagcatcgtggatgtgtccatggacagcggcagcctggtgctgagcgccatcggggacctgcccggcggcagcagccccagcgaggacagctgcctgctggagctgcagggctctgtgcgctctgtggactatgtgctcttccgcagcatccagaggagccgggccggctactgcctgagcctggactgtggcctgcggggcccctttgaggagagccccctgcccaggaggcctccccgggccgcccggagctacagctgcagcgcccctgaggcccccccacccctgggcgcccccacagctgcccggagctgccaccggctggagggctggccaccctgggtgggcccctgcttcccagacagcagcggcagcctgaccccacctggccaccggcccccccacccagccagccccccacccctgctgctgcccaggagccacagcgaccccggcatcaccaccagcagtgacacagctgacttccgggacctgtacaccaaggtgctggaggaggaggccgcctctgtgagcagcgctgacaccggcctgtgcagcgaggcctgcctcttccggctggcccgctgccccagccccaagctgctgcgggcccggtctgctgagaagagaagacctgtgcccaccttccagaaggtgcccctgcccagcggccctgccccagcccacagcctgggggacctgaagggctcctggccaggccggggcctggtgacccgcttcctgcagatcagcaggaaggccccagaccccagcggcactggagcccacggccacaagcaggtgcccaggagcctgtggggccggcccggccgggagagcctgcacctgcggagctgtggggacctgagcagcagcagctgtggggtgtcctgcctggccgccggctggagcgtggtgcctgcccccacagccagcgccagcactggagctgctggccgcctgggcagtgacctgggcttcctgagccactag

SEQ ID NO: 285718 - DNA, 1074 bp, Artificial Sequence
  derived and/or modified sequence
atgggcctgcggggcgacagccaggccaccctgttcgacccccagctgcacgacggcagttgcatatgcgagagggtggcttctatcgtggacgtgtcgatggattcaggctctctcgtgctttcggcgattggtgatttgcccggggggagttctccatccgaggattcttgtctgctagaactccagggctccgtgcggagtgttgattatgttctgttccgaagcatacagcggtcccgagccggatactgcctatctcttgattgtgggctccggggaccttttgaggaaagccccctcccgcggaggccccctcgggcagccagatcctactcttgctctgctcccgaggcgccaccgcctctgggtgcccccaccgcggcccgcagctgtcataggctggaaggctggccaccctgggtaggcccttgtttcccagattcaagcggatctcttactccccctggtcatcggccaccccacccggcatcgccacctccgcttctcttgccgaggtcccatagcgatcccggcattacgacgtcatccgataccgctgatttcagggatctttatactaaggttctggaggaggaggccgcaagcgtgagctcagcggacaccgggctctgtagcgaagcctgcctcttccgacttgctcggtgcccatcccccaagctcctgcgagctcggtcagctgagaagagacgccctgtgccaaccttccagaaggtaccccttccgtccggccctgcccccgcacatagcctaggtgatttaaaaggatcatggcctggcagaggtttagtgacccgctttcttcaaatcagccggaaggcacccgacccaagcggtactggtgcacatggtcataagcaggtaccacgatctctatgggggaggcccgggagagaaagcctgcaccttaggagctgtggggacctgtcaagcagttcctgtggtgtctcttgcctggcggccggatggtcagttgtgcctgcccccacggccagcgcgtccactggggctgcaggccgtctgggatccgatctggggttcctctcacactag

SEQ ID NO: 285719 - DNA, 1074 bp, Artificial Sequence
  derived and/or modified sequence
atgggacttagaggagactctcaggccactttgttcgaccctcagctgcatgacggcagttgcatctgcgaacgagtggcttccatcgtggacgttagcatggactccggtagcttggtcctcagcgccatcggtgacttgcccggaggatcctcgccaagcgaagattcctgtctgttggaacttcaagggtcagtcagatccgtagactacgtgctgtttaggagtattcagcgaagcagagccggttactgtctgtcactagattgcggcttaaggggaccttttgaagaatcacccctgcctcgaagacccccacgcgctgcccgatcctacagctgtagcgccccagaggctccaccccctcttggagcaccaacagcagctcgcagttgtcataggttggagggctggcccccatgggtcgggccttgctttcccgattccagcggatctctgacacccccaggacaccgacctccgcaccccgcatcacctccgccactgctcctgcccaggtcccactcagaccctgggataactacaagttccgataccgccgacttccgagacctttacaccaaggttctggaagaggaagccgcatcggtgagctcagcagacaccggactatgctccgaagcttgtttgtttaggctcgctaggtgtcccagccccaagctcctgcgtgctaggagcgctgagaagcgacgacctgtgcccacctttcagaaagtaccattaccgagcgggccagcccctgcgcactctctgggggatttgaaagggtcctggcctgggagaggattggtgactaggttcctccaaatcagtagaaaggcacccgatcccagcggcactggtgcgcacggccataagcaagtaccaagatctctctggggcagaccgggacgagagtcactccacctgcgaagttgcggggacctgagctccagctcatgtggcgtgtcctgcctggcagccggatggtccgtggtacctgctcctaccgcctccgcgtctaccggggctgccggaaggctcggcagcgatttggggttcctcagccattag

SEQ ID NO: 285720 - DNA, 180 bp, Artificial Sequence
  derived and/or modified sequence
atgatgatgaagatgatgatgcggatgaagatccggaagatccggtaccattgtcagaggaagcagaatctaatccataataatggaaatggactggggagtgtccccgtcgagaaactcgtgttacatccgtctccaatccagaacccacagcagtcagccgtggtatcttgcgagtag

SEQ ID NO: 285721 - protein, 497 aa, Artificial Sequence
  derived and/or modified sequence
MPHPRRYHSSERGSRGSYREHYRSRKHKRRRSRSWSSSSDRTRRRRREDSYHVRSRSYDDRSSDRRVYDRRYCGSYRRNDYSRDRGDAYYDTDYRHSYEYQRENSSYRSQRSSRRKHRRRRRRSRTFSRSSSHSSRRAKSVEDDAEGHLIYHVGDWLQERYEIVSTLGEGTFGRVVQCVDHRRGGARVALKIIKNVEKYKEAARLEINVLEKINEKDPDNKNLCVQMFDWFDYHGHMCISFELLGLSTFDFLKDNNYLPYPIHQVRHMAFQLCQAVKFLHDNKLTHTDLKPENILFVNSDYELTYNLEKKRDERSVKSTAVRVVDFGSATFDHEHHSTIVSTRHYRAPEVILELGWSQPCDVWSIGCIIFEYYVGFTLFQTHDNREHLAMMERILGPIPSRMIRKTRKQKYFYRGRLDWDENTSAGRYVRENCKPLRRYLTSEAEEHHQLFDLIESMLEYEPAKRLTLGEALQHPFFARLRAEPPNKLWDSSRDISR

SEQ ID NO: 285722 - DNA, 1494 bp, Artificial Sequence
  derived and/or modified sequence
atgcctcacccgcgtcgataccactcttccgaaaggggttcgcgtggtagttacagggagcactaccgttctcgcaagcataaaagaagaaggagtcgttcctggagctcatcatctgatcggaccagacgcagaagacgtgaggattcctaccacgtccggtctagaagttacgacgaccggtcctctgatcgtcgggtgtatgacaggaggtattgcggaagttataggcggaatgattacagtcgggacaggggcgacgcgtactatgacacggactacaggcactcttatgagtaccagcgtgagaatagtagttatagatctcagcgcagttcaagaagaaagcatagaaggcgccgacgacggtcccggacattcagtagaagcagttcccattcttctagaagggccaagtctgtcgaagacgatgcagaagggcatctcatatatcacgtgggggattggctccaggaacggtacgaaatcgtgtctacgctgggcgaggggacattcggccgcgtggtgcaatgtgtagatcatcgacgcgggggggcaagggttgcgctcaaaattattaaaaacgtggaaaagtacaaggaagcagctaggcttgagatcaacgtccttgaaaaaattaacgaaaaggacccagataataagaacctctgcgtccagatgtttgattggtttgattaccacgggcatatgtgcatttcttttgagctgctgggcttgtctacctttgatttccttaaagataataattacctcccgtaccctattcaccaggtgcggcatatggcttttcaactgtgccaggccgttaagtttcttcacgataataagctgacgcacaccgacctgaagcctgagaacatactcttcgtgaatagtgactacgagctgacatataacctggagaagaagcgggatgaacggtccgtcaagtctactgccgtcagagtagtggactttggatcagctaccttcgatcatgagcatcattctactatcgtgagcacccgccactacagggcgcctgaggtaatcttggaacttgggtggagtcagccatgtgacgtgtggtcgattgggtgcataatattcgaatattatgttggatttacacttttccaaacccacgacaatagagaacatctagctatgatggagcgaattttagggcccatcccttctcgcatgattcgtaagactaggaagcagaagtatttctatcgggggcgtctcgattgggacgaaaacacctccgccggtagatacgtgcgcgaaaactgcaagcctcttagacgctatctgacgtcggaggcagaagaacatcatcagctgtttgatctgatagaatcaatgttagaatatgaacccgccaagcgtctcacactcggcgaagcactgcaacaccccttcttcgcacgattaagggccgagcccccaaacaagctgtgggacagcagcagagatatctcaagatag

SEQ ID NO: 285723 - DNA, 1497 bp, Artificial Sequence
  derived and/or modified sequence
atgcctcatccacggcggtaccactcctcagaacgcgggtcaaggggaagctatcgcgagcactaccgcagcagaaaacataaacgtcggaggtcgcggagctggtcgtcgtctagtgataggacaagaagacgccgtagggaggactcctatcatgtgaggagccgatcaagctatgacgatcgatcttccgacagacgggtgtatgaccgtcgttattgcggtagctatagaaggaacgactattcccgtgaccggggagatgcatattatgacacggattatcgacacagttacgagtaccagcgcgaaaatagttcttacagaagccagagatctagcagacggaagcataggcgccgcagaaggcgctcgcggacgttctcaaggtccagctcccacagcagcagacgcgctaagagcgtggaggacgatgctgagggccacttaatttatcatgtgggagactggctgcaggagcgctacgagatcgtgagcacattgggcgagggtacatttggacgcgttgtgcaatgtgttgatcatcgccgagggggcgcaagagtcgcccttaaaatcattaaaaacgttgagaagtataaggaagcggcacgcttggagattaatgttttggaaaagatcaacgagaaagacccggataataagaacctgtgcgtccaaatgtttgactggtttgactaccacggacatatgtgcatctctttcgagttgctgggactatccacgttcgatttcctcaaagacaataattatctgccatatccaatacaccaggtgaggcacatggcctttcagttatgtcaggcagtcaagtttctgcacgataacaagctaacccataccgatctcaagccagagaatattctgttcgtcaattctgactatgagctgacctacaatttggagaagaagcgtgatgagcgctcagtcaagtccacagcagtcagagtcgtagattttgggtctgccacattcgatcacgagcaccatagtacaatcgtctccactcggcactatagagctccagaagtgatcttggaattaggctggtcccagccctgtgatgtgtggagcatcggatgcatcatattcgaatactatgttggcttcactttatttcagacacatgataacagggaacatctggccatgatggagagaattctgggaccgataccatctcggatgatcaggaagaccaggaagcagaagtacttctacaggggccgattggactgggatgaaaacaccagcgccggacgttatgtgcgcgaaaattgcaaacccctccggcgatacctaacaagtgaggccgaggagcatcaccagctgttcgatctcatcgagagcatgctggagtatgaaccagcaaagcgtctcactctaggggaggcacttcagcacccgttttttgcccggctcagagccgagccacctaataaactttgggactcctctcgcgatatctctcgctag

SEQ ID NO: 285724 - DNA, 1494 bp, Artificial Sequence
  derived and/or modified sequence
atgccccacccccggcgctaccacagcagcgagcggggcagccggggcagctaccgggagcactaccgcagcaggaagcacaagagaagaagaagccgctcctggagcagcagcagtgacaggaccaggagaagaagaagagaggacagctaccacgtgcgcagccgctcctatgatgacaggagcagtgacagaagagtgtatgaccggcgctactgcggcagctacagaagaaatgactacagccgggacagaggagatgcctactatgacacagactaccgccacagctatgagtaccagcgggagaacagcagctaccgcagccagaggagcagcaggaggaagcacagaagaagaagaagaagaagcaggaccttcagccgcagcagcagccacagcagccggcgggccaagtctgtggaggatgatgctgagggccacctgatctaccacgtgggggactggctgcaggagagatatgaaattgtgtccaccctgggggagggcaccttcggccgggtggtgcagtgtgtggaccaccggcggggcggggcccgggtggccctgaagatcatcaagaatgtggagaagtacaaggaggccgcccggctggagatcaacgtgctggagaagatcaatgagaaggaccctgacaacaagaacctgtgtgtgcagatgtttgactggtttgactaccacggccacatgtgcatcagctttgagctgctgggcctgagcacctttgacttcctgaaggacaacaactacctgccctaccccatccaccaggtgcgccacatggccttccagctgtgccaggccgtgaagttcctgcatgacaacaagctgacccacacagacctgaagccagagaacatcctgtttgtgaacagcgactatgagctgacctacaacctggagaagaagagagatgagaggtctgtgaagagcacagctgtgcgggtggtggactttggcagcgccacctttgaccacgagcaccacagcaccatcgtgtccaccaggcactaccgggcccctgaggtgatcctggagctgggctggagccagccctgtgatgtgtggagcatcggctgcatcatctttgagtactacgtgggcttcaccctcttccagacccatgacaaccgggagcacctggccatgatggagcgcatcctgggccccatccccagcaggatgatcaggaagaccaggaagcagaagtacttctaccggggccgcctggactgggatgagaacaccagcgctggccgctacgtgcgggagaactgcaagcccctgcggcgctacctgaccagcgaggccgaggagcaccaccagctgtttgacctgattgagagcatgctggagtatgagcccgccaagaggctgaccctgggggaggccctgcagcaccccttctttgcccggctgcgggcagagccccccaacaagctgtgggacagcagccgggacatcagcaggtag

SEQ ID NO: 285725 - DNA, 1497 bp, Artificial Sequence
  derived and/or modified sequence
atgccccacccccggcgctaccacagcagcgagcggggcagccggggcagctaccgggagcactaccgcagcaggaagcacaagagaagaagaagccgctcctggagcagcagcagtgacaggaccaggagaagaagaagagaggacagctaccacgtgcgcagccgcagcagctatgatgacaggagcagtgaccggcgggtgtatgaccggcgctactgcggcagctacagaagaaatgactacagccgggacagaggagatgcctactatgacacagactaccgccacagctatgagtaccagcgggagaacagcagctaccgcagccagaggagcagcaggaggaagcacagaagaagaagaagaagaagcaggaccttcagccgcagcagcagccacagcagcagaagagccaagtctgtggaggatgatgctgagggccacctgatctaccacgtgggggactggctgcaggagagatatgagatcgtgtccaccctgggggagggcaccttcggccgggtggtgcagtgtgtggaccacagaagaggaggagcccgggtggccctgaagatcatcaagaatgtggagaagtacaaggaggccgcccggctggagatcaacgtgctggagaagatcaatgagaaggaccctgacaacaagaacctgtgtgtgcagatgtttgactggtttgactaccacggccacatgtgcatcagctttgagctgctgggcctgagcacctttgacttcctgaaggacaacaactacctgccctaccccatccaccaggtgcgccacatggccttccagctgtgccaggccgtgaagttcctgcatgacaacaagctgacccacacagacctgaagccagagaacatcctgtttgtgaacagcgactatgagctgacctacaacctggagaagaagagagatgagaggtctgtgaagagcacagctgtgcgggtggtggactttggaagtgccacctttgaccacgagcaccacagcaccatcgtgtccaccaggcactaccgggcccctgaggtgatcctggagctgggctggagccagccctgtgatgtgtggagcatcggctgcatcatctttgagtactacgtgggcttcaccctcttccagacccatgacaaccgggagcacctggccatgatggagcgcatcctgggccccatccccagcaggatgatcaggaagaccaggaagcagaagtacttctaccggggccgcctggactgggatgagaacaccagcgctggccgctacgtgcgggagaactgcaagcccctgcggcgctacctgaccagcgaggccgaggagcaccaccagctgtttgacctgattgaatccatgctggagtatgagcccgccaagaggctgaccctgggggaggccctgcagcaccccttctttgcccggctgcgggcagagccccccaacaagctgtgggacagcagccgggacatcagcaggtag

SEQ ID NO: 285726 - DNA, 1494 bp, Artificial Sequence
  derived and/or modified sequence
atgccccacccccggcggtaccacagcagcgagcggggcagccggggttcctatcgcgagcattacagatcgaggaaacacaagcgccgcaggagtaggtcttggtctagttcatctgataggactagacggcgacgacgcgaggatagctaccacgtgaggagcaggtcttacgatgaccggagtagtgaccgacgcgtttacgacaggcgatattgtgggtcttatagacgaaacgactatagcagggacaggggtgatgcttattatgataccgactataggcattcatacgagtatcagagagagaatagcagctaccgttcacaaagatccagtagacggaagcacagaaggcggcgtaggagatctcgaaccttctcccggagttcttcccacagttccagacgtgcaaaaagcgtggaggatgacgccgaaggtcacttgatataccacgttggcgactggctgcaagagagatatgagattgtttcgacccttggagaagggaccttcgggcgcgtcgttcagtgcgtggaccacagacgtggaggagcaagagtggcactgaaaatcattaaaaatgttgaaaagtataaggaagctgctcgtctcgagattaatgtcttggaaaagatcaatgagaaggatccagacaacaagaatctgtgcgtccagatgtttgattggtttgattatcatggacacatgtgtatttcgtttgagctgctcggcctgtcaacctttgattttctgaaagataacaattacctgccatacccgatacaccaggttaggcacatggcttttcagctgtgtcaggcggttaagttcctccatgataacaaattgacgcacactgacctgaaacccgaaaatatcctgttcgtcaatagcgattatgaattaacttacaacctggaaaagaagcgcgacgaacggagcgtgaagtccaccgctgtccgggtggtggacttcggctcagccacctttgatcatgagcaccactcgacaatcgtttctaccaggcactatcgcgcacccgaagtgatcctggaactcggttggagccagccctgtgacgtatggagcattggctgcatcatcttcgaatactatgtggggtttacgctgttccagacccacgacaatcgcgagcacctcgcgatgatggagaggattctgggaccaatcccaagcagaatgattcgtaagacacggaagcagaagtacttttatcgcgggaggctggactgggacgaaaacacctctgctggccggtatgttagggaaaattgtaaacccctgcgccggtatctgactagcgaggccgaggaacatcaccagctgtttgacctgattgaatctatgctggagtacgaacctgccaaaaggttgaccctgggagaggccctgcagcacccgttcttcgctagactgcgggcagagccgcctaacaagctgtgggactccagccgcgacatatcaaggtag

SEQ ID NO: 285727 - DNA, 1497 bp, Artificial Sequence
  derived and/or modified sequence
atgccccacccccggcggtaccacagcagcgagcggggcagccggggaagctacagggaacattaccgctcacggaaacacaaaaggcgcaggtcccgcagctggtcatcgtctagtgaccggacccgccggcgaagaagggaggattcttaccatgtcagatcacgctccagctacgatgatcgaagtagtgacagaagggtgtacgatcgcaggtattgcgggtcctatcggaggaacgattatagccgagaccgcggtgacgcctattatgacacagactatagacatagctatgagtatcaacgtgagaacagtagctatagaagtcagaggtctagcagacgaaaacaccgacggaggcggaggcggagtcgcacattctctcggtcttcgtctcactcctctcgcagggccaagagcgtcgaagatgatgccgagggacatctgatataccatgtcggagattggctacaagaacgttacgagattgtgtccactctgggagaaggcacctttggtagagtggtccagtgtgtggatcaccggaggggcggggcaagggtcgctctcaaaatcatcaaaaatgtcgagaaatataaggaggccgcacgcttggagataaacgtgctggagaaaattaacgaaaaagatccagacaacaaaaatctctgtgtccaaatgtttgactggtttgactaccacggccacatgtgtatctctttcgagctcctgggccttagcaccttcgacttcctgaaagataacaactatttgccctacccaatccaccaggtgagacatatggctttccagctttgtcaagccgtgaagttcctgcacgacaacaagctgacccacactgatctgaagccagaaaacattcttttcgtcaactccgactacgagcttacttacaacctcgagaagaaaagagacgagaggtcagtcaaatccactgcggtccgggtggtggacttcgggtccgctacctttgatcatgagcatcacagcacaattgtgtctaccaggcactatcgcgcacccgaagtaatccttgagctaggatggagccagccgtgtgacgtgtggtcaataggatgcataatctttgaatattatgtcggattcacactttttcagacccatgacaaccgcgaacacctggcgatgatggagaggattttgggccctattccatcaagaatgatccgcaaaacaagaaagcagaagtatttttacagaggaaggcttgattgggacgagaacactagtgccggtaggtatgtgcgggagaattgtaaacccctgcgccgatacttgaccagcgaggccgaggaacaccaccagctgttcgatctcatcgagagcatgttagagtacgaacctgccaaaaggcttaccctaggagaggcacttcagcaccccttcttcgccaggcttcgagccgaaccaccgaataagctgtgggacagtagccgggacatttccagatag

SEQ ID NO: 285728 - DNA, 1494 bp, Artificial Sequence
  derived and/or modified sequence
atgccccaccctaggagataccactcgagtgaacgcggttcacgcggatcttatcgcgaacattatagatctcgtaagcataagaggcgtcgatccaggtcgtggagcagttcatccgaccggaccaggagacgtcgcagggaagattcttatcatgtgcggtctcggtcctatgacgaccgtagcagcgacaggcgtgtgtacgacaggaggtactgcggctcctacaggcgaaacgattactcaagggacaggggggatgcctactacgacacagattaccgccactcctacgaatatcaaagggaaaacagctcctaccggtcacagcgcagctctcgaagaaaacaccgtcgacggcgaaggaggtctcggaccttttcccgctccagttcccatagtagcaggagagcaaaatcagtggaggacgatgccgagggtcacctcatctaccatgtgggagactggctacaggagcgatacgaaattgtttccacgctcggggagggaacattcgggagggtcgtccaatgtgtggatcacagacggggaggagcccgagtggctctcaagatcattaagaacgtagaaaagtacaaagaggccgcacgcctggagatcaatgtgctggagaagatcaatgagaaagaccctgacaataagaacctgtgtgtgcagatgtttgattggtttgactaccacggtcatatgtgtatttccttcgagctgctaggactgtcaacctttgactttctaaaggacaataactacctgccgtaccctatccaccaggtgaggcacatggcctttcaattatgccaggccgtaaagttcctacacgacaacaagcttacgcacaccgacctgaagcctgagaatatattgtttgtgaactccgattacgagcttacatacaacctggagaaaaaacgggatgagagatcagtaaagtctaccgccgtgcgagttgtcgattttggatctgccacattcgaccacgaacatcatagtacaattgtgtccacccggcattaccgagccccagaagtaattctggaactcggctggagccagccctgtgacgtatggtctattggttgtattatattcgagtattatgtgggcttcacattattccaaacacatgataatagagagcatttagccatgatggagcggatcttgggacccatcccaagtaggatgatacgaaagaccagaaagcagaaatacttctatcgtgggagacttgactgggatgaaaatacttccgctgggagatatgtgcgagagaactgcaagcccctccggaggtacctgaccagtgaggctgaggaacaccaccagttgtttgacctgatagagtctatgctggagtatgagcctgcaaaaaggctaactctgggcgaggccctccaacaccccttttttgccaggttgcgagcagagccacctaacaaactgtgggactcatcacgagatatctcgagatag

SEQ ID NO: 285729 - DNA, 1497 bp, Artificial Sequence
  derived and/or modified sequence
atgccacacccccgtcggtaccattctagtgagcgaggatctcgagggtcttacagggagcactaccgctctcgaaagcacaagcgcaggaggagccgatcgtggagtagttcttctgaccgaacccggcgtcggagacgggaagactcatatcacgtgcggagtaggtccagctacgacgacaggtccagtgaccggcgtgtgtacgatcgtagatattgtggttcctaccgtagaaacgactacagccgagacaggggtgacgcgtattacgacaccgactaccgacattcttatgaataccaaagggagaatagttcctacaggagtcagcggtccagtcgcaggaagcacaggcgtcgccgtcgaagaagccgcaccttcagtagatcgtcttctcactcctctaggagggcaaaatcagtcgaagatgacgctgagggtcacctcatctaccatgtcggcgactggctccaagagagatatgaaatcgtatctacactgggagaggggacttttggtcgcgtggtgcagtgcgttgaccacaggcgaggtggcgcacgagtggcattgaagatcataaagaatgtggagaaatacaaggaagctgccaggttagagattaacgtcctagaaaaaatcaatgaaaaggatcctgataacaaaaatttgtgtgtacagatgttcgattggtttgactatcatggtcacatgtgtatctcttttgagttgttggggctgagcaccttcgattttttgaaagacaacaactatctaccgtaccctatacatcaggtccgacacatggcttttcaattgtgtcaggctgtgaagtttctgcacgataacaaattgacccacacggatctcaaaccagaaaatattttattcgtcaatagcgattacgaactgacttacaatttggagaagaagagagacgagagatccgtgaagtctactgcggtaagggtggtggacttcggctccgcaacgtttgaccacgagcaccattccaccatcgtgtcaacgcgacactatcgagctccagaagtgattcttgagcttggatggtcgcagccatgcgatgtgtggtccattggatgcataatttttgaatactatgtgggctttactctctttcagacccatgataacagggagcaccttgcaatgatggagcggattctgggtcccattccgagtcggatgattcgtaaaacccggaagcagaaatacttctaccggggacggctcgactgggacgaaaatacatccgccggacggtatgttcgtgagaactgcaaacccctgcgaaggtacttgacctccgaagcagaagagcaccaccagctgttcgatctcattgaaagcatgctagagtatgagccggctaagaggcttaccttgggtgaagctctgcagcaccccttttttgcacgcctgagggcagaacctcctaacaagctatgggactcctcgcgcgacatatctcggtag

SEQ ID NO: 285730 - DNA, 2120 bp, Artificial Sequence
  derived and/or modified sequence
cggcggcggcggagcggagaggccagagccggagaccgagctgggatcgggccccgggcgggggcggtgcgagcggcgccaagcagatcttaggggcggggacggagccggggcgggcgggactgaagcggagcccgggaacggggcgggaggtcccagggtcccgggttgggggggtggagcagcatttcgtcgccgcgggggtgccgggactccggccgcagtgtcgccgccatcacggacttcctgtgggacaagcgcacgggcctcgccgccagaacgatgccgcatcctcgaaggtaccactcctcagagcgaggcagccgggggagttaccgtgaacactatcggagccgaaagcataagcgacgaagaagtcgctcctggtcaagtagtagtgaccggacacgacggcgtcggcgagaggacagctaccatgtccgttctcgaagttatgatgatcgttcgtccgaccggagggtgtatgaccggcgatactgtggcagctacagacgcaacgattatagccgggatcggggagatgcctactatgacacagactatcggcattcctatgaatatcagcgggagaacagcagttaccgcagccagcgcagcagccggaggaagcacagacggcggaggaggcgcagccggacatttagccgctcatcttcgcacagcagccggagagccaagagtgtagaggacgacgctgagggccacctcatctaccacgtcggggactggctacaagagcgatatgaaatcgttagcaccttaggagaggggaccttcggccgagttgtacaatgtgttgaccatcgcaggggtggggctcgagttgccctgaagatcattaagaatgtggagaagtacaaggaagcagctcgacttgagatcaacgtgctagagaaaatcaatgagaaagaccctgacaacaagaacctctgtgtccagatgtttgactggtttgactaccatggccacatgtgtatctcctttgagcttctgggccttagcaccttcgatttcctcaaagacaacaactacctgccctaccccatccaccaagtgcgccacatggccttccagctgtgccaggctgtcaagttcctccatgataacaagctgacacatacagacctcaagcctgaaaatattctgtttgtgaattcagactatgagctcacctacaacctagagaagaagcgagatgagcgcagtgtgaagagcacagctgtgcgggtggtagactttggcagtgccacctttgaccatgagcaccatagcaccattgtctccactcgccattaccgagcaccagaagtcatccttgagttgggctggtcacagccttgtgatgtgtggagtataggctgcatcatctttgaatactatgtgggattcaccctcttccagacccatgacaacagagagcatctagccatgatggaaaggatcttgggtcctatcccttcccggatgatccgaaagacaagaaagcagaaatatttttaccggggtcgcctggattgggatgagaacacatcagctgggcgctatgttcgtgagaactgcaaaccgctgcggcggtatctgacctcagaggcagaggaacaccaccagctcttcgatctgattgaaagcatgctagagtatgaaccagctaagcggctgaccttgggtgaagcccttcagcatcctttcttcgcccgccttcgggctgagccgcccaacaagttgtgggactccagtcgggatatcagtcggtgacgatcaggccctgggcccccctgcatcttttatagcagtgggtgtccagtccaggacactggtgcttttttatacaagagaacgagccagagttcactccttcctcctggctctctatatacctgtgaatatgtgaaatagtgtaaatatgaaagaacttgtacctatcacttcaacccctgccttgtacataatactattccatccacacagtttccaccctcacctgccccctcatacggagttggatgggggccgagtgaggtaaccaggtggcatctaccccatgttttataaggaattttgtacagtctttgtgaaataaaataacgtgcttcatttga

SEQ ID NO: 285731 - DNA, 1934 bp, Artificial Sequence
  derived and/or modified sequence
ccgcgggggtgccgggactccggccgcagtgtcgccgccatcacggacttcctgtgggacaagcgcacgggcctcgccgccagaacgatgccgcatcctcgaaggtaccactcctcagagcgaggcagccgggggagttaccgtgaacactatcggagccgaaagcataagcgacgaagaagtcgctcctggtcaagtagtagtgaccggacacgacggcgtcggcgagaggacagctaccatgtccgttctcgaagcagttatgatgatcgttcgtccgaccggagggtgtatgaccggcgatactgtggcagctacagacgcaacgattatagccgggatcggggagatgcctactatgacacagactatcggcattcctatgaatatcagcgggagaacagcagttaccgcagccagcgcagcagccggaggaagcacagacggcggaggaggcgcagccggacatttagccgctcatcttcgcacagcagccggagagccaagagtgtagaggacgacgctgagggccacctcatctaccacgtcggggactggctacaagagcgatatgaaatcgttagcaccttaggagaggggaccttcggccgagttgtacaatgtgttgaccatcgcaggggtggggctcgagttgccctgaagatcattaagaatgtggagaagtacaaggaagcagctcgacttgagatcaacgtgctagagaaaatcaatgagaaagaccctgacaacaagaacctctgtgtccagatgtttgactggtttgactaccatggccacatgtgtatctcctttgagcttctgggccttagcaccttcgatttcctcaaagacaacaactacctgccctaccccatccaccaagtgcgccacatggccttccagctgtgccaggctgtcaagttcctccatgataacaagctgacacatacagacctcaagcctgaaaatattctgtttgtgaattcagactatgagctcacctacaacctagagaagaagcgagatgagcgcagtgtgaagagcacagctgtgcgggtggtagactttggcagtgccacctttgaccatgagcaccatagcaccattgtctccactcgccattaccgagcaccagaagtcatccttgagttgggctggtcacagccttgtgatgtgtggagtataggctgcatcatctttgaatactatgtgggattcaccctcttccagacccatgacaacagagagcatctagccatgatggaaaggatcttgggtcctatcccttcccggatgatccgaaagacaagaaagcagaaatatttttaccggggtcgcctggattgggatgagaacacatcagctgggcgctatgttcgtgagaactgcaaaccgctgcggcggtatctgacctcagaggcagaggaacaccaccagctcttcgatctgattgaaagcatgctagagtatgaaccagctaagcggctgaccttgggtgaagcccttcagcatcctttcttcgcccgccttcgggctgagccgcccaacaagttgtgggactccagtcgggatatcagtcggtgacgatcaggccctgggcccccctgcatcttttatagcagtgggtgtccagtccaggacactggtgcttttttatacaagagaacgagccagagttcactccttcctcctggctctctatatacctgtgaatatgtgaaatagtgtaaatatgaaagaacttgtacctatcacttcaacccctgccttgtacataatactattccatccacacagtttccaccctcacctgccccctcatacggagttggatgggggccgagtgaggtaaccaggtggcatctaccccatgttttataaggaattttgtacagtctttgtgaaataaaataacgtgcttcatttgaccccca

SEQ ID NO: 285732 - DNA, 1599 bp, Artificial Sequence
  derived and/or modified sequence
acggcggcggcggcggagcggagaggccagagccggagaccgagctgggatcgggcccccatcacggacttcctgtgggacaagcgcacgggcctcgccgccagaacgatgccgcatcctcgaaggtaccactcctcagagcgaggcagccgggggagttaccgtgaacactatcggagccgaaagcataagcgacgaagaagtcgctcctggtcaagtagtagtgaccggacacgacggcgtcggcgagaggacagctaccatgtccgttctcgaagcagttatgatgatcgttcgtccgaccggagggtgtatgaccggcgatactgtggcagctacagacgcaacgattatagccgggatcggggagatgcctactatgacacagactatcggcattcctatgaatatcagcgggagaacagcagttaccgcagccagcgcagcagccggaggaagcacagacggcggaggaggcgcagccggacatttagccgctcatcttcgatgaaatcgttagcaccttaggagaggggaccttcggccgagttgtacaatgtgttgaccatcgcaggggtggggctcgagttgccctgaagatcattaagaatgtggagaagtacaaggaagcagctcgacttgagatcaacgtgctagagaaaatcaatgagaaagaccctgacaacaagaacctctgtgtccagatgtttgactggtttgactaccatggccacatgtgtatctcctttgagcttctgggccttagcaccttcgatttcctcaaagacaacaactacctgccctaccccatccaccaagtgcgccacatggccttccagctgtgccaggctgtcaagttcctccatgataacaagctgacacatacagacctcaagcctgaaaatattctgtttgtgaattcagactatgagctcacctacaacctagagaagaagcgagatgagcgcagtgtgaagagcacagctgtgcgggtggtagactttggcagtgccacctttgaccatgagcaccatagcaccattgtctccactcgccattaccgagcaccagaagtcatccttgagttgggctggtcacagccttgtgatgtgtggagtataggctgcatcatctttgaatactatgtgggattcaccctcttccagacccatgacaacagagagcatctagccatgatggaaaggatcttgggtcctatcccttcccggatgatccgaaagacaagaaagcagaaatatttttaccggggtcgcctggattgggatgagaacacatcagctgggcgctatgttcgtgagaactgcaaaccgctgcggcggtatctgacctcagaggcagaggaacaccaccagctcttcgatctgattgaaagcatgctagagtatgaaccagctaagcggctgaccttgggtgaagcccttcagcatcctttcttcgcccgccttcgggctgagccgcccaacaagttgtgggactccagtcgggatatcagtcggtgacgatcaggccctgggcccccctgcatcttttatagcagtgggtgtccagtccaggacactggtgcttttttatacaaga

SEQ ID NO: 285733 - DNA, 1494 bp, Artificial Sequence
  derived and/or modified sequence
atgccccaccccagaagataccacagcagcgagagaggcagcagaggcagctacagagagcactacagaagcagaaagcacaagagaagaagaagcagaagctggagcagcagcagcgacagaaccagaagaagaagaagagaggacagctaccacgtgagaagcagaagctacgacgacagaagcagcgacagaagagtgtacgacagaagatactgcggcagctacagaagaaacgactacagcagagacagaggcgacgcctactacgacaccgactacagacacagctacgagtaccagagagagaacagcagctacagaagccagagaagcagcagaagaaagcacagaagaagaagaagaagaagcagaaccttcagcagaagcagcagccacagcagcagaagagccaagagcgtggaggacgacgccgagggccacctgatctaccacgtgggcgactggctgcaggagagatacgagatcgtgagcaccctgggcgagggcaccttcggcagagtggtgcagtgcgtggaccacagaagaggcggcgccagagtggccctgaagatcatcaagaacgtggagaagtacaaggaggccgccagactggagatcaacgtgctggagaagatcaacgagaaggaccccgacaacaagaacctgtgcgtgcagatgttcgactggttcgactaccacggccacatgtgcatcagcttcgagctgctgggcctgagcaccttcgacttcctgaaggacaacaactacctgccctaccccatccaccaggtgagacacatggccttccagctgtgccaggccgtgaagttcctgcacgacaacaagctgacccacaccgacctgaagcccgagaacatcctgttcgtgaacagcgactacgagctgacctacaacctggagaagaagagagacgagagaagcgtgaagagcaccgccgtgagagtggtggacttcggcagcgccaccttcgaccacgagcaccacagcaccatcgtgagcaccagacactacagagcccccgaggtgatcctggagctgggctggagccagccctgcgacgtgtggagcatcggctgcatcatcttcgagtactacgtgggcttcaccctgttccagacccacgacaacagagagcacctggccatgatggagagaatcctgggccccatccccagcagaatgatcagaaagaccagaaagcagaagtacttctacagaggcagactggactgggacgagaacaccagcgccggcagatacgtgagagagaactgcaagcccctgagaagatacctgaccagcgaggccgaggagcaccaccagctgttcgacctgatcgagagcatgctggagtacgagcccgccaagagactgaccctgggcgaggccctgcagcaccccttcttcgccagactgagagccgagccccccaacaagctgtgggacagcagcagagacatcagcagatag

SEQ ID NO: 285734 - DNA, 1497 bp, Artificial Sequence
  derived and/or modified sequence
atgccccaccccagaagataccacagcagcgagagaggcagcagaggcagctacagagagcactacagaagcagaaagcacaagagaagaagaagcagaagctggagcagcagcagcgacagaaccagaagaagaagaagagaggacagctaccacgtgagaagcagaagcagctacgacgacagaagcagcgacagaagagtgtacgacagaagatactgcggcagctacagaagaaacgactacagcagagacagaggcgacgcctactacgacaccgactacagacacagctacgagtaccagagagagaacagcagctacagaagccagagaagcagcagaagaaagcacagaagaagaagaagaagaagcagaaccttcagcagaagcagcagccacagcagcagaagagccaagagcgtggaggacgacgccgagggccacctgatctaccacgtgggcgactggctgcaggagagatacgagatcgtgagcaccctgggcgagggcaccttcggcagagtggtgcagtgcgtggaccacagaagaggcggcgccagagtggccctgaagatcatcaagaacgtggagaagtacaaggaggccgccagactggagatcaacgtgctggagaagatcaacgagaaggaccccgacaacaagaacctgtgcgtgcagatgttcgactggttcgactaccacggccacatgtgcatcagcttcgagctgctgggcctgagcaccttcgacttcctgaaggacaacaactacctgccctaccccatccaccaggtgagacacatggccttccagctgtgccaggccgtgaagttcctgcacgacaacaagctgacccacaccgacctgaagcccgagaacatcctgttcgtgaacagcgactacgagctgacctacaacctggagaagaagagagacgagagaagcgtgaagagcaccgccgtgagagtggtggacttcggcagcgccaccttcgaccacgagcaccacagcaccatcgtgagcaccagacactacagagcccccgaggtgatcctggagctgggctggagccagccctgcgacgtgtggagcatcggctgcatcatcttcgagtactacgtgggcttcaccctgttccagacccacgacaacagagagcacctggccatgatggagagaatcctgggccccatccccagcagaatgatcagaaagaccagaaagcagaagtacttctacagaggcagactggactgggacgagaacaccagcgccggcagatacgtgagagagaactgcaagcccctgagaagatacctgaccagcgaggccgaggagcaccaccagctgttcgacctgatcgagagcatgctggagtacgagcccgccaagagactgaccctgggcgaggccctgcagcaccccttcttcgccagactgagagccgagccccccaacaagctgtgggacagcagcagagacatcagcagatag

SEQ ID NO: 285735 - DNA, 123 bp, Artificial Sequence
  derived and/or modified sequence
atgtccaagactaataagtccaaaagcggctcccgctcgtcccgatcacgatccgcttctcgttctcgtagtaggtcattctctaagtctagaagcagaagccgatccttatcacggtcttag

SEQ ID NO: 285736 - DNA, 1017 bp, Artificial Sequence
  derived and/or modified sequence
atgaggcatctctatgtggtggtggacggatctagaacgatggaggaccaagatctgaagccgaaccgcctgacatgcactttgaaactcctggaatatttcgtagaagagtacttcgaccagaatccgatctcgcagattggcatcattgtgactaagtccaagcgagctgagaaattgactgaactcagcggaaacccacgaaagcacataactagcctcaagaaggcagtcgatatgacttgccacggcgaaccttccctttacaattctctgagcattgccatgcagacgcttaagcatatgccagggcataccagtagagaagttctgataatattctcctcattgaccacttgcgacccgtctaatatctacgatttaatcaagacactgaaagccgccaagatacgcgtgtctgtcataggactttctgccgaagtgagggtatgcactgtcctagcaagggagacaggaggcacctatcatgtgattctggacgaatcgcactacaaagagctcctaacgcaccacgtgagccccccgccagcttcttctagcagcgagtgcagcctgattcgtatggggtttccacagcacacgatcgcttccctctctgaccaggacgctaaaccctcttttagcatggctcatctggacgggaatactgaaccaggcctcaccctgggggggtatttttgccctcaatgtagagcaaagtactgcgagctgcccgttgagtgcaagatatgcggcctaacccttgtctctgccccccacctagctcgcagttaccaccacctgttcccactcgacgcgttccaagagataccactcgaagagtataatggagagcgtttctgttacggctgtcagggggaactcaaggaccagcacgtgtacgtctgcgcagtgtgccaaaatgtcttttgtgtcgactgcgacgtgttcgtgcatgactcactgcactgttgtcctggttgtatccataagatccccgcgccatctggggtgtag

SEQ ID NO: 285737 - DNA, 1956 bp, Artificial Sequence
  derived and/or modified sequence
ggctagctaggcggctgggagcgttttcgtggcggggaacggaggttgaattgccctgcctgggctcatagggaaggaggatgtgaaggagcttgtgaaggcagaggaagattattgaataataaaatacagttttgaaaaaaatggatgaagaacctgaaagaactaagcgatgggaaggaggctatgaaagaacatgggagattcttaaagaagatgaatctggatcacttaaagctacaatagaagacattctattcaaggcaaagagaaaaagatgcgccacctttatgtggtagtagatggatcaagaacaatggaagaccaagatttaaagcctaatagactgacgtgtactttaaagttgttggaatactttgtagaggaatattttgatcaaaatcctattagtcagattggaataattgtaactaagagtaaaagagctgaaaaattgactgaactttcaggaaacccaagaaaacatataacgtctttgaagaaagctgtggatatgacctgccatggagagccatctctttataattccctaagcatagctatgcagactctaaaacacatgcctggacatacaagtcgagaagtactaatcatctttagcagccttacaacttgcgatccatctaatatttatgatctaatcaagaccctaaaggcagctaaaattagagtatctgttattggattgtctgcagaagttcgcgtttgcactgtacttgctcgtgaaactggtggcacgtaccatgttattttagatgaaagccattacaaagagttgctcacacatcatgttagtcctcctcctgctagctcaagttctgaatgctcacttattcgtatgggatttcctcagcacaccattgcttctttatctgaccaggatgcaaaaccctctttcagcatggcgcatttggatggcaatactgagccagggcttacattaggaggctatttctgcccacagtgtcgggcaaagtactgtgagctacctgttgagtgtaaaatctgtggtcttactttggtgtctgctccccacttggcacggtcttaccatcatttgtttcctttggatgcttttcaagaaattcccctagaagaatataatggagaaagattttgttatggatgtcagggggaattgaaagaccaacatgtttatgtttgtgctgtgtgccaaaatgttttctgtgtggactgtgatgtttttgttcatgattctctacactgttgccctggctgtattcataagattccagctccttcaggtgtttgattccagcatgtagtatacattgtatgtgttaaaaagaaatttgcaactgtgaataaaaggacttctttagaagaagcttcatttaaaacatgaaaggataatctgacttaagaaactttttgctaagaaaaggtaatattttattaaattttaaatttgtgttgtcacagaaatacctgaaattcagtagtacttcattcaattaattttgttttctattattttgagttatactgttttcaaagtcattatgcagtatgtataaacttataagaattaaattgatgtgataattttatgtttttataattaaatatagaatctttatgatttatgttaattcattaatttagtgtaagaagaaagttaagtctgaatgtaaattcagtgtaagatgaaaatttatcaatacttatgaaattaggctgggcgctgtggctcacacctgtaatcccaacactttgggaggctgaggtgggcagatcacctgaggtcaggagttcgagaccagcctggccaacatggtgaaaccccgtcactactaaaaatacaaaaaataattagccgggcatggtggttcacgcctggagtcccagctacttgggaggctgaggcaggagaatcgcttgaacccaggaggcggaggttgcagtgagccaaga

SEQ ID NO: 285738 - DNA, 1017 bp, Artificial Sequence
  derived and/or modified sequence
atgaggcacctgtatgtggtggtggatggcagcaggaccatggaggaccaggacctgaagcccaaccggctgacctgcaccctgaagctgctggagtactttgtggaggagtactttgaccagaaccccatcagccagatcggcatcatcgtgaccaagagcaagagagctgagaagctgacagagctgagcggcaaccccaggaagcacatcaccagcctgaagaaggctgtggacatgacctgccacggggagcccagcctgtacaacagcctgagcatcgccatgcagaccctgaagcacatgcctggccacaccagccgggaggtgctgatcatcttcagcagcctgaccacctgtgaccccagcaacatctatgacctgatcaagaccctgaaggccgccaagatccgggtgtctgtcatcggcctgtctgctgaggtgcgggtgtgcaccgtgctggcccgggagaccggcggcacctaccacgtgatcctggatgagagccactacaaggagctgctgacccaccacgtgtccccacctccagccagcagcagcagtgaatgttccctcatccgcatgggcttcccccagcacaccatcgccagcctgagtgaccaggatgccaagcccagcttctccatggcccacctggatggcaacacagagcccggcctgaccctgggcggctacttctgcccccagtgccgggccaagtactgtgagctgcctgtggagtgcaagatctgtggcctgaccctggtgtctgccccccacctggcccggagctaccaccacctgttccccctggatgccttccaggagatccccctggaggagtacaatggagagcgcttctgctacggctgccagggcgagctgaaggaccagcacgtgtatgtgtgtgctgtgtgccagaatgtgttctgtgtggactgtgatgtgtttgtgcatgacagcctgcactgctgccccggctgcatccacaagatcccagcccccagcggcgtgtag

SEQ ID NO: 285739 - DNA, 1017 bp, Artificial Sequence
  derived and/or modified sequence
atgcggcacctgtacgtggtggtggacggcagccggaccatggaggatcaggacctgaagcctaatcggttaacatgcacactgaaactcctggaatattttgtggaggaatactttgaccagaacccgatcagccagatcggcattatcgttactaagtctaagagagctgagaagctcactgaactgtccggtaatcctaggaagcatataacctccctgaaaaaagctgtcgacatgacctgccacggcgaacctagtctgtataacagtctgtccatcgcaatgcagaccctcaaacatatgccaggccatacatcccgcgaggtcttaattattttttccagtctgaccacgtgtgatccttctaatatctacgatctgattaagactctcaaagcagctaaaatccgcgtatccgtaataggtctgtccgccgaggtccgggtgtgcacagtactggctcgggaaaccggaggcacctatcatgtcattctggacgaatctcactacaaggaactgcttacacatcatgtgtcgcccccacctgcatcatccagctccgaatgttccctgattcgcatgggattccctcagcacacaattgcaagtctttctgaccaggatgctaaacctagctttagcatggcccacttagatggtaacacggagcctggccttactctgggcggctatttttgtccccaatgcagagccaaatactgcgagttacctgtggaatgcaagatttgtggcctcacactggtcagcgccccacacctggccaggtcctaccaccacctgtttccccttgatgccttccaggagatccccctagaggagtacaatggcgaacgcttttgctacggatgccagggagagctgaaggatcagcatgtgtacgtgtgtgccgtctgtcagaacgtcttctgtgttgactgcgacgtatttgtgcacgatagcctccactgttgccccggctgcattcataaaattcccgctccaagcggagtctag

SEQ ID NO: 285740 - DNA, 1017 bp, Artificial Sequence
  derived and/or modified sequence
atgcgtcatctatacgtagtcgttgacggttcacgcaccatggaggaccaggaccttaaacctaatcgcctcacatgtactctgaaactgctcgagtattttgtggaggaatactttgatcagaatcctatcagccagatcggaataatagtgacgaaatctaagagagcagaaaagctcaccgaacttagtgggaacccaagaaaacacattacatccttgaaaaaagctgtcgatatgacatgtcacggtgagccaagcttgtataattcactctccattgcaatgcaaaccttgaagcacatgccgggacacactagtcgggaggttcttattatcttcagctcccttactacatgtgaccccagcaatatttatgacctcattaaaaccctgaaggctgccaagattagagtgtcagtgatcggtttgtcagcagaggtgcgtgtctgtaccgtgttggcacgggagactggcggtacgtatcacgtgattctcgacgagtcccattacaaggagttgctgacccatcacgtgtctccccctccagcatcctcctcctccgaatgcagtctgattagaatgggattcccccaacacaccatcgcatccctctctgaccaggacgcaaaaccatccttttcaatggcccacctggatggcaatacggaaccaggcttgaccctgggaggatacttctgccctcaatgtcgagccaagtattgtgagttgccagttgaatgtaaaatctgtggacttacactggtgagcgccccacatcttgccagatcataccatcatctcttccctttagacgctttccaagaaatcccattagaggaatacaacggcgaaagattctgttacggctgccagggagaactcaaggaccagcatgtgtacgtgtgtgccgtgtgccagaacgtcttctgcgttgattgcgatgttttcgttcatgactctctccattgctgccccggttgcattcacaaaatacctgcacctagcggcgtctag

SEQ ID NO: 285741 - DNA, 1017 bp, Artificial Sequence
  derived and/or modified sequence
atgagacacctgtacgtggtggtggacggcagcagaaccatggaggaccaggacctgaagcccaacagactgacctgcaccctgaagctgctggagtacttcgtggaggagtacttcgaccagaaccccatcagccagatcggcatcatcgtgaccaagagcaagagagccgagaagctgaccgagctgagcggcaaccccagaaagcacatcaccagcctgaagaaggccgtggacatgacctgccacggcgagcccagcctgtacaacagcctgagcatcgccatgcagaccctgaagcacatgcccggccacaccagcagagaggtgctgatcatcttcagcagcctgaccacctgcgaccccagcaacatctacgacctgatcaagaccctgaaggccgccaagatcagagtgagcgtgatcggcctgagcgccgaggtgagagtgtgcaccgtgctggccagagagaccggcggcacctaccacgtgatcctggacgagagccactacaaggagctgctgacccaccacgtgagccccccccccgccagcagcagcagcgagtgcagcctgatcagaatgggcttcccccagcacaccatcgccagcctgagcgaccaggacgccaagcccagcttcagcatggcccacctggacggcaacaccgagcccggcctgaccctgggcggctacttctgcccccagtgcagagccaagtactgcgagctgcccgtggagtgcaagatctgcggcctgaccctggtgagcgccccccacctggccagaagctaccaccacctgttccccctggacgccttccaggagatccccctggaggagtacaacggcgagagattctgctacggctgccagggcgagctgaaggaccagcacgtgtacgtgtgcgccgtgtgccagaacgtgttctgcgtggactgcgacgtgttcgtgcacgacagcctgcactgctgccccggctgcatccacaagatccccgcccccagcggcgtgtag

SEQ ID NO: 285742 - protein, 135 aa, Artificial Sequence
  derived and/or modified sequence
MQPRWAQGATMWLGVLLTLLLCSSLEGQENSFTINSVDMKSLPDWTVQNGKNLTLQCFADVSTTSHVKPQHQMLFYKDDVLFYNISSMKSTESYFIPEVRIYDSGTYKCTVIVNNKEKTTAEYQVLVEGVPSPRV

SEQ ID NO: 285743 - DNA, 423 bp, Artificial Sequence
  derived and/or modified sequence
atgcttcaggcagccgacttcattgagcgaaccgagacagcgggagaattaagccgaggcctgatcggggtgctctcttcgcagatctcctggtgtctgttgaacgtcaatctgtccaagctccctacaagactgcaaaggctttcatgtagcgtcttaaactccagcccagccatgcgcgggggcgcccgggggaggcctcagctgaccctcgagagacccctcagacccggctgtcgacttcacagctgtagcgaggcggagaaagggggatttgtccggagaaaagaaattatcttatttccaccctgcgaggacccggcacgggggtggctcagcgctaatcccggccgcgagccatcccctggcatttgttggcacctgaacctcgggctgccatctctgcacaattgtgaagaatag

SEQ ID NO: 285744 - DNA, 579 bp, Artificial Sequence
  derived and/or modified sequence
tactctgtttccacatcactttaactccatgagcatcgaagcttctggaatcaacatgtttcttatgtttcttgcaggttcaagccttgagggtcaagaaaactctttcacaatcaacagtgttgacatgaagagcctgccggactggacggtgcaaaatgggaagaacctgaccctgcagtgcttcgcggatgtcagcaccacctctcacgtcaagcctcagcaccagatgctgttctataaggatgacgtgctgttttacaacatctcctccatgaagagcacagagagttattttattcctgaagtccggatctatgactcagggacatataaatgtactgtgattgtgaacaacaaagagaaaaccactgcagagtaccaggtgttggtggaaggagtgcccagtcccagggtgacactggacaagaaagaggccatccaaggtgggatcgtgagggtcaactgttctgtcccagaggaaaaggccccaatacacttcacaattgaaaaacttgaactaaatgaaaaaatggtcaagctgaaaagagagaagaattctcgagaccagaattttgt

SEQ ID NO: 285745 - DNA, 852 bp, Artificial Sequence
  derived and/or modified sequence
gaggagagtggctgcccaaggtggggtttgtcttttgccgtctgagtggcccctgggatgcagggcgggtttctcaacggtgacttgtgggcagtgccttctgctgagcgagtcatggcccgaaggcagaactaactgtgcctgcagtcttcactctcaggatgcagccgaggtgggcccaaggggccacgatgtggcttggagtcctgctgacccttctgctctgttcaagccttgagggtcaagaaaactctttcacaatcaacagtgttgacatgaagagcctgccggactggacggtgcaaaatgggaagaacctgaccctgcagtgcttcgcggatgtcagcaccacctctcacgtcaagcctcagcaccagatgctgttctataaggatgacgtgctgttttacaacatctcctccatgaagagcacagagagttattttattcctgaagtccggatctatgactcagggacatataaatgtactgtgattgtgaacaacaaagagaaaaccactgcagagtaccaggtgttggtggaaggagtgcccagtcccagggtgacactggacaagaaagaggccatccaaggtgggatcgtgagggtcaactgttctgtcccagaggaaaaggccccaatacacttcacaattgaaaaacttgaactaaatgaaaaaatggtcaagctgaaaagagagaagaattctcgagaccagaattttgtgatactggaattccccgttgaggaacaggaccgcgttttatccttccgatgtcaagctaggatcatttctgggatccatatgcagacctcagaatctaccaagagtgaactggtcaccgtgacgg

SEQ ID NO: 285746 - DNA, 580 bp, Artificial Sequence
  derived and/or modified sequence
tttttctgtgcagttaacgagtcgctatgtttcggatctgcgttacttccccggtatttgaaggcaggagcactgcagggcgggtttctcaacggtgacttgtgggcagtgccttctgctgagcgagtcatggcccgaaggcagaactaactgtgcctgcagtcttcactctcaggatgcagccgaggtgggcccaaggggccacgatgtggcttggagtcctgctgacccttctgctctgttcaagccttgagggtcaagaaaactctttcacaatcaacagtgttgacatgaagagcctgccggactggacggtgcaaaatgggaagaacctgaccctgcagtgcttcgcggatgtcagcaccacctctcacgtcaagcctcagcaccagatgctgttctataaggatgacgtgctgttttacaacatctcctccatgaagagcacagagagttattttattcctgaagtccggatctatgactcagggacatataaatgtactgtgattgtgaacaacaaagagaaaaccactgcagagtaccaggtgttggtggaaggagtgcccagtcccagggt

SEQ ID NO: 285747 - DNA, 2196 bp, Artificial Sequence
  derived and/or modified sequence
agcaggccacagggaggcttgggcacagtcagctttccgtcctgttgggaagcctgtttctgctttcagtgcctacgtggtgtcaggaacgccggtcacagtgaacgcctgcaggacccacactgctgcatcgtctctgtgggacagatactgaagccagggcttggcttaccctcgtgacagtctcccgaggatgttctagtgactggatcctttccagctggtgcctgggaaatggcagccactactaattcagccttgaagacagtaccgtgcctactcagcaccattacgtagaagacagaactcaagaggagccgccctgcctggagctagcctgggggtgagccagggtcccccaacccccgggatgaccgcggccagccgggccaacccctacagcatcgtgtcattggaggaggacgggctgcacctggtcaccatgtcgggcgccaacggcttcggcaacggcaaggtgcacacgcggcgcaggtgccgcaaccgcttcgtcaagaagaatggccagtgcaacattgcgttcgccaacatggacgagaagtcacagcgctacctggctgacatgttcaccacctgtgtggacatccgctggcgctacatgctgctcatcttctcgctggccttccttgcctcctggctgctgttcggcgtcatcttctgggtcatcgcggtggcacacggtgacctggagccggctgagggccacggccgcacaccctgtgtgatgcaggtgcacggcttcatggcggccttcctcttctccatcgagacgcagaccaccatcggctacgggctgcgctgtgtgacggaggagtgcctggtggccgtcttcatggtggtggcccagtccatcgtgggctgcatcatcgactccttcatgattggtgccatcatggccaagatggcaaggcccaagaagcgggcacagacgctgctgttcagccacaacgccgtggtggccctgcgtgacggcaagctctgcctcatgtggcgtgtgggcaacctgcgcaagagccacattgtggaggcccatgtgcgcgcgcagctcatcaagccgcgggtcaccgaggagggcgagtacatcccgctggaccagatcgacatcgatgtgggcttcgacaagggcctggaccgcatctttctggtgtcgcccatcaccatcttgcatgaaattgacgaggccagcccgctcttcggcatcagccggcaggacctggagacggacgactttgagatcgtggtcatcctggaaggcatggtggaggccacagccatgaccacccaggcccgcagctcctacctggccaatgagatcctgtggggtcaccgctttgagcccgtgctcttcgaggagaagaaccagtacaagattgactactcgcacttccacaagacctatgaggtgccctctacgccccgctgcagtgcgaaggatctggtagagaacaagttcctgctgcccagtgccaactccttctgctatgagaacgagctggccttcctgagccgtgacgaggaggatgaggcggacggagaccaggacggccgaagccgggatggcctcagcccccaggccaggcatgactttgacagactccaggctggcggcggggtcctggagcagcggccctacagacgggggtcagagatctgagccaaccttggccgacatgcagcatccacccctggccggggagaggccccgcggtcgctcaggggccctgggtttgagcagaacgggcccagtgccctgggttgcagactcagtagcgttttagtcgttttatgtttctttgcaaaggcctcagaaggttggccggagagggggcagccagagcggcagcccccggcctcagaggctatcacaggctcagggcaaagaagtggcctcctggggggccaggccacgggggccagggcttctgcctgaagatggagctgcagcctgcggggaagcagcccagctcgatggtgggcccagcctctgctgtccaaggctggctagctgcggtgctccttgctggtttttaacttggggagaaacaccgggtttcagctttctcgaccttagcttgggtgagactgtttacaaaaaaaaaaaaaaccatgcaattggagaaaaaaattttaattcatagggggcaaaaagaacaattagaattccatgggtctgccagg

SEQ ID NO: 285748 - DNA, 1050 bp, Artificial Sequence
  derived and/or modified sequence
ggatccaagctattgtcctgcccatggcttcccatctcaggacgctctctggccgctatcatcccagcagtggagttcagcccactactctgaaccagccgcaggtggctgcgatgggacggaagccatgaatggtgccggccctggccccgccgcagccgccccggtcccagtcccggtcccggtcccggactggcggcagttctgcgagctgcatgcgcaggcggccgccgtggactttgcgcacaagttctgccgtttcctgcgggacaacccagcttacgacacgcccgacgccggcgcctccttctcccgccacttcgccgccaacttcctggacgtcttcggcgaggaggtgcgccgcgtgctggtggctgggccgacgactcggggcgcggccgtgagcgcagaggccatggagccggagctcgcggacacctctgcactcaaggcggcgccctacggccactcgcggagctcggaggacgtgtccacgcacgcggccaccaaggcccgcgttcgcaagggcttctcgctgcgcaacatgagcctgtgcgtggtggacggcgtgcgcgacatgtggcaccggcgcgcctcgcccgagcccgacgcggcagctgccccgcgcaccgccgagccccgcgacaagtggacgcggcgcctgaggctgtcgcggacgctggctgccaaggtggagctggtggacattcaacgcgagggggcgctgcgcttcatggtggccgacgacgcggccgcgggctccgggggctcggctcagtggcagaagtgccgcctgctcctgcgcagggctgtggccgaggaacgcttccgcctggagttcttcgtgccgcccaaagcctccaggcccaaggtcagcatcccactgtcagccatcattgaggtccgcaccaccatgcccctggaaatgccagagaaggataacacattcgtcctcaaggtagagaatggagccgaatacatcttggagaccatcgactctctgcagaagcactcgtgggtagctgacatccagggctgcgtggaccccgg

SEQ ID NO: 285749 - DNA, 657 bp, Artificial Sequence
  derived and/or modified sequence
gcgcagtcgtgggaacagcgcggagcagtctgtcagcactgccttcaaaatgcacccagaatagattcacaattctaccatttctctcaaccgccactgtcaccaccttggtccaggcccccatcatctgagaagcaccaaaagaggcaaactgagatgcagacaaatgatcatccgtatgctgatcattttgaatagttttttaaaatatattctttctttaaaaagagaccaaaacctgtcaaaaaaatactaccgtggaaagctcataaatactacagtgtgaagaaccctgtgcttatcttcagtttatcatcagacatcttagggaagtttaataaagaacaccagtgaggagattgtggactgcctaatatatttcatcagaagagaaggctggagaattaagcagatgcagcaaaaagcagaaactgacttcaaaaaaaaccctctcagtagagaaagtgatattagattcctattgcaaaggatctaatgccagttaaattctcttttgctttcttgataaaacaggagaattgagaattaaatgaaaaggtaaatccttttaaagacctcagaagatggatctgtttgtttcaatctgcttttgaggttgtttgctatgtctttggctgatctaacaaaaacaaatat

SEQ ID NO: 285750 - protein, 219 aa, Artificial Sequence
  derived and/or modified sequence
MLACLTRGNLLDVLQEGFNEQQLQAYVAWVNAQLKKRPAVKPVQDLRQDLRDGVILAYLIEIVAGEKLSGVQLSPGNQQEMKNNVEKVLQFVASKKIRMHQTSAKDIVDGNLKSIMRLVLALAAHFKPGSSRTVNQGRDSRAPLQSHRPHCATAVAQGAAAALADVCHDMSRSGRDVFRYRQRNSSMDEEIENPYWSVRALVQQYEGQQRSPSESSCSR

SEQ ID NO: 285751 - protein, 121 aa, Artificial Sequence
  derived and/or modified sequence
  misc_feature (1)..(1): Xaa can be any naturally occurring amino acid
XRYFNPSGEPLELDSRFWELRDSIVQCELLMLRVLRFQVSFQHPHKNWLNRHSWQRTPVAVTAWALLRDSYHGALCLRFQAQHIAVAVLYLALQVYGVEVPAEVEAEKPWWQIYTMDTEIP

SEQ ID NO: 285752 - DNA, 508 bp, Artificial Sequence
  derived and/or modified sequence
gcggaggggggcctgcagcgcggggcccggagggcagccggcgcccgaagccagggtgcacttccgagtggcgaggttcatcatggaggcaggtgtcaagctagggatgcggtccattcccattgccactgcttgcaccatttaccataagttcttttgcgagaccaacctggacgcctatgacccttacctgattgccatgtcttcaatttacttggccggcaaagtggaagagcagcacctgcggactcgtgacatcatcaatgtgtccaacagatttataccatggacacagagatcccctaaggtcctggcccaggcctgcccaaagagaagcccaggatggtcggctgcctggggacattgtcaccacgtcgccatgacggctggtccccacaggaccagctgggaggactggttgtgctgctggagaagggctggagaaggcaatggcatgctgccgctttgccagtccctagaagtcgcggtgcaggtgatggtgggagcc

SEQ ID NO: 285753 - DNA, 573 bp, Artificial Sequence
  derived and/or modified sequence
caggtactttaacccaagcggtgagcccctggaattggactcccgcttctgggaactccgggacagcatcgtgcagtgtgagcttctcatgctgagagttctgcgcttccaggtctccttccagcatccacacaagaactggctgaaccgccacagctggcagcggacccctgttgccgtcaccgcctgggccctgctgcgggacagctaccatggggcgctgtgcctccgcttccaggcccagcacatcgccgtggcggtgctctacctggccctgcaggtctacggagttgaggtgcccgccgaggtcgaggctgagaagccgtggtggcagatttataccatggacacagagatcccctaaggtcctggcccaggcctgcccaaagagaagcccaggatggtcggctgcctggggacattgtcaccacgtcgccatgacggctggtccccacaggaccagctgggaggactggttgtgctgctggagaagggctggagaaggcaatggcatgctgccgctttgccagtccctagaagtcgcggtgcaggtgatggtgggagccgcgcctc

SEQ ID NO: 285754 - DNA, 429 bp, Artificial Sequence
  derived and/or modified sequence
atggaggcgggggtgaaactgggcatgcggagcataccgatcgccactgcttgcacaatctatcataaattcttctgtgagaccaacttggacgcatacgacccctatctcattgctatgtctagcatctatctggccggaaaagtcgaggaacaacacctgcggactcgtgatattataaacgtgagcaatcggtttatcccatggacccagcggtcacctaaagtgttggcacaggcctgcccaaaacggtcccccggctggagcgccgcctgggggcactgtcatcacgtggctatgacagcaggccctcatcgtacctcatgggaagactggttgtgctgttggcgacgcgctggggaggggaacggaatgctcccgctgtgtcagagtttggaggtagccgtacaggtgatggtgggagcctag

SEQ ID NO: 285755 - DNA, 366 bp, Artificial Sequence
  derived and/or modified sequence
tgaaggtatttcaatccgtccggagaacctctagagctcgactcccgtttctgggagcttagggactctattgtccagtgcgagctcttgatgctgagggtcctgagatttcaggtctcatttcaacatccccataagaattggctaaacagacactcttggcagcggacacccgtcgcggtcaccgcgtgggcgttgctgagagatagctatcatggggcgctgtgcctgaggttccaggctcagcacatcgctgtggcagtgctgtatctagctttgcaagtgtacggtgtggaggtgccagcagaagtggaggctgagaagccttggtggcaaatctataccatggatacagagattccatag

SEQ ID NO: 285756 - DNA, 429 bp, Artificial Sequence
  derived and/or modified sequence
atggaggccggcgtgaagctgggcatgaggagcatccccatcgccacagcctgcaccatctaccacaagttcttctgtgagaccaacctggatgcctatgacccctacctgattgccatgagcagcatctacctggccggcaaggtggaggagcagcacctgcggacccgggacatcatcaacgtgagcaaccgcttcatcccctggacccagaggagccccaaggtgctggcccaggcctgccccaagaggagccctggctggagcgctgcctggggccactgccaccacgtggccatgacagctggcccccacaggacctcctgggaggactggctgtgctgctggaggagagctggggagggcaatggcatgctgcccctgtgccagagcctggaggtggccgtgcaggtgatggtgggcgcctag

SEQ ID NO: 285757 - DNA, 366 bp, Artificial Sequence
  derived and/or modified sequence
tgaagatacttcaaccccagcggggagcccctggagctggacagccgcttctgggagctgcgggacagcatcgtgcagtgtgagctgctgatgctgcgggtgctgcgcttccaggtgtccttccagcacccccacaagaactggctgaacagacacagctggcagaggacccctgtggccgtgacagcctgggccctgctgcgggacagctaccacggggccctgtgcctgcgcttccaggcccagcacatcgctgtggccgtgctgtacctggccctgcaggtgtatggagtggaggtgcctgctgaggtggaggccgagaagccctggtggcagatctacaccatggacacagagatcccctag

SEQ ID NO: 285758 - DNA, 429 bp, Artificial Sequence
  derived and/or modified sequence
atggaggccggcgtgaagctgggcatgcggagcatccccatcgccacagcatgcacgatctaccacaagttcttctgtgaaaccaatctcgacgcgtacgatccgtacttgatcgccatgagtagtatttatctcgcaggcaaagtagaagagcaacatctgcgtactcgcgacattatcaacgtgtcaaaccgatttatcccctggacacagagaagtcctaaggtgttggcacaagcatgtccaaaacggagtccagggtggtcagcggcttggggtcattgccatcacgtggccatgaccgccggccctcaccggacctcatgggaggattggctttgctgctggcgtagggcaggcgagggtaatggaatgctgcccctgtgccagtctttggaagtcgccgttcaagtgatggtgggggcatag

SEQ ID NO: 285759 - DNA, 366 bp, Artificial Sequence
  derived and/or modified sequence
tgacggtacttcaaccccagcggcgagcccctggagctggacagcaggttctgggaactgagggatagtatcgtacagtgcgagctcctaatgttgcgagtcctcagattccaagtttcattccagcatccacacaaaaattggctgaaccgtcactcatggcagagaacccccgtagctgtcaccgcctgggctctgctcagggatagttatcacggggcgctatgcctgagattccaagcacagcatatcgcggtggcggtcctgtatcttgccctgcaggtgtatggtgtggaggtcccagctgaagtggaggctgagaagccatggtggcaaatctatactatggatacggagataccgtag

SEQ ID NO: 285760 - DNA, 429 bp, Artificial Sequence
  derived and/or modified sequence
atggaagccggagttaagctgggaatgagatctatacccattgccacggcatgcacaatctaccataaatttttctgcgaaacaaacttagacgcgtacgatccctacctcatcgcaatgtcgtccatctacttggccggtaaagtggaggaacagcacctccggacaagggatataataaacgtcagtaaccgcttcatcccttggactcaacgctctcccaaggtgctagcccaggcctgccctaaacggtcacccggttggtccgctgcttggggccactgtcaccacgttgcaatgacggcagggccacataggacctcttgggaggactggctgtgttgctggcgacgggctggtgagggcaatggtatgttgcccttgtgtcagtcgttggaggtggccgtccaggtgatggtcggagcctag

SEQ ID NO: 285761 - DNA, 366 bp, Artificial Sequence
  derived and/or modified sequence
tgacggtactttaatccatctggcgagccactcgaactcgattcacgcttctgggagctgcgtgacagcattgtgcagtgcgagctcctgatgctcagagtgttgcgctttcaggtgtcctttcagcaccctcacaaaaattggctgaaccgccattcctggcagcggactccagtggctgtaactgcatgggctttgttaagggactcataccacggtgctctttgcctccggttccaggcacagcatatagccgtagccgtgctttatctggccctccaagtgtatggagtggaagtaccggctgaagtcgaagcagagaaaccctggtggcagatctacaccatggatacagagataccctag

SEQ ID NO: 285762 - DNA, 429 bp, Artificial Sequence
  derived and/or modified sequence
atggaggccggcgtgaagctgggcatgagaagcatccccatcgccaccgcctgcaccatctaccacaagttcttctgcgagaccaacctggacgcctacgacccctacctgatcgccatgagcagcatctacctggccggcaaggtggaggagcagcacctgagaaccagagacatcatcaacgtgagcaacagattcatcccctggacccagagaagccccaaggtgctggcccaggcctgccccaagagaagccccggctggagcgccgcctggggccactgccaccacgtggccatgaccgccggcccccacagaaccagctgggaggactggctgtgctgctggagaagagccggcgagggcaacggcatgctgcccctgtgccagagcctggaggtggccgtgcaggtgatggtgggcgcctag

SEQ ID NO: 285763 - DNA, 366 bp, Artificial Sequence
  derived and/or modified sequence
tgaagatacttcaaccccagcggcgagcccctggagctggacagcagattctgggagctgagagacagcatcgtgcagtgcgagctgctgatgctgagagtgctgagattccaggtgagcttccagcacccccacaagaactggctgaacagacacagctggcagagaacccccgtggccgtgaccgcctgggccctgctgagagacagctaccacggcgccctgtgcctgagattccaggcccagcacatcgccgtggccgtgctgtacctggccctgcaggtgtacggcgtggaggtgcccgccgaggtggaggccgagaagccctggtggcagatctacaccatggacaccgagatcccctag

SEQ ID NO: 285764 - protein, 1470 aa, Artificial Sequence
  derived and/or modified sequence
MKSLLNAFTKKEVPFREAPAYSNRRRRPPNTLAAPRVLLRSNSDNNLNASAPDWAVCSTATSHRSLSPQLLQQMPSKPEGAAKTIGSYVPGPRSRSPSLNRLGGAGEDGKRPQPLWHVGSPFALGANKDSLSAFEYPGPKRKLYSAVPGRLFVAVKPYQPQVDGEIPLHRGDRVKVLSIGEGGFWEGSARGHIGWFPAECVEEVQCKPRDSQAETRADRSKKLFRHYTVGSYDSFDTSSDCIIEEKTVVLQKKDNEGFGFVLRGAKADTPIEEFTPTPAFPALQYLESVDEGGVAWQAGLRTGDFLIEVNNENVVKVGHRQVVNMIRQGGNHLVLKVVTVTRNLDPDDTARKKAPPPPKRAPTTALTLRSKSMTSELEELVDKASVRKKKDKPEEIVPASKPSRAAENMAVEPRVATIKQRPSSRCFPAGSDMNSVYERQGIAVMTPTVPGSPKAPFLGIPRGTMRRQKSIDSRIFLSGITEEERQFLAPPMLKFTRSLSMPDTSEDIPPPPQSVPPSPPPPSPTTYNCPKSPTPRVYGTIKPAFNQNSAAKVSPATRSDTVATMMREKGMYFRRELDRYSLDSEDLYSRNAGPQANFRNKRGQMPENPYSEVGKIASKAVYVPAKPARRKGMLVKQSNVEDSPEKTCSIPIPTIIVKEPSTSSSGKSSQGSSMEIDPQAPEPPSQLRPDESLTVSSPFAAAIAGAVRDREKRLEARRNSPAFLSTDLGDEDVGLGPPAPRTRPSMFPEEGDFADEDSAEQLSSPMPSATPREPENHFVGGAEASAPGEAGRPLNSTSKAQGPESSPAVPSASSGTAGPGNYVHPLTGRLLDPSSPLALALSARDRAMKESQQGPKGEAPKADLNKPLYIDTKMRPSLDAGFPTVTRQNTRGPLRRQETENKYETDLGRDRKGDDKKNMLIDIMDTSQQKSAGLLMVHTVDATKLDNALQEEDEKAEVEMKPDSSPSEVPEGVSETEGALQISAAPEPTTVPGRTIVAVGSMEEAVILPFRIPPPPLASVDLDEDFIFTEPLPPPLEFANSFDIPDDRAASVPALSDLVKQKKSDTPQSPSLNSSQPTNSADSKKPASLSNCLPASFLPPPESFDAVADSGIEEVDSRSSSDHHLETTSTISTVSSISTLSSEGGENVDTCTVYADGQAFMVDKPPVPPKPKMKPIIHKSNALYQDALVEEDVDSFVIPPPAPPPPPGSAQPGMAKVLQPRTSKLWGDVTEIKSPILSGPKANVISELNSILQQMNREKLAKPGEGLDSPMGAKSASLAPRSPEIMSTISGTRSTTVTFTVRPGTSQPITLQSRPPDYESRTSGTRRAPSPVVSPTEMNKETLPAPLSAATASPSPALSDVFSLPSQPPSGDLFGLNPAGRSRSPSPSILQQPISNKPFTTKPVHLWTKPDVADWLESLNLGEHKEAFMDNEIDGSHLPNLQKEDLIDLGVTRVGHRMNIERALKQLLDR

SEQ ID NO: 285765 - DNA, 4413 bp, Artificial Sequence
  derived and/or modified sequence
atgaagagcctgctcaacgcgttcaccaagaaagaggtcccctttcgcgaggcgccagcttatagcaaccgccgccgcagacctcccaatacactggcggccccaagagttctcctcaggtccaacagcgacaataacttgaacgcctccgcacctgattgggccgtgtgctccaccgccacatcccatagatccttgagcccccagctcctgcagcagatgccttcaaagcctgagggagctgctaaaaccattggttcctacgtgcctggaccacgatccagaagcccatcgctgaaccgactggggggcgctggcgaggatggcaaacgtccacaacctctgtggcatgtgggaagccctttcgctctcggagcaaacaaagattccctgtcagcctttgaataccccgggcctaagcgtaagctgtacagcgctgttcccggcagactgtttgtggcagttaagccttaccaaccccaggtcgatggggaaatcccccttcatagaggtgacagggtgaaagttctgagcataggggaaggcggtttttgggaaggctctgcacggggccacatcggttggtttccagcagagtgcgttgaagaggtgcagtgcaaacctcgtgactctcaagctgagacgcgggctgatcggtcaaagaagctgtttcgacactatacggttggatcgtacgactcttttgatactagcagtgattgcataatagaggagaaaacagtggtactgcaaaagaaggacaacgaggggtttggattcgtgctcagaggagctaaagccgacacacccatcgaggagtttacccctactccagctttcccagccctgcaatacctcgagtctgtcgatgagggcggtgtcgcctggcaggccggcctgcgcaccggagatttcctgattgaagtcaacaacgagaacgtcgttaaggtgggacaccgtcaggtagttaacatgatcagacagggaggaaatcacctggtgctgaaggttgtcactgtgacaaggaatctcgaccccgacgacacggcccgcaagaaagccccaccccccccgaagagggccccgaccaccgccttaacattgaggtctaaatctatgacctctgagctcgaggagttggttgataaggcatcagtaaggaagaagaaggataagcccgaggagatcgtgcccgcatctaaacctagcagagctgcagaaaacatggccgtggaaccgcgcgtcgccaccatcaagcagcggcccagttcccggtgctttccggctggaagcgatatgaactcagtgtatgagagacagggtatcgcagtcatgactccaaccgtcccaggttccccaaaggcacccttccttggaatccctcgcggaaccatgcgacgacagaagtctatcgatagcagaatttttttaagtggcatcactgaagaagaaagacagttcctggctccaccgatgttgaagttcacacggtctctctctatgcccgacacatctgaggacattccaccgccaccacagagcgtgccccctagcccaccacccccgagcccaactacgtacaactgcccgaaatccccaacgcctagagtttacgggactatcaaacctgcttttaaccagaacagtgccgctaaggtctcgccagcgacacgttcagacacagttgccacaatgatgagggagaagggcatgtacttcaggcgcgagcttgatagatacagcctggactcggaggacttatacagtaggaacgctggccctcaagcaaatttccgcaacaaaagaggtcaaatgcccgaaaatccttactctgaggtaggcaaaatcgcctccaaggctgtttatgtccctgccaaaccagcaagaagaaaaggtatgctggtgaagcagtctaacgttgaggattcacccgagaagacatgtagcatccccatccccaccataatcgtgaaggagccaagtacatcgagctcaggcaagtcatctcagggaagcagtatggaaatcgaccctcaggcccccgagcccccatctcagctgcggccggacgagagcttaacagtcagctccccattcgctgctgccatcgcgggagccgtgcgcgatagggagaagagactggaagccagaaggaattccccagcctttttatcaaccgatctgggcgatgaggatgtcggactggggccacccgcaccccggactcgaccctcaatgttcccggaagagggcgatttcgccgacgaagacagcgctgagcagctgtcatcccctatgccctcagcaactcctagggaacctgagaaccactttgtcggcggagccgaggccagcgctccaggagaggcaggccggccactaaactctacttcaaaagcccagggccctgagtccagtccggccgtgccatctgcatcctctggaaccgccggtccagggaactacgtccaccctttgaccggccggctgctggatccttcatcgccgctagctctggccctatctgctcgggaccgcgcaatgaaggaatcacaacagggacctaagggggaagcccccaaagccgacctgaataaaccgctgtatattgacactaagatgcgaccctctttagacgcagggttccctaccgtaacccgccagaacaccagaggtcccttgcgccgacaggagactgagaacaaatacgagacagacttaggccgagatcgaaaaggcgacgacaaaaagaatatgctcatcgatatcatggacaccagtcagcagaagtctgccggcctcctgatggtgcacacagtagacgccacgaaactcgacaatgccctgcaggaggaggatgaaaaagcagaggtggaaatgaagccagattccagccctagcgaggtcccagaaggagtctccgagactgaaggagctcttcagatctccgctgccccagagccaaccactgtgcctgggcggacgatagttgcagtggggagcatggaggaggccgtgatcctgccatttagaatccccccccccccactggcttctgtggatctcgacgaggacttcatttttactgagcccctccctccccccctggagtttgctaactccttcgatatccctgacgaccgggcggcttccgtacccgctctgtcggacttggttaagcagaagaagagcgacacaccacagagcccctcactcaatagctcgcagcccaccaacagcgctgactcaaagaagccagcctccttgtccaactgcctccccgccagctttctcccacctcctgagtccttcgatgccgtcgcagactctggtatcgaggaagtcgattctcggtcgtcttccgatcaccacctagagaccacatccacgatcagtactgtatcttccatcagcacactgagctccgagggaggagagaatgtcgacacctgcacagtttacgcggacggtcaggccttcatggtggacaagcctcctgttcctcccaagccaaagatgaagcctatcattcataagtcgaacgccctgtatcaggacgcactggtggaagaggatgtagacagttttgtcatcccacctccagccccacccccccctcctggctctgcccagccaggaatggccaaagtgctgcagcctcggacctctaaactgtggggagatgttactgagattaaaagtcccatcctttcgggtcccaaggcaaatgtgattagtgagctgaatagcatcctacagcaaatgaaccgggagaaactggcgaaacccggcgagggccttgatagtccaatgggggcgaaatctgcttccctggcacctcggagcccggagattatgagtaccatctcaggtacacgttcaaccacagtcaccttcacagtccgtcccggaacttcgcagccaatcacactgcagtcccgcccccctgattatgagagtagaacaagcggcacgaggagggccccttcaccagtcgtgtcccctactgagatgaataaagagacactgccagctccgctttctgctgcaaccgcctcaccttcccctgctctcagcgatgttttcagtctcccctcccagcccccaagtggcgacctgttcggactgaacccggcggggagaagtaggagcccttcaccttctattttgcagcaacccataagtaataagccatttaccactaagcccgtccatctgtggacaaaaccggacgtggccgattggttggaaagtctgaatcttggggagcacaaagaggccttcatggataacgaaatcgatggcagccatctacctaatctgcaaaaagaggatctcatagacctcggggtaacacgcgtcggccatcggatgaatattgagagagccctgaagcaactactggacagatag

SEQ ID NO: 285766 - DNA, 4413 bp, Artificial Sequence
  derived and/or modified sequence
atgaagagcctgctgaatgccttcaccaagaaggaggtgcccttccgggaggccccagcctacagcaacagaagaagaagaccacccaacaccctggccgccccccgggtgctgctgcggagcaacagcgacaacaacctgaatgccagcgccccagactgggccgtgtgcagcacagccaccagccacaggagcctgagcccccagctgctgcagcagatgcccagcaagccagagggcgccgccaagaccatcggcagctatgtgcccggccccaggagccgcagccccagcctgaaccggctgggcggcgctggagaagatggcaagaggccccagcccctgtggcacgtgggcagcccctttgccctgggcgccaacaaggacagcctgagcgcctttgagtacccaggccccaagaggaagctgtacagcgctgtgcccggccgcctgtttgtggccgtgaagccctaccagccccaggtggatggagagatccccctgcacagaggagacagagtgaaggtgctgagcattggagagggcggcttctgggagggcagcgcccggggccacatcggctggttcccagcagaatgtgtggaggaggtgcagtgcaagccccgggacagccaggccgagaccagggctgacaggagcaagaagctgttccgccactacacagtgggcagctatgacagctttgacaccagcagtgactgcatcatcgaggagaagacagtggtgctgcagaagaaggacaatgaaggcttcggctttgtgctgcggggggccaaggctgacacccccatcgaggagttcacccccaccccagccttccctgccctgcagtacctggagagcgtggatgagggcggcgtggcctggcaggccggcctgaggactggagacttcctgattgaggtgaacaatgaaaatgtggtgaaggtgggccaccggcaggtggtgaacatgatccggcagggcggcaaccacctggtgctgaaggtggtgacagtgaccaggaacctggaccctgatgacacagccaggaagaaggcccctcctccacccaagagggcccccaccacagccctgaccctgcggagcaagtccatgaccagcgagctggaggagctggtggacaaggcctctgtgaggaagaagaaggacaagccagaggagatcgtgcctgccagcaagcccagcagagctgctgagaacatggctgtggagccccgggtggccaccatcaagcagaggcccagcagccgctgcttccctgctggcagtgacatgaacagcgtgtatgagcggcagggcattgctgtgatgacccccaccgtgcccggcagccccaaggcccccttcctgggcatcccccggggcaccatgaggcggcagaagagcattgacagccgcatcttcctgagcggcatcacagaggaggagcggcagttcctggccccacccatgctgaagttcaccaggagcctgtccatgccagacaccagcgaggacatccccccaccaccccagagcgtgccccccagccccccaccacccagccccaccacctacaactgccccaagagccccaccccccgggtgtatggcaccatcaagccagccttcaaccagaacagcgctgccaaggtgtccccagccaccaggagtgacacagtggccaccatgatgagggagaagggcatgtacttccggcgggagctggaccgctacagcctggacagtgaagatctctacagcagaaatgccggcccccaggccaacttcaggaacaagaggggccagatgcctgagaacccctacagcgaggtgggcaagatcgccagcaaggctgtgtatgtgcctgccaagccagcccggaggaagggcatgctggtgaagcagagcaatgtggaggacagccctgagaagacctgcagcatccccatccccaccatcatcgtgaaggagcccagcaccagcagcagcggcaagagcagccagggcagctccatggagattgacccccaggcccctgagccccccagccagctgcggccagatgagagcctgactgtgagcagcccctttgctgctgccatcgccggggctgtgcgggaccgggagaagaggctggaggcccggaggaacagccctgccttcctgagcacagacctgggagatgaagatgtgggcctgggccccccagcccccaggacccggcccagcatgtttcctgaggagggggactttgctgatgaggacagcgctgagcagctgagcagccccatgcccagcgccaccccccgggagcctgagaaccactttgtgggcggcgctgaggccagcgcccctggagaggccggccggcccctgaacagcaccagcaaggcccagggccctgagagcagccctgctgtgcccagcgccagcagcggcacagctggccctggcaactacgtgcaccccctgaccggccgcctgctggaccccagcagccccctggccctggccctgagcgcccgggaccgggccatgaaggagagccagcagggccccaagggggaggcccccaaggctgacctgaacaagcccctgtacatcgacaccaagatgaggcccagcctggatgctggcttccccaccgtgacccggcagaacacccggggccccctgcggcggcaggagacagagaacaagtatgaaacagacctgggccgggacagaaaaggagatgacaagaagaacatgctgattgacatcatggacaccagccagcagaagtctgctggcctgctgatggtgcacacagtggatgccaccaagctggacaatgccctgcaggaggaggatgagaaggccgaggtggagatgaagccagacagcagccccagcgaggtgcctgagggcgtgtctgaaacagagggcgccctgcagatctctgctgcccctgagcccaccaccgtgcccggccgcaccatcgtggccgtgggctccatggaggaggccgtcatcctgcccttccgcatccccccaccacccctggcctctgtggacctggatgaggacttcatcttcacagagcccctgcccccacccctggagtttgccaacagctttgacatcccagatgacagagctgcctctgtgcctgccctgagtgacctggtgaagcagaagaagagtgacaccccccagagccccagcctgaacagcagccagcccaccaacagcgctgacagcaagaagccagccagcctgagcaactgcctgcctgccagcttcctgcccccacctgagagctttgatgctgtggccgacagcggcatcgaggaggtggacagccgcagcagcagtgaccaccacctggagaccaccagcaccatcagcacagtgagcagcatcagcaccctgagcagcgagggcggggagaatgtggacacctgcaccgtgtatgcagatggccaggccttcatggtggacaagccccctgtgccccccaagcccaagatgaagcccatcatccacaagagcaatgccctgtaccaggatgccctggtggaggaggatgtggacagctttgtgattcctcctccagcccctcctcctcctcctggcagcgcccagcccggcatggccaaggtgctgcagcccaggaccagcaagctgtggggagatgtgacagagatcaagagccccatcctgagcggccccaaggccaacgtcatcagcgagctgaacagcatcctgcagcagatgaaccgggagaagctggccaagccaggagagggcctggacagccccatgggcgccaagagcgccagcctggcccccaggagccctgagatcatgagcaccatcagcggcaccaggagcaccaccgtgaccttcaccgtgcggcccggcaccagccagcccatcaccctgcagagccggcccccagactatgagagcaggaccagcggcacccggcgggcccccagccctgtggtgagccccacagagatgaacaaggagaccctgcctgcccccctgtctgctgccacagccagccccagccctgccctgagtgatgtgttcagcctgcccagccagccccccagcggggacctgtttggcctgaacccagctggccgcagccgcagccccagccccagcatcctgcagcagcccatcagcaacaagcccttcaccaccaagcctgtgcacctgtggaccaagccagatgtggccgactggctggagagcctgaacctgggggagcacaaggaggccttcatggacaatgaaattgatggcagccacctgcccaacctgcagaaggaggacctgattgacctgggcgtgaccagggtgggccacaggatgaacatcgagcgggccctgaagcagctgctggacagatag

SEQ ID NO: 285767 - DNA, 4413 bp, Artificial Sequence
  derived and/or modified sequence
atgaagagcctgctgaacgccttcaccaagaaggaggtgcccttccgagaggcacccgcctattccaacaggcgcaggcggccacccaacaccctcgctgctccacgagtgctgctgcgatctaattctgacaacaacctcaatgcgagcgctccggattgggccgtctgtagtactgccacaagtcaccggtccttatctccacagttacttcagcaaatgccatccaaacctgagggcgccgctaagaccattgggagttatgttcctggccctcgctcccgaagtcctagcctgaatcgccttggcggggcaggtgaggatggaaaacgaccacaaccactctggcatgtaggtagtccctttgctttgggtgccaacaaggactctttgtcagcatttgagtacccaggacctaaaagaaaactgtatagcgcagtaccaggtcgcctgtttgtcgccgtcaagccctaccagccacaagtcgatggtgagattccactgcacagaggggatcgggtcaaggtgctcagtatcggcgaagggggcttctgggaaggatcagcaagggggcacatcggctggtttcccgcagaatgcgttgaggaggtacagtgtaagcccagggatagtcaggctgaaaccagagcggaccgttcgaaaaagttgtttcgccactatacagtaggatcctatgacagctttgacaccagcagcgattgtattattgaggagaaaacagttgtgctacagaagaaagataatgaaggatttgggttcgtgctgaggggagccaaagccgacacgccgattgaggaattcacaccgactcccgctttcccagcgctgcaataccttgagagcgtcgacgagggcggcgttgcctggcaggccggactgcgcaccggcgatttcctcatagaggtgaacaacgagaatgtggttaaggtgggccataggcaggtcgttaacatgattcgccaaggcggcaaccaccttgtgctcaaagtggtcactgtgacacgcaacctcgatcctgatgacacggccagaaaaaaagccccccctcctccaaagcgggcacccactacagccctgacattgcgctccaaatctatgacctctgagttagaagagttggtcgacaaagcctcagtgcgtaagaagaaagacaagcctgaagagatcgttcctgctagcaagccatcaagagctgcagaaaacatggctgttgagccccgcgtcgccacgatcaaacagcggccatcttctcgctgtttccctgccggctctgatatgaactccgtctacgaaagacagggcattgcagttatgactcccacggttcccgggagtcccaaagccccctttcttggtatcccaagaggcacgatgaggaggcagaaatcaattgactcgcggatctttttgtcagggattacagaagaagagaggcagttcctcgcacctcccatgctaaaatttactcggtctttgtcaatgccggatacatccgaggatatcccccccccaccacagtctgtcccacccagcccaccacctccaagcccgaccacatacaactgccccaagagccccactcctcgggtgtacggaaccattaagcctgcctttaatcaaaattcagcagcgaaggtctcgccagccaccaggtcagatacagtagctaccatgatgcgcgagaaagggatgtacttcaggcgcgagctggaccggtactcccttgactccgaggatctgtactcccgcaatgcaggacctcaggctaattttcggaataaacgaggacaaatgccagagaacccctactctgaggtaggcaagatcgcttccaaggcagtttacgtccccgcaaagccagcgagacggaaaggaatgctcgtcaagcagtcaaatgtggaggactcccccgagaagacatgcagcatacctataccgacgataattgttaaagagccctccacttcttcctcagggaaatcttctcagggaagttctatggagatcgacccccaggctccagagccgccctcgcagctcagacccgacgagagtcttaccgtgtctagccctttcgctgccgccatcgctggggcggtgcgagatagagagaagcggctcgaagctcggaggaatagtcctgcatttctgagtacagacctgggggacgaagatgtcgggttgggaccccccgccccacgaacacggccttctatgtttcccgaagagggcgattttgccgacgaggactcagcggagcaattgtcgtcgccaatgccctccgcaacccctagagaaccagagaatcacttcgtgggcggggctgaagcctctgcccctggggaggctgggagacccctgaattcaaccagtaaagcccagggtccggaaagcagtcctgcggttccttcggctagctccgggacagctggcccaggaaactacgttcaccctcttacaggaaggctccttgaccccagctcacctctcgccctggcgctgtctgcgagagatcgagcaatgaaagagagccaacaaggccccaagggggaggcacccaaagcggatctaaataagccactctatattgacactaaaatgcggcccagtctggatgcaggattccccaccgtgacgagacagaatacccggggtccactgcgccggcaggagacggagaataagtacgagacagatctcgggcgtgaccgcaaaggggacgacaagaagaacatgcttatcgatattatggacacatctcaacaaaaatcagcaggcctgctgatggtacatacggtggacgccacaaagttggataatgctctgcaggaggaagacgaaaaggccgaagtggagatgaaacctgattcctcaccaagcgaggtgcctgaaggggtctccgaaacagagggcgccctgcagatcagtgcagcacctgagcccactactgtgccgggcagaaccatcgtcgctgttgggtccatggaggaggcagtgattctacctttccgcatccctccacccccactggcatccgttgatctggatgaagactttattttcactgaaccattacccccaccccttgagttcgccaattctttcgacatccctgatgacagagcagcgagcgttcctgcgctcagcgatttggtgaaacagaagaagtcagatacgccccagagccccagtttgaatagttcccaacccactaactcagccgattctaaaaagccagcctccctatccaattgcctgcctgcctctttcctcccacccccagaatccttcgacgcggtggcggacagcggcatagaagaagtggatagtcgaagctcttccgatcaccacctggaaacaacgtcaacgatctcaacagtgagcagcatatctaccctgtctagcgaaggcggcgaaaatgtggacacctgtacagtgtacgccgacgggcaggcctttatggtggacaaaccccctgttcctcccaaacctaagatgaagcccattatccataagtcaaatgctttataccaggacgccctagtagaggaagacgttgattccttcgtgataccaccacccgcccctccacctccacctggatcggctcagccaggcatggccaaagtgttacagcctcggacaagcaaactctggggggacgtcactgaaatcaaaagccccattctgagcggccctaaagcgaacgtgattagtgaactcaatagcattctgcagcagatgaaccgcgagaaactagccaagcctggcgagggactcgattcaccaatgggagccaagtcagcgagtctggccccccggagccctgagataatgtcaaccatctccgggacgagatccacaaccgtgacttttacggtgaggcctggtacctcccagcccataaccctgcagagtaggccacccgactacgaaagcaggacctcaggaaccagacgggctccttcacctgttgtgtctcctaccgaaatgaacaaagaaacactcccagcccctcttagcgcagctacagcaagtccatcaccagctctgagcgatgtattttcacttccatcccagccacccagcggcgacctgtttgggcttaacccagctgggcgatcaagaagtccttcgccctcaatactccagcagcctataagcaataaaccatttaccacgaaaccagtgcatctgtggacaaaacccgacgtcgctgactggcttgagtccttgaacctcggcgagcataaggaagcttttatggacaacgaaatcgacggtagccatcttcctaacctgcaaaaggaggacctcatcgatctgggcgtcaccagggtggggcaccgtatgaacatagaaagggcattgaaacagctcttagacaggtag

SEQ ID NO: 285768 - DNA, 4413 bp, Artificial Sequence
  derived and/or modified sequence
atgaaatcccttctgaatgctttcacgaagaaagaggtgcccttccgggaagcccctgcatattcaaaccggaggcgcaggcctcccaacaccttggccgctcctcgggtcctgcttcgctctaactccgacaataatctgaatgcttcggccccagactgggcagtttgcagcacggcaacatcacaccgcagcctgagccctcagctcctacagcagatgccttccaagcctgagggcgcagctaagacgattggatcctacgtgcctggaccacggagccggagcccaagcctgaaccgcttagggggtgccggagaggatgggaaacgtccgcagccattgtggcacgtgggatcgccgtttgccctcggagcgaacaaagattccctttccgcgttcgaataccccggaccaaagcggaagctgtactccgcagtaccgggacgcctgtttgttgcggtgaaaccataccagccccaagtcgacggagaaatacccctgcaccgcggtgatcgggtgaaagtgcttagtattggggaaggaggcttctgggaaggctctgcgcgtggacacataggatggttccctgccgaatgtgttgaagaagttcagtgtaaaccgcgagacagtcaggccgagactcgtgcagaccggtcaaagaagttgtttcgtcattatactgttggctcatacgacagcttcgacacctccagcgactgtataattgaggaaaaaacagttgtcctacagaaaaaagacaacgaagggtttgggtttgtcttaagaggagctaaggcagacacccctattgaggaatttacaccaacccccgctttccccgctcttcagtatttagagtctgttgatgagggcggagtggcatggcaggccggtttgagaacaggcgacttcctcatcgaggtgaacaatgaaaacgtagtgaaagtcggacaccgccaggtcgtgaacatgatcaggcagggcggtaaccacctggttctcaaagtggtgacagtgaccagaaatttggacccagatgataccgcccgaaaaaaagctcctccgccaccaaaacgcgctcccactacagcgctaaccctacgcagcaagtcaatgaccagcgagcttgaggagttggtcgataaggcatccgtcaggaagaagaaggacaagccagaggaaattgtgcctgcctccaagccttcacgggcagctgagaatatggcggtggaaccaagggtggccactatcaagcagcggccatcaagccgttgcttccctgccggatcagacatgaactcggtctacgaacgtcagggtattgcggtaatgactccgaccgtgcctgggagcccaaaggctccatttctggggattccgcgagggacaatgcgaagacagaaatccatcgacagtcggatcttcctgtctggcataacagaggaggagaggcaatttctcgcacctcccatgctcaagttcactcgctctctcagcatgcctgacacttctgaggatatcccccctccccctcaatccgtcccgcctagccctccccctcccagccctactacgtataactgtccaaagagccctacacccagagtgtatggcaccatcaaacccgcttttaaccagaactctgccgctaaagtgtcccccgcaacacgcagtgacacagtggcaacgatgatgcgggagaaagggatgtacttcaggcgggaactcgatagatactcgctcgacagtgaggacctgtacagtagaaacgccggtccacaagcgaattttcgtaataaacgtggtcagatgccagagaacccatatagtgaggttggaaaaatcgcttcaaaggccgtttatgttccagccaagcccgcacgacgcaaaggcatgctggttaagcagtctaatgtcgaggattcaccagagaagacatgctccattccaatcccaacgatcatcgtgaaggaaccatccacctcgtcgagcggaaaaagttctcagggcagttcaatggaaatcgacccccaggcccctgagccacccagccagctgcgcccagatgaatccctgacagtctctagcccttttgccgcagccattgccggagccgtccgcgacagggaaaagagactcgaggcaaggcgaaatagtcccgcattcctctctactgatttaggcgacgaagatgttgggcttgggccaccggcaccacggaccagaccctcaatgttcccagaggaaggcgatttcgcagatgaggatagcgccgagcaactttcctcacccatgccctcagccactccccgagaacctgagaatcattttgtagggggtgctgaagcttctgcaccaggtgaggcaggtcgccctttaaattctacatccaaagcacaggggccagagtcctctccagcagtccccagcgcctcctcaggcacagctgggccaggaaactatgtgcatccgttgacggggagactactggatccctcgtcccccttagcgttagctctgtctgcgcgagaccgtgccatgaaggaatctcagcaggggccaaagggggaagctccaaaagcggacctaaacaagccgttgtatatcgataccaaaatgcgtccaagtctcgacgccggttttccaaccgtgacccgtcagaacactcgcggaccactgcgtcgacaggaaaccgaaaacaaatatgagactgatcttggccgagatagaaagggcgacgataagaagaatatgttgattgatattatggacacctcccagcaaaaatctgcagggctcctgatggtacatactgtggatgctaccaagctagacaacgcactccaagaggaagacgaaaaggccgaggtcgagatgaaacccgactcgtccccaagtgaggttcctgagggcgtgtctgagacagaaggagcgctccagatttcagccgcaccagagcctacaaccgtgccaggacggacaattgtagccgtgggctcaatggaggaggccgtaattctgcctttccgcatcccgccaccccctctggcttcagtcgatttagacgaagactttatttttacagaacctctgccaccccctctcgaatttgccaacagctttgacataccagacgaccgtgccgcttcagtgcccgcactcagcgatttggtgaaacagaagaaatctgatacgcctcaaagcccatctttgaactctagccaaccaacaaactcggcagattcaaagaaacctgctagcctgtcaaattgccttcccgcaagtttcctgcccccacctgaaagcttcgacgcggtggccgacagtgggatcgaagaggttgattcccggtcctcatccgaccatcacctagagacaacttccactatttcaacagtctcctctatcagcactttgagcagtgaaggcggagaaaacgtggatacctgtactgtctatgccgacgggcaggctttcatggtggataagcccccagtgccgcctaagcctaaaatgaaaccaataatccataaaagtaatgcattgtaccaagacgctttagtggaggaagacgtggactctttcgtgatccccccacccgctcccccaccacccccaggctccgcacagcccggaatggccaaggtgttgcagcccagaacctccaaactgtggggcgatgttactgagatcaaatcaccaatcctatctgggcctaaagccaatgtaatttccgagctgaattccatcctccaacagatgaaccgtgaaaaacttgctaaacctggggagggccttgacagtcccatgggcgctaagtcagctagccttgcaccacggagtcccgagatcatgtcgaccatatctgggacacgtagcaccactgtcaccttcacggttcggccaggcacaagccagcctataacgctacagtctcggccacctgactacgagtcccggacctcgggtacgaggagagccccatccccagtcgtaagccctacagagatgaataaagagacactgcctgctcccttgagtgcggcaacagcctctcccagccctgctctgagcgatgtcttttctctcccaagccagcccccatccggcgatctcttcggactcaatcccgcagggaggtcccgtagtcctagccccagcatcttgcagcaacccatcagcaataaaccatttaccaccaagcctgtgcacctgtggacaaaacccgacgtggccgactggttagagtcccttaatctgggggagcataaggaggcgtttatggataatgagattgatggcagccatctccccaaccttcagaaggaggacctgatagacctcggtgtgactagagtggggcacagaatgaatatcgagagggcactaaaacagcttcttgacagatag

SEQ ID NO: 285769 - DNA, 7884 bp, Artificial Sequence
  derived and/or modified sequence
atataatgagcggaccgctgccaaagtcagagggaaaatgaagtctttgttaaatgccttcaccaagaaggaagtgcccttccgagaggccccggcgtactccaaccgccggcggcggccccccaacacgctggccgccccccgggtcctgctgcgctccaacagtgacaacaacctcaatgccagcgctcccgactgggccgtctgctccacggccacctcgcaccgcagcctgtcaccccagctgctgcagcagatgcccagcaagcccgagggggccgcgaagaccattgggagctacgtgcccgggccccgcagccggtccccatcgctcaacaggctgggcggcgcaggcgaggacggcaagaggccgcagcctctctggcatgtcgggtcgccttttgctcttggtgccaacaaggactcactctcggccttcgagtacccggggcccaagcggaagctctacagtgccgtgcccgggaggctcttcgtcgctgtcaagccataccaaccccaagtggacggcgagatcccccttcaccgcggtgacagggtcaaagttctgagcatcggtgaagggggcttctgggaaggcagcgcccgcggccacatcggatggtttccggcggagtgcgtggaggaggtccagtgtaagcccagggacagccaggcagaaacccgcgctgaccgcagcaagaagcttttcaggcactacaccgtgggctcctatgacagcttcgacacttccagtgactgcattattgaggagaagacggtggtcctgcagaaaaaagacaatgagggctttggattcgtgcttcgaggggccaaagctgacacacccattgaagaattcacaccaacaccggctttcccagccctacagtacctggagtccgtggatgaaggtggggtggcgtggcaagccggactaaggaccggggacttcttgattgaggttaacaatgagaatgttgtcaaagtcggccacaggcaggtggtgaacatgatccggcagggagggaatcacctggtccttaaggtggtcacggtgaccaggaatctggaccccgacgacaccgccaggaagaaagctcccccgcctccaaagcgggcaccgaccacagccctcaccctgcgctccaagtccatgacctcggagctggaggagctcgtggataaagcctcggtccggaagaagaaggataaacccgaggagatagtcccggcctccaagccctcccgcgctgctgagaacatggctgtggaaccgagggtggcgaccatcaagcagcggcccagcagccggtgcttcccggcgggctcagacatgaactctgtgtacgaacgccaaggaatcgccgtgatgacgcccactgttcctgggagcccaaaagccccgtttctgggcatccctcgaggtacgatgcgaaggcagaaatcaatagacagcagaatctttctatcaggaataacagaggaagagcggcagtttctggctcctccaatgctgaagttcaccagaagcctgtccatgccggacacctctgaggacatcccccctccaccgcagtctgtgcccccgtccccaccaccaccttccccaaccacttacaactgccccaagtccccaactccaagagtctacgggacgattaagcctgcgttcaatcagaattctgccgccaaggtgtcccccgccaccaggtccgacaccgtggccaccatgatgagggagaaggggatgtacttcaggagagagctggaccgctactccttggactctgaagacctctacagtcggaatgccggcccgcaagccaacttccgcaacaagagaggccagatgccagaaaacccatactcagaggtggggaagatcgccagcaaagccgtctacgtccccgccaagcccgccaggcggaaggggatgctggtgaagcagtccaacgtggaggacagccccgagaagacgtgctccatccctatcccgaccatcatcgtgaaggagccgtccaccagcagcagcggcaagagcagccagggcagcagcatggagatcgacccccaggccccggagccaccgagccagctgcggcctgacgaaagcctgaccgtcagcagcccctttgccgccgccatcgccggagccgtccgcgaccgtgagaagcggctggaagccaggaggaactccccggccttcctctccacagacctgggggatgaggatgtgggcctggggccacccgcccccaggacgcggccctccatgttccccgaggagggggattttgctgacgaggacagcgctgagcagctgtcatcccccatgccgagtgccacgcccagggagcccgaaaaccatttcgtgggtggcgccgaggccagtgctccgggtgaggctgggaggccgctgaattccacgtccaaagcccaggggcccgagagcagcccagcagtgccctccgcgagcagcggcacagccggccccgggaattatgtccacccactcacagggcggctgcttgatcccagctccccgctggccctggcactctccgcaagggaccgagccatgaaggagtctcaacagggacccaaaggggaggcccccaaggccgacctcaacaaacctctttacattgataccaaaatgcggcccagcctggatgccggcttccctacggtcaccaggcagaacacccggggacccctgaggcggcaggagacggagaacaagtacgagaccgacctgggccgagaccggaaaggcgatgacaagaagaacatgctgatcgacatcatggacacgtcccagcagaagtcggctggcctgctgatggtgcacaccgtggacgccactaagctggacaacgccctgcaggaagaggacgagaaggcagaggtggagatgaagccagacagctcgccgtccgaggtgccagaaggtgtttccgaaaccgaaggtgctttacagatctccgctgcccccgagcccaccaccgtgcccggcagaaccatcgtcgcggtgggctccatggaagaggcggtgattttgccattccgcatccctcctccccctctggcatccgtggacttggatgaggattttatttttacagagccattgcctcctcccctggaatttgcaaatagttttgatatccccgatgaccgggcagcttctgtcccggctctctcagacttagtgaagcagaagaaaagcgacacccctcagtccccttcgttgaactccagccaaccaaccaactctgcagacagcaagaagccagccagtctttcaaactgtctgcctgcctcattcctgccaccccctgaaagctttgacgccgtcgccgactctgggatcgaggaggtggacagccggagtagcagcgaccaccacctcgagacgaccagcactatctccaccgtgtctagcatctccaccctgtcttccgaaggtggagagaatgtggacacctgcacagtctatgcagatgggcaagcatttatggttgacaaacccccagtacctcctaagccaaaaatgaagcccatcattcacaaaagcaatgcactttatcaagacgcgctcgtggaagaagatgtagatagctttgttatccccccgcccgctcccccgcccccgccgggcagtgcccagcctgggatggccaaggttctccagccaaggacctccaagttgtggggcgacgtcacagagatcaaaagcccgattctctcaggcccaaaggcaaacgttattagtgaattgaactctatcctacagcaaatgaaccgagagaaattggcaaagccgggggaaggactggattcaccaatgggagccaagtccgccagcctcgctccaagaagcccggagatcatgagcaccatctcaggtacacggagcacgacggtcaccttcactgttcgccccggcacctcccagcccatcaccctgcagagccggccccccgactatgaaagcaggacctcaggaacaagacgtgccccaagccctgtggtctcgccaacagagatgaacaaagagaccctgcccgcccccctgtctgctgccaccgcctctccttctcccgctctctcagatgtctttagccttccaagccagcccccttctggggatctatttggcttgaacccagcgggacgcagtaggtcgccatccccctcgatactgcaacagccaatctcaaataagccttttacaactaaacctgtccacctgtggactaaaccagatgtggccgattggctggaaagtctaaacttgggtgaacataaagaggccttcatggacaatgagatcgatggcagtcacttaccaaacctgcagaaggaggacctcatcgatcttggggtaactcgagtcgggcacagaatgaacatagaaagggctttgaaacagctgctggacagataaggacggctgctctccacctcgcagactgctcttgttataagtagagatgggctcgtgctgaaacatctgaatgccaagcgaagtctgtgagcatcaaccccactccatgggtttgtctcctggtacccaaagaaatactgagttgtgtccacaacatggctgggtcttcagacccctggctcaccatgtgggtgtcttgggcagtttctatcacacatgggacaaggggagggagtttttctaacatggaaaaagattctcagcctgccgcccagcatgcaggtggcctcgctttgccgggtccgagaggctccccgtcaattttgcacgggatcctagctcttgtaggcagacaccagtgcactctagatacctcctgagacctccgtcctctgctttccgggcagctctcaccaccccaggccccggcatgaggcctttcctcagtcctgtggcctctcagaggacacctgatgctcacctgcccctctttctcctgcacttggcttgcagtgagatgctcccagatgcatttgtccagtgccccatcatgggcctgaaaggcagagaaactttttcctacacagattcttttccccatctcctcctgtggtttgcatccatggctctttggccatgaggttcctggcagtgctgggagtttggatgggatcgtgcccagctttgcttagctttctttatttctgcaaatctgttagcataattccaaggtggccaagcagatgtcacatggagttagtcaaagcacaaagtcacgattccacaatggaggggagacctggccaagggagccagccagcgtgcaactgcccaagctccaggtctccaggacaagagcagttgtctgccatgagcacccatccaggatggagaataagggcttctctgcctctcagaattctttttaattgaagatgtcttgagctctgcaaagatcagagcaggtgagcatccactttgacatgaaggacaagaagacgcatggctcatggcgggcacatgcggctgccagtgagacagcgtctcctctgggagctgggcgggcacagcatcctcagttctgtgcccagccaagggtgagcatctctgctgagacagtccttttgctctcggaggccagggaagatggtacttagaggcttttcccctatcgctctgggtgtctaggaatcccaccagcttgtcttaacagtacaacagcttctttgaggacccagtgggtatggagtatagacagaacccagggttgagaacagaaggtgggcggcaggatcagagtgaaagcagaggcgtgaggagaggaaagcagggaggtctcctgggctgccaggtcagcctctctggcaaggctttcttgagccccgcccctttctttccccggagtccctccaccccataacaatacctcgaatttccaaaagaggtcaccagatgcacatgggccgcaaaacacacagtcaggcttccagcacattctcccccatttggaggatactcgaatgtcaggtttttggttttattattatttcagaactagctcagcccatctctaattataaaacatggttttgttttttttttttcctttttttcttgattaggtctggaacagctctagaatgaacacataaaatttagcaatttaaaatctttctttactgcaagtttaaatagttgtacagatagtttataagcacaatattttaagaaaaaaaagtggctggtctactaggcagcctttgtgccacttcagtgctagaaagttaaagaaaaaaaaacttttgtgatttaataatactatttctgtggaataattataaaagtatgacctttttaaatcaaccttatttggatgcatctgaaccagcagagctgtgttatattttctatctttgctagaacttcgtcattgaaggacaatttcttcaaagtggttacaattcataatgcagcagtttctccaaaaacaaaaacaaaacacacaccacacacacgcgcttttccagtcacacacccctgatgttggaaccaagtttttggaccttctgttccaaaaccttttgcaggtcaatctttgtatttgaaatgatccaatccaacttgaagtcaattgaatattaaggcgctttacttccgtgtgctttcagtttttccatcatgagatgaatgagcattactctagataaatttcaagacaggatactacaggtggcctgctgaggctgccccatattttagaaaatgtaaaaatggtggtttggccattaatttgtcttccatttgatgataccgcaaaattccgtgagtccattcctttggcatggcactttccctgggcctacagttggtattacctctgtgctcagtgccaggcaaaacactagctcaaaggagagtcaaggaaaccgctggcagacgataaccagtcgaaactcgtgacttcggtttgttgaactttggcagccagttggtgagggccagatgttattccctttcttaaagatactccaagccacatgccactaaccacaagcaagctggctgcaagactaaagagctgataacatagtttatttttacactgtcttattatagagaagtaatagacctatcagaacctgcactgaccaacaaataaacacatgttgccaagatgaatcggtctctatctctatctgcttattttggtactgaaagcaatagttcctcattcaaatcaccacccactgttctccccctttgggacatgttaggacgaggccctattccatgcccctctttaatggtggaacaaatgttaaactgctcatctaaagatcatgttgatattattccaggttttaagatcaacttttgttacatactgtaatttaaataaactgcatttacatgcctagtttctgtaatattgtgtatacaaaacccaaatctctcaaaatgtaaattatgtatacctgccaagataccttttccagggtgtctgcgcacattttaagttaattcacataatataaaaattactcaatgtgactgttgatttgctgaactttacatatcacaaagtgaattatttgtgatactttagttaataaaatggtaaatttttttctcagttattgaacaagcaagcattatccagttgatctggcaatgactttttgtgtgtgggccacaatattgattttcccattaacaatttttttttgttttttaaatactaatatgtttcacactatagtttgtgtaacaacacgtgttcgcattatctatgttgctgttacttttgtgcttttattctttttagactttataaaaaaaaaaaaaagctcctgtaatttgcactttctcccaatccttaaatctcttgtatggcaaccaaaattactgtaaaaaaataaatatactattgcact

SEQ ID NO: 285770 - DNA, 4413 bp, Artificial Sequence
  derived and/or modified sequence
atgaagagcctgctgaacgccttcaccaagaaggaggtgcccttcagagaggcccccgcctacagcaacagaagaagaagaccccccaacaccctggccgcccccagagtgctgctgagaagcaacagcgacaacaacctgaacgccagcgcccccgactgggccgtgtgcagcaccgccaccagccacagaagcctgagcccccagctgctgcagcagatgcccagcaagcccgagggcgccgccaagaccatcggcagctacgtgcccggccccagaagcagaagccccagcctgaacagactgggcggcgccggcgaggacggcaagagaccccagcccctgtggcacgtgggcagccccttcgccctgggcgccaacaaggacagcctgagcgccttcgagtaccccggccccaagagaaagctgtacagcgccgtgcccggcagactgttcgtggccgtgaagccctaccagccccaggtggacggcgagatccccctgcacagaggcgacagagtgaaggtgctgagcatcggcgagggcggcttctgggagggcagcgccagaggccacatcggctggttccccgccgagtgcgtggaggaggtgcagtgcaagcccagagacagccaggccgagaccagagccgacagaagcaagaagctgttcagacactacaccgtgggcagctacgacagcttcgacaccagcagcgactgcatcatcgaggagaagaccgtggtgctgcagaagaaggacaacgagggcttcggcttcgtgctgagaggcgccaaggccgacacccccatcgaggagttcacccccacccccgccttccccgccctgcagtacctggagagcgtggacgagggcggcgtggcctggcaggccggcctgagaaccggcgacttcctgatcgaggtgaacaacgagaacgtggtgaaggtgggccacagacaggtggtgaacatgatcagacagggcggcaaccacctggtgctgaaggtggtgaccgtgaccagaaacctggaccccgacgacaccgccagaaagaaggccccccccccccccaagagagcccccaccaccgccctgaccctgagaagcaagagcatgaccagcgagctggaggagctggtggacaaggccagcgtgagaaagaagaaggacaagcccgaggagatcgtgcccgccagcaagcccagcagagccgccgagaacatggccgtggagcccagagtggccaccatcaagcagagacccagcagcagatgcttccccgccggcagcgacatgaacagcgtgtacgagagacagggcatcgccgtgatgacccccaccgtgcccggcagccccaaggcccccttcctgggcatccccagaggcaccatgagaagacagaagagcatcgacagcagaatcttcctgagcggcatcaccgaggaggagagacagttcctggccccccccatgctgaagttcaccagaagcctgagcatgcccgacaccagcgaggacatccccccccccccccagagcgtgccccccagcccccccccccccagccccaccacctacaactgccccaagagccccacccccagagtgtacggcaccatcaagcccgccttcaaccagaacagcgccgccaaggtgagccccgccaccagaagcgacaccgtggccaccatgatgagagagaagggcatgtacttcagaagagagctggacagatacagcctggacagcgaggacctgtacagcagaaacgccggcccccaggccaacttcagaaacaagagaggccagatgcccgagaacccctacagcgaggtgggcaagatcgccagcaaggccgtgtacgtgcccgccaagcccgccagaagaaagggcatgctggtgaagcagagcaacgtggaggacagccccgagaagacctgcagcatccccatccccaccatcatcgtgaaggagcccagcaccagcagcagcggcaagagcagccagggcagcagcatggagatcgacccccaggcccccgagccccccagccagctgagacccgacgagagcctgaccgtgagcagccccttcgccgccgccatcgccggcgccgtgagagacagagagaagagactggaggccagaagaaacagccccgccttcctgagcaccgacctgggcgacgaggacgtgggcctgggcccccccgcccccagaaccagacccagcatgttccccgaggagggcgacttcgccgacgaggacagcgccgagcagctgagcagccccatgcccagcgccacccccagagagcccgagaaccacttcgtgggcggcgccgaggccagcgcccccggcgaggccggcagacccctgaacagcaccagcaaggcccagggccccgagagcagccccgccgtgcccagcgccagcagcggcaccgccggccccggcaactacgtgcaccccctgaccggcagactgctggaccccagcagccccctggccctggccctgagcgccagagacagagccatgaaggagagccagcagggccccaagggcgaggcccccaaggccgacctgaacaagcccctgtacatcgacaccaagatgagacccagcctggacgccggcttccccaccgtgaccagacagaacaccagaggccccctgagaagacaggagaccgagaacaagtacgagaccgacctgggcagagacagaaagggcgacgacaagaagaacatgctgatcgacatcatggacaccagccagcagaagagcgccggcctgctgatggtgcacaccgtggacgccaccaagctggacaacgccctgcaggaggaggacgagaaggccgaggtggagatgaagcccgacagcagccccagcgaggtgcccgagggcgtgagcgagaccgagggcgccctgcagatcagcgccgcccccgagcccaccaccgtgcccggcagaaccatcgtggccgtgggcagcatggaggaggccgtgatcctgcccttcagaatcccccccccccccctggccagcgtggacctggacgaggacttcatcttcaccgagcccctgcccccccccctggagttcgccaacagcttcgacatccccgacgacagagccgccagcgtgcccgccctgagcgacctggtgaagcagaagaagagcgacaccccccagagccccagcctgaacagcagccagcccaccaacagcgccgacagcaagaagcccgccagcctgagcaactgcctgcccgccagcttcctgcccccccccgagagcttcgacgccgtggccgacagcggcatcgaggaggtggacagcagaagcagcagcgaccaccacctggagaccaccagcaccatcagcaccgtgagcagcatcagcaccctgagcagcgagggcggcgagaacgtggacacctgcaccgtgtacgccgacggccaggccttcatggtggacaagccccccgtgccccccaagcccaagatgaagcccatcatccacaagagcaacgccctgtaccaggacgccctggtggaggaggacgtggacagcttcgtgatccccccccccgcccccccccccccccccggcagcgcccagcccggcatggccaaggtgctgcagcccagaaccagcaagctgtggggcgacgtgaccgagatcaagagccccatcctgagcggccccaaggccaacgtgatcagcgagctgaacagcatcctgcagcagatgaacagagagaagctggccaagcccggcgagggcctggacagccccatgggcgccaagagcgccagcctggcccccagaagccccgagatcatgagcaccatcagcggcaccagaagcaccaccgtgaccttcaccgtgagacccggcaccagccagcccatcaccctgcagagcagaccccccgactacgagagcagaaccagcggcaccagaagagcccccagccccgtggtgagccccaccgagatgaacaaggagaccctgcccgcccccctgagcgccgccaccgccagccccagccccgccctgagcgacgtgttcagcctgcccagccagccccccagcggcgacctgttcggcctgaaccccgccggcagaagcagaagccccagccccagcatcctgcagcagcccatcagcaacaagcccttcaccaccaagcccgtgcacctgtggaccaagcccgacgtggccgactggctggagagcctgaacctgggcgagcacaaggaggccttcatggacaacgagatcgacggcagccacctgcccaacctgcagaaggaggacctgatcgacctgggcgtgaccagagtgggccacagaatgaacatcgagagagccctgaagcagctgctggacagatag

SEQ ID NO: 285771 - protein, 707 aa, Artificial Sequence
  derived and/or modified sequence
MLLWLLLLILTPGREQSGVAPKAVLLLNPPWSTAFKGEKVALICSSISHSLAQGDTYWYHDEKLLKIKHDKIQITEPGNYQCKTRGSSLSDAVHVEFSPDWLILQALHPVFEGDNVILRCQGKDNKNTHQKVYYKDGKQLPNSYNLEKITVNSVSRDNSKYHCTAYRKFYILDIEVTSKPLNIQVQELFLHPVLRASSSTPIEGSPMTLTCETQLSPQRPDVQLQFSLFRDSQTLGLGWSRSPRLQIPAMWTEDSGSYWCEVETVTHSIKKRSLRSQIRVQRVPVSNVNLEIRPTGGQLIEGENMVLICSVAQGSGTVTFSWHKEGRVRSLGRKTQRSLLAELHVLTVKESDAGRYYCAADNVHSPILSTWIRVTVRIPVSHPVLTFRAPRAHTVVGDLLELHCESLRGSPPILYRFYHEDVTLGNSSAPSGGGASFNLSLTAEHSGNYSCDADNGLGAQHSHGVSLRVTVPVSRPVLTLRAPGAQAVVGDLLELHCESLRGSFPILYWFYHEDDTLGNISAHSGGGASFNLSLTTEHSGNYSCEADNGLGAQHSKVVTLNVTGTSRNRTGLTAAGITGLVLSILVLAAAAALLHYARARRKPGGLSATGTSSHSPSECQEPSSSRPSRIDPQEPTHSKPLAPMELEPMYSNVNPGDSNPIYSQIWSIQHTKENSANCPMMHQEHEELTVLYSELKKEQSSRFSMSL

SEQ ID NO: 285772 - protein, 734 aa, Artificial Sequence
  derived and/or modified sequence
MLLWLLLLILTPGREQSGVAPKAVLLLNPPWSTAFKGEKVALICSSISHSLAQGDTYWYHDEKLLKIKHDKIQITEPGNYQCKTRGSSLSDAVHVEFSPDWLILQALHPVFEGDNVILRCQGKDNKNTHQKVYYKDGKQLPNSYNLEKITVNSVSRDNSKYHCTAYRKFYILDIEVTSKPLNIQVQELFLHPVLRASSSTPIEGSPMTLTCETQLSPQRPDVQLQFSLFRDSQTLGLGWSRSPRLQIPAMWTEDSGSYWCEVETVTHSIKKRSLRSQIRVQRVPVSNVNLEIRPTGGQLIEGENMVLICSVAQGSGTVTFSWHKEGRVRSLGRKTQRSLLAELHVLTVKESDAGRYYCAADNVHSPILSTWIRVTVRIPVSHPVLTFRAPRAHTVVGDLLELHCESLRGSPPILYRFYHEDVTLGNSSAPSGGGASFNLSLTAEHSGNYSCDADNGLGAQHSHGVSLRVTVPVSRPVLTLRAPGAQAVVGDLLELHCESLRGSFPILYWFYHEDDTLGNISAHSGGGASFNLSLTTEHSGNYSCEADNGLGAQHSKVVTLNVTGTSRNRTGLTAAGITGLVLSILVLAAAAALLHYARARRKPGGLSATGTSSHSPSECQEPSSSRPSRIDPQEPTHSKPLAPMELEPMYSNVNPGDSNPIYSQIWSIQHTKENSANCPMMHQEHEELTVLYSELKKTHPDDSAGEASSRGRAHEEDDEENYENVPRVLLASDH

SEQ ID NO: 285773 - protein, 742 aa, Artificial Sequence
  derived and/or modified sequence
MLLWLLLLILTPGREQSGVAPKAVLLLNPPWSTAFKGEKVALICSSISHSLAQGDTYWYHDEKLLKIKHDKIQITEPGNYQCKTRGSSLSDAVHVEFSPDWLILQALHPVFEGDNVILRCQGKDNKNTHQKVYYKDGKQLPNSYNLEKITVNSVSRDNSKYHCTAYRKFYILDIEVTSKPLNIQVQELFLHPVLRASSSTPIEGSPMTLTCETQLSPQRPDVQLQFSLFRDSQTLGLGWSRSPRLQIPAMWTEDSGSYWCEVETVTHSIKKRSLRSQIRVQRVPVSNVNLEIRPTGGQLIEGENMVLICSVAQGSGTVTFSWHKEGRVRSLGRKTQRSLLAELHVLTVKESDAGRYYCAADNVHSPILSTWIRVTVRIPVSHPVLTFRAPRAHTVVGDLLELHCESLRGSPPILYRFYHEDVTLGNSSAPSGGGASFNLSLTAEHSGNYSCDADNGLGAQHSHGVSLRVTVPVSRPVLTLRAPGAQAVVGDLLELHCESLRGSFPILYWFYHEDDTLGNISAHSGGGASFNLSLTTEHSGNYSCEADNGLGAQHSKVVTLNVTGTSRNRTGLTAAGITGLVLSILVLAAAAALLHYARARRKPGGLSATGTSSHSPSECQEPSSSRPSRIDPQEPTHSKPLAPMELEPMYSNVNPGDSNPIYSQIWSIQHTKENSANCPMMHQEHEELTVLYSELKKTHPDDSAGEASSRGRAHEEDDEENYENILNPRKNKVQDFPCLCNT

SEQ ID NO: 285774 - DNA, 2124 bp, Artificial Sequence
  derived and/or modified sequence
atgctgctgtggctgctgctgctgatcctgacccccggcagagagcagagcggcgtggcccccaaggccgtgctgctgctgaaccccccctggagcaccgccttcaagggcgagaaggtggccctgatctgcagcagcatcagccacagcctggcccagggcgacacctactggtaccacgacgagaagctgctgaagatcaagcacgacaagatccagatcaccgagcccggcaactaccagtgcaagaccagaggcagcagcctgagcgacgccgtgcacgtggagttcagccccgactggctgatcctgcaggccctgcaccccgtgttcgagggcgacaacgtgatcctgagatgccagggcaaggacaacaagaacacccaccagaaggtgtactacaaggacggcaagcagctgcccaacagctacaacctggagaagatcaccgtgaacagcgtgagcagagacaacagcaagtaccactgcaccgcctacagaaagttctacatcctggacatcgaggtgaccagcaagcccctgaacatccaggtgcaggagctgttcctgcaccccgtgctgagagccagcagcagcacccccatcgagggcagccccatgaccctgacctgcgagacccagctgagcccccagagacccgacgtgcagctgcagttcagcctgttcagagacagccagaccctgggcctgggctggagcagaagccccagactgcagatccccgccatgtggaccgaggacagcggcagctactggtgcgaggtggagaccgtgacccacagcatcaagaagagaagcctgagaagccagatcagagtgcagagagtgcccgtgagcaacgtgaacctggagatcagacccaccggcggccagctgatcgagggcgagaacatggtgctgatctgcagcgtggcccagggcagcggcaccgtgaccttcagctggcacaaggagggcagagtgagaagcctgggcagaaagacccagagaagcctgctggccgagctgcacgtgctgaccgtgaaggagagcgacgccggcagatactactgcgccgccgacaacgtgcacagccccatcctgagcacctggatcagagtgaccgtgagaatccccgtgagccaccccgtgctgaccttcagagcccccagagcccacaccgtggtgggcgacctgctggagctgcactgcgagagcctgagaggcagcccccccatcctgtacagattctaccacgaggacgtgaccctgggcaacagcagcgcccccagcggcggcggcgccagcttcaacctgagcctgaccgccgagcacagcggcaactacagctgcgacgccgacaacggcctgggcgcccagcacagccacggcgtgagcctgagagtgaccgtgcccgtgagcagacccgtgctgaccctgagagcccccggcgcccaggccgtggtgggcgacctgctggagctgcactgcgagagcctgagaggcagcttccccatcctgtactggttctaccacgaggacgacaccctgggcaacatcagcgcccacagcggcggcggcgccagcttcaacctgagcctgaccaccgagcacagcggcaactacagctgcgaggccgacaacggcctgggcgcccagcacagcaaggtggtgaccctgaacgtgaccggcaccagcagaaacagaaccggcctgaccgccgccggcatcaccggcctggtgctgagcatcctggtgctggccgccgccgccgccctgctgcactacgccagagccagaagaaagcccggcggcctgagcgccaccggcaccagcagccacagccccagcgagtgccaggagcccagcagcagcagacccagcagaatcgacccccaggagcccacccacagcaagcccctggcccccatggagctggagcccatgtacagcaacgtgaaccccggcgacagcaaccccatctacagccagatctggagcatccagcacaccaaggagaacagcgccaactgccccatgatgcaccaggagcacgaggagctgaccgtgctgtacagcgagctgaagaaggagcagagcagcagattcagcatgagcctgtag

SEQ ID NO: 285775 - DNA, 2205 bp, Artificial Sequence
  derived and/or modified sequence
atgctgctgtggctgctgctgctgatcctgacccccggcagagagcagagcggcgtggcccccaaggccgtgctgctgctgaaccccccctggagcaccgccttcaagggcgagaaggtggccctgatctgcagcagcatcagccacagcctggcccagggcgacacctactggtaccacgacgagaagctgctgaagatcaagcacgacaagatccagatcaccgagcccggcaactaccagtgcaagaccagaggcagcagcctgagcgacgccgtgcacgtggagttcagccccgactggctgatcctgcaggccctgcaccccgtgttcgagggcgacaacgtgatcctgagatgccagggcaaggacaacaagaacacccaccagaaggtgtactacaaggacggcaagcagctgcccaacagctacaacctggagaagatcaccgtgaacagcgtgagcagagacaacagcaagtaccactgcaccgcctacagaaagttctacatcctggacatcgaggtgaccagcaagcccctgaacatccaggtgcaggagctgttcctgcaccccgtgctgagagccagcagcagcacccccatcgagggcagccccatgaccctgacctgcgagacccagctgagcccccagagacccgacgtgcagctgcagttcagcctgttcagagacagccagaccctgggcctgggctggagcagaagccccagactgcagatccccgccatgtggaccgaggacagcggcagctactggtgcgaggtggagaccgtgacccacagcatcaagaagagaagcctgagaagccagatcagagtgcagagagtgcccgtgagcaacgtgaacctggagatcagacccaccggcggccagctgatcgagggcgagaacatggtgctgatctgcagcgtggcccagggcagcggcaccgtgaccttcagctggcacaaggagggcagagtgagaagcctgggcagaaagacccagagaagcctgctggccgagctgcacgtgctgaccgtgaaggagagcgacgccggcagatactactgcgccgccgacaacgtgcacagccccatcctgagcacctggatcagagtgaccgtgagaatccccgtgagccaccccgtgctgaccttcagagcccccagagcccacaccgtggtgggcgacctgctggagctgcactgcgagagcctgagaggcagcccccccatcctgtacagattctaccacgaggacgtgaccctgggcaacagcagcgcccccagcggcggcggcgccagcttcaacctgagcctgaccgccgagcacagcggcaactacagctgcgacgccgacaacggcctgggcgcccagcacagccacggcgtgagcctgagagtgaccgtgcccgtgagcagacccgtgctgaccctgagagcccccggcgcccaggccgtggtgggcgacctgctggagctgcactgcgagagcctgagaggcagcttccccatcctgtactggttctaccacgaggacgacaccctgggcaacatcagcgcccacagcggcggcggcgccagcttcaacctgagcctgaccaccgagcacagcggcaactacagctgcgaggccgacaacggcctgggcgcccagcacagcaaggtggtgaccctgaacgtgaccggcaccagcagaaacagaaccggcctgaccgccgccggcatcaccggcctggtgctgagcatcctggtgctggccgccgccgccgccctgctgcactacgccagagccagaagaaagcccggcggcctgagcgccaccggcaccagcagccacagccccagcgagtgccaggagcccagcagcagcagacccagcagaatcgacccccaggagcccacccacagcaagcccctggcccccatggagctggagcccatgtacagcaacgtgaaccccggcgacagcaaccccatctacagccagatctggagcatccagcacaccaaggagaacagcgccaactgccccatgatgcaccaggagcacgaggagctgaccgtgctgtacagcgagctgaagaagacccaccccgacgacagcgccggcgaggccagcagcagaggcagagcccacgaggaggacgacgaggagaactacgagaacgtgcccagagtgctgctggccagcgaccactag

SEQ ID NO: 285776 - DNA, 2229 bp, Artificial Sequence
  derived and/or modified sequence
atgctgctgtggctgctgctgctgatcctgacccccggcagagagcagagcggcgtggcccccaaggccgtgctgctgctgaaccccccctggagcaccgccttcaagggcgagaaggtggccctgatctgcagcagcatcagccacagcctggcccagggcgacacctactggtaccacgacgagaagctgctgaagatcaagcacgacaagatccagatcaccgagcccggcaactaccagtgcaagaccagaggcagcagcctgagcgacgccgtgcacgtggagttcagccccgactggctgatcctgcaggccctgcaccccgtgttcgagggcgacaacgtgatcctgagatgccagggcaaggacaacaagaacacccaccagaaggtgtactacaaggacggcaagcagctgcccaacagctacaacctggagaagatcaccgtgaacagcgtgagcagagacaacagcaagtaccactgcaccgcctacagaaagttctacatcctggacatcgaggtgaccagcaagcccctgaacatccaggtgcaggagctgttcctgcaccccgtgctgagagccagcagcagcacccccatcgagggcagccccatgaccctgacctgcgagacccagctgagcccccagagacccgacgtgcagctgcagttcagcctgttcagagacagccagaccctgggcctgggctggagcagaagccccagactgcagatccccgccatgtggaccgaggacagcggcagctactggtgcgaggtggagaccgtgacccacagcatcaagaagagaagcctgagaagccagatcagagtgcagagagtgcccgtgagcaacgtgaacctggagatcagacccaccggcggccagctgatcgagggcgagaacatggtgctgatctgcagcgtggcccagggcagcggcaccgtgaccttcagctggcacaaggagggcagagtgagaagcctgggcagaaagacccagagaagcctgctggccgagctgcacgtgctgaccgtgaaggagagcgacgccggcagatactactgcgccgccgacaacgtgcacagccccatcctgagcacctggatcagagtgaccgtgagaatccccgtgagccaccccgtgctgaccttcagagcccccagagcccacaccgtggtgggcgacctgctggagctgcactgcgagagcctgagaggcagcccccccatcctgtacagattctaccacgaggacgtgaccctgggcaacagcagcgcccccagcggcggcggcgccagcttcaacctgagcctgaccgccgagcacagcggcaactacagctgcgacgccgacaacggcctgggcgcccagcacagccacggcgtgagcctgagagtgaccgtgcccgtgagcagacccgtgctgaccctgagagcccccggcgcccaggccgtggtgggcgacctgctggagctgcactgcgagagcctgagaggcagcttccccatcctgtactggttctaccacgaggacgacaccctgggcaacatcagcgcccacagcggcggcggcgccagcttcaacctgagcctgaccaccgagcacagcggcaactacagctgcgaggccgacaacggcctgggcgcccagcacagcaaggtggtgaccctgaacgtgaccggcaccagcagaaacagaaccggcctgaccgccgccggcatcaccggcctggtgctgagcatcctggtgctggccgccgccgccgccctgctgcactacgccagagccagaagaaagcccggcggcctgagcgccaccggcaccagcagccacagccccagcgagtgccaggagcccagcagcagcagacccagcagaatcgacccccaggagcccacccacagcaagcccctggcccccatggagctggagcccatgtacagcaacgtgaaccccggcgacagcaaccccatctacagccagatctggagcatccagcacaccaaggagaacagcgccaactgccccatgatgcaccaggagcacgaggagctgaccgtgctgtacagcgagctgaagaagacccaccccgacgacagcgccggcgaggccagcagcagaggcagagcccacgaggaggacgacgaggagaactacgagaacatcctgaaccccagaaagaacaaggtgcaggacttcccctgcctgtgcaacacctag

SEQ ID NO: 285777 - DNA, 2582 bp, Artificial Sequence
  derived and/or modified sequence
ataacaacttatgtgaaagtcaaaaaggcatatgcttgacaccttgactgtgtgattcacaccacgctcattaagcttgcctacattaggagctgcatgcagaaccaaaggctgtgtgaagacaaggtctcatctgagtagcagcttcctgccctccttcttggagataagtcgggcttttggtgagacagactttcccaaccctctgcccggccggtgcccatgcttctgtggctgctgctgctgatcctgactcctggaagagaacaatcaggggtggccccaaaagctgtacttctcctcaatcctccatggtccacagccttcaaaggagaaaaagtggctctcatatgcagcagcatatcacattccctagcccagggagacacatattggtatcacgatgagaagttgttgaaaataaaacatgacaagatccaaattacagagcctggaaattaccaatgtaagacccgaggatcctccctcagtgatgccgtgcatgtggaattttcacctgactggctgatcctgcaggctttacatcctgtctttgaaggagacaatgtcattctgagatgtcaggggaaagacaacaaaaacactcatcaaaaggtttactacaaggatggaaaacagcttcctaatagttataatttagagaagatcacagtgaattcagtctccagggataatagcaaatatcattgtactgcttataggaagttttacatacttgacattgaagtaacttcaaaacccctaaatatccaagttcaagagctgtttctacatcctgtgctgagagccagctcttccacgcccatagaggggagtcccatgaccctgacctgtgagacccagctctctccacagaggccagatgtccagctgcaattctccctcttcagagatagccagaccctcggattgggctggagcaggtcccccagactccagatccctgccatgtggactgaagactcagggtcttactggtgtgaggtggagacagtgactcacagcatcaaaaaaaggagcctgagatctcagatacgtgtacagagagtccctgtgtctaatgtgaatctagagatccggcccaccggagggcagctgattgaaggagaaaatatggtccttatttgctcagtagcccagggttcagggactgtcacattctcctggcacaaagaaggaagagtaagaagcctgggtagaaagacccagcgttccctgttggcagagctgcatgttctcaccgtgaaggagagtgatgcagggagatactactgtgcagctgataacgttcacagccccatcctcagcacgtggattcgagtcaccgtgagaattccggtatctcaccctgtcctcaccttcagggctcccagggcccacactgtggtgggggacctgctggagcttcactgtgagtccctgagaggctctcccccgatcctgtaccgattttatcatgaggatgtcaccctggggaacagctcagccccctctggaggaggagcctccttcaacctctctctgactgcagaacattctggaaactactcctgtgatgcagacaatggcctgggggcccagcacagtcatggagtgagtctcagggtcacagttccggtgtctcgccccgtcctcaccctcagggctcccggggcccaggctgtggtgggggacctgctggagcttcactgtgagtccctgagaggctccttcccgatcctgtactggttttatcacgaggatgacaccttggggaacatctcggcccactctggaggaggggcatccttcaacctctctctgactacagaacattctggaaactactcatgtgaggctgacaatggcctgggggcccagcacagtaaagtggtgacactcaatgttacaggaacttccaggaacagaacaggccttaccgctgcgggaatcacggggctggtgctcagcatcctcgtccttgctgctgctgctgctctgctgcattacgccagggcccgaaggaaaccaggaggactttctgccactggaacatctagtcacagtcctagtgagtgtcaggagccttcctcgtccaggccttccaggatagaccctcaagagcccactcactctaaaccactagccccaatggagctggagccaatgtacagcaatgtaaatcctggagatagcaacccgatttattcccagatctggagcatccagcatacaaaagaaaactcagctaattgtccaatgatgcatcaagagcatgaggaacttacagtcctctattcagaactgaagaaagaacaaagttcaagattttccatgtctttgtaacacttagccctgtgcaaatcagagtatgtgagtggaagaaggggtgagtcctaactgtacatctcggatataacaaatgtgcaaattctgattgattgccctgtaaaatgaattattctcatgcagtgctctacttgacttttatctttgaattcacaactaaaaacccatagcccagaaatctaaaaaaagtaattttagtggagcctttgaaaataaaagaccattggaaaaag

SEQ ID NO: 285778 - DNA, 4725 bp, Artificial Sequence
  derived and/or modified sequence
agtgaaggggtttcccatatgaaaaatacagaaagaattatttgaatactagcaaatacacaacttgatatttctagagaacccaggcacagtcttggagacattactcctgagagactgcagctgatggaagatgagccccaacttctaaaaatgtatcactaccgggattgagatacaaacagcatttaggaaggtctcatctgagtagcagcttcctgccctccttcttggagataagtcgggcttttggtgagacagactttcccaaccctctgcccggccggtgcccatgcttctgtggctgctgctgctgatcctgactcctggaagagaacaatcaggggtggccccaaaagctgtacttctcctcaatcctccatggtccacagccttcaaaggagaaaaagtggctctcatatgcagcagcatatcacattccctagcccagggagacacatattggtatcacgatgagaagttgttgaaaataaaacatgacaagatccaaattacagagcctggaaattaccaatgtaagacccgaggatcctccctcagtgatgccgtgcatgtggaattttcacctgactggctgatcctgcaggctttacatcctgtctttgaaggagacaatgtcattctgagatgtcaggggaaagacaacaaaaacactcatcaaaaggtttactacaaggatggaaaacagcttcctaatagttataatttagagaagatcacagtgaattcagtctccagggataatagcaaatatcattgtactgcttataggaagttttacatacttgacattgaagtaacttcaaaacccctaaatatccaagttcaagagctgtttctacatcctgtgctgagagccagctcttccacgcccatagaggggagtcccatgaccctgacctgtgagacccagctctctccacagaggccagatgtccagctgcaattctccctcttcagagatagccagaccctcggattgggctggagcaggtcccccagactccagatccctgccatgtggactgaagactcagggtcttactggtgtgaggtggagacagtgactcacagcatcaaaaaaaggagcctgagatctcagatacgtgtacagagagtccctgtgtctaatgtgaatctagagatccggcccaccggagggcagctgattgaaggagaaaatatggtccttatttgctcagtagcccagggttcagggactgtcacattctcctggcacaaagaaggaagagtaagaagcctgggtagaaagacccagcgttccctgttggcagagctgcatgttctcaccgtgaaggagagtgatgcagggagatactactgtgcagctgataacgttcacagccccatcctcagcacgtggattcgagtcaccgtgagaattccggtatctcaccctgtcctcaccttcagggctcccagggcccacactgtggtgggggacctgctggagcttcactgtgagtccctgagaggctctcccccgatcctgtaccgattttatcatgaggatgtcaccctggggaacagctcagccccctctggaggaggagcctccttcaacctctctctgactgcagaacattctggaaactactcctgtgatgcagacaatggcctgggggcccagcacagtcatggagtgagtctcagggtcacagttccggtgtctcgccccgtcctcaccctcagggctcccggggcccaggctgtggtgggggacctgctggagcttcactgtgagtccctgagaggctccttcccgatcctgtactggttttatcacgaggatgacaccttggggaacatctcggcccactctggaggaggggcatccttcaacctctctctgactacagaacattctggaaactactcatgtgaggctgacaatggcctgggggcccagcacagtaaagtggtgacactcaatgttacaggaacttccaggaacagaacaggccttaccgctgcgggaatcacggggctggtgctcagcatcctcgtccttgctgctgctgctgctctgctgcattacgccagggcccgaaggaaaccaggaggactttctgccactggaacatctagtcacagtcctagtgagtgtcaggagccttcctcgtccaggccttccaggatagaccctcaagagcccactcactctaaaccactagccccaatggagctggagccaatgtacagcaatgtaaatcctggagatagcaacccgatttattcccagatctggagcatccagcatacaaaagaaaactcagctaattgtccaatgatgcatcaagagcatgaggaacttacagtcctctattcagaactgaagaagacacacccagacgactctgcaggggaggctagcagcagaggcagggcccatgaagaagatgatgaagaaaactatgagaatgtaccacgtgtattactggcctcagaccactagccccttacccagagtggcccacaggaaacagcctgcaccatttttttttctgttctctccaaccacacatcatccatctctccagactctgcctcctacgaggctgggctgcagggtatgtgaggctgagcaaaaggtctgcaaatctcccctgtgcctgatctgtgtgttccccaggaagagagcaggcagcctctgagcaagcactgtgttattttcacagtggagacacgtggcaaggcaggagggccctcagctcctagggctgtcgaatagaggaggagagagaaatggtctagccagggttacaagggcacaatcatgaccatttgatccaagtgtgatcgaaagctgttaatgtgctctctgtataaacaatttgctccaaatattttgtttcccttttttgtgtggctggtagtggcattgctgatgttttggtgtatatgctgtatccttgctaccatattgggaacagccaaaagaagttatagaacaagaatttaaggtgactctatctgaagtgtatttttgtacttacagggtgacattcccaaccaaattaccctagttatgatgaaaaataacttcagcatttcattaaagactctgctagtttaatatgtgacttgtatccccactgcaaagaccttatgtgtgaagaatcacattaattgtaatttttgcttcatgacatagtctcatcatttgccatacatgatagatttctagtcagtcagttttattcttataagcacccattaaccccgagacaataacctactatatctatgtggcttctcccattctcttcctctacctcactccatctgataaaaaaccattctaaatctcatgttcattattcccatgctctcctatttctatcatattaatgtatctacatgttttccttaaatatgtttttatattagttttaactataagttaaagaccatattgttgtagataattttttttagtactttctcttcatgttgtatttctaagattcatccatattgttgcgtgttgctatagttcatttgtttttattgctgtttagtatttacttgtgtaaaatatctggcttaatgttttcctagctatcaccatcaaaaactctttccacagtgtgttgaatttttaatatgacaaaaatgaaaatgtaccaacaattttcagtgacttcacctccattctgaaatcctgatgtttccaaatatctctgaacacctcaagtcctagggacaactgagattatattaacattaatctctgaatgttgccaattctaggccttcacttggttcatgtaggaacaccaagtccctttcaaagcaccacatcttcctctaatcaatatttcttggagtccctagggaatgtcttacatgcattcaaacaatcaccatttctggagatacactacagggtcaccataaactctgctacccttaggttccatcactatggaagctgagtttcaccagaaggcacttttgtcctccattacgaccagcaaagccagctaagccacagctgctggcctcaaaaaatgtgatgatcaatccacactgctcccactggcctctgttacccttatcctggcctttgagtgcagggcatgatgtcctgcccgtactgagatgctgatctctgccagttcatgttcatattggcattaaaattttaaggtcccttgaagagggaggaggcaaatgtctctgtcttctatgtgatacattctgctgtttttttctctatggtgaaaatatgtaaaccggttttgggtaccaaccaccaggctgtatatggaggctctcctcctttctaaccctgctgctgatttggaattaccttgccaagcccctttgtgccttatagtgaactttctctaagggacctgtcatctcttatcattgtttatccattttctagattctgaacccaagaaagaacaaagttcaagattttccatgtctttgtaacacttagccctgtgcaaatcagagtatgtgagtggaagaaggggtgagtcctaactgtacatctcggatataacaaatgtgcaaattctgattgattgccctgtaaaatgaattattctcatgcagtgctctacttgacttttatctttgaattcacaactaaaaacccatagcccagaaatctaaaaaaagtaattttagtggagcctttgaaaataaaagaccattggaaaaagt

SEQ ID NO: 285779 - DNA, 2633 bp, Artificial Sequence
  derived and/or modified sequence
gcagctgatggaagatgagccccaacttctaaaaatgtatcactaccgggattgagatacaaacagcatttaggaaggtctcatctgagtagcagcttcctgccctccttcttggagataagtcgggcttttggtgagacagactttcccaaccctctgcccggccggtgcccatgcttctgtggctgctgctgctgatcctgactcctggaagagaacaatcaggggtggccccaaaagctgtacttctcctcaatcctccatggtccacagccttcaaaggagaaaaagtggctctcatatgcagcagcatatcacattccctagcccagggagacacatattggtatcacgatgagaagttgttgaaaataaaacatgacaagatccaaattacagagcctggaaattaccaatgtaagacccgaggatcctccctcagtgatgccgtgcatgtggaattttcacctgactggctgatcctgcaggctttacatcctgtctttgaaggagacaatgtcattctgagatgtcaggggaaagacaacaaaaacactcatcaaaaggtttactacaaggatggaaaacagcttcctaatagttataatttagagaagatcacagtgaattcagtctccagggataatagcaaatatcattgtactgcttataggaagttttacatacttgacattgaagtaacttcaaaacccctaaatatccaagttcaagagctgtttctacatcctgtgctgagagccagctcttccacgcccatagaggggagtcccatgaccctgacctgtgagacccagctctctccacagaggccagatgtccagctgcaattctccctcttcagagatagccagaccctcggattgggctggagcaggtcccccagactccagatccctgccatgtggactgaagactcagggtcttactggtgtgaggtggagacagtgactcacagcatcaaaaaaaggagcctgagatctcagatacgtgtacagagagtccctgtgtctaatgtgaatctagagatccggcccaccggagggcagctgattgaaggagaaaatatggtccttatttgctcagtagcccagggttcagggactgtcacattctcctggcacaaagaaggaagagtaagaagcctgggtagaaagacccagcgttccctgttggcagagctgcatgttctcaccgtgaaggagagtgatgcagggagatactactgtgcagctgataacgttcacagccccatcctcagcacgtggattcgagtcaccgtgagaattccggtatctcaccctgtcctcaccttcagggctcccagggcccacactgtggtgggggacctgctggagcttcactgtgagtccctgagaggctctcccccgatcctgtaccgattttatcatgaggatgtcaccctggggaacagctcagccccctctggaggaggagcctccttcaacctctctctgactgcagaacattctggaaactactcctgtgatgcagacaatggcctgggggcccagcacagtcatggagtgagtctcagggtcacagttccggtgtctcgccccgtcctcaccctcagggctcccggggcccaggctgtggtgggggacctgctggagcttcactgtgagtccctgagaggctccttcccgatcctgtactggttttatcacgaggatgacaccttggggaacatctcggcccactctggaggaggggcatccttcaacctctctctgactacagaacattctggaaactactcatgtgaggctgacaatggcctgggggcccagcacagtaaagtggtgacactcaatgttacaggaacttccaggaacagaacaggccttaccgctgcgggaatcacggggctggtgctcagcatcctcgtccttgctgctgctgctgctctgctgcattacgccagggcccgaaggaaaccaggaggactttctgccactggaacatctagtcacagtcctagtgagtgtcaggagccttcctcgtccaggccttccaggatagaccctcaagagcccactcactctaaaccactagccccaatggagctggagccaatgtacagcaatgtaaatcctggagatagcaacccgatttattcccagatctggagcatccagcatacaaaagaaaactcagctaattgtccaatgatgcatcaagagcatgaggaacttacagtcctctattcagaactgaagaagacacacccagacgactctgcaggggaggctagcagcagaggcagggcccatgaagaagatgatgaagaaaactatgagaatattctgaacccaagaaagaacaaagttcaagattttccatgtctttgtaacacttagccctgtgcaaatcagagtatgtgagtggaagaaggggtgagtcctaactgtacatctcggatataacaaatgtgcaaattctgattgattgccctgtaaaatgaattattctcatgcagtgctctacttgacttttatctttgaattcacaactaaaaacccatagcccagaaatctaaaaaaagtaattttagtggagcctttgaaaataaaagaccattggaaaaagta

SEQ ID NO: 285780 - DNA, 2786 bp, Artificial Sequence
  derived and/or modified sequence
agactgcagctgatggaagatgagccccaacttctaaaaatgtatcactaccgggattgagatacaaacagcatttaggaaggtctcatctgagtagcagcttcctgccctccttcttggagataagtcgggcttttggtgagacagactttcccaaccctctgcccggccggtgcccatgcttctgtggctgctgctgctgatcctgactcctggaagagaacaatcaggggtggccccaaaagctgtacttctcctcaatcctccatggtccacagccttcaaaggagaaaaagtggctctcatatgcagcagcatatcacattccctagcccagggagacacatattggtatcacgatgagaagttgttgaaaataaaacatgacaagatccaaattacagagcctggaaattaccaatgtaagacccgaggatcctccctcagtgatgccgtgcatgtggaattttcacctgactggctgatcctgcaggctttacatcctgtctttgaaggagacaatgtcattctgagatgtcaggggaaagacaacaaaaacactcatcaaaaggtttactacaaggatggaaaacagcttcctaatagttataatttagagaagatcacagtgaattcagtctccagggataatagcaaatatcattgtactgcttataggaagttttacatacttgacattgaagtaacttcaaaacccctaaatatccaagttcaagagctgtttctacatcctgtgctgagagccagctcttccacgcccatagaggggagtcccatgaccctgacctgtgagacccagctctctccacagaggccagatgtccagctgcaattctccctcttcagagatagccagaccctcggattgggctggagcaggtcccccagactccagatccctgccatgtggactgaagactcagggtcttactggtgtgaggtggagacagtgactcacagcatcaaaaaaaggagcctgagatctcagatacgtgtacagagagtccctgtgtctaatgtgaatctagagatccggcccaccggagggcagctgattgaaggagaaaatatggtccttatttgctcagtagcccagggttcagggactgtcacattctcctggcacaaagaaggaagagtaagaagcctgggtagaaagacccagcgttccctgttggcagagctgcatgttctcaccgtgaaggagagtgatgcagggagatactactgtgcagctgataacgttcacagccccatcctcagcacgtggattcgagtcaccgtgagaattccggtatctcaccctgtcctcaccttcagggctcccagggcccacactgtggtgggggacctgctggagcttcactgtgagtccctgagaggctctcccccgatcctgtaccgattttatcatgaggatgtcaccctggggaacagctcagccccctctggaggaggagcctccttcaacctctctctgactgcagaacattctggaaactactcctgtgatgcagacaatggcctgggggcccagcacagtcatggagtgagtctcagggtcacagttccggtgtctcgccccgtcctcaccctcagggctcccggggcccaggctgtggtgggggacctgctggagcttcactgtgagtccctgagaggctccttcccgatcctgtactggttttatcacgaggatgacaccttggggaacatctcggcccactctggaggaggggcatccttcaacctctctctgactacagaacattctggaaactactcatgtgaggctgacaatggcctgggggcccagcacagtaaagtggtgacactcaatgttacaggaacttccaggaacagaacaggccttaccgctgcgggaatcacggggctggtgctcagcatcctcgtccttgctgctgctgctgctctgctgcattacgccagggcccgaaggaaaccaggaggactttctgccactggaacatctagtcacagtcctagtgagtgtcaggagccttcctcgtccaggccttccaggatagaccctcaagagcccactcactctaaaccactagccccaatggagctggagccaatgtacagcaatgtaaatcctggagatagcaacccgatttattcccagatctggagcatccagcatacaaaagaaaactcagctaattgtccaatgatgcatcaagagcatgaggaacttacagtcctctattcagaactgaagaagacacacccagacgactctgcaggggaggctagcagcagaggcagggcccatgaagaagatgatgaagaaaactatgagaatgtaccacgtgtattactggcctcagaccactagccccttacccagagtggcccacaggaaacagcctgcaccatttttttttctgttctctccaaccacacatcatccatctctccagactctgcctcctacgaggctgggctgcaggattctgaacccaagaaagaacaaagttcaagattttccatgtctttgtaacacttagccctgtgcaaatcagagtatgtgagtggaagaaggggtgagtcctaactgtacatctcggatataacaaatgtgcaaattctgattgattgccctgtaaaatgaattattctcatgcagtgctctacttgacttttatctttgaattcacaactaaaaacccatagcccagaaatctaaaaaaagtaattttagtggagcctttgaaaataaaagaccattggaaaaagta

SEQ ID NO: 285781 - DNA, 2124 bp, Artificial Sequence
  derived and/or modified sequence
atgttactttggctgttgctgctgatattgacacctggcagggagcaatctggcgtggctccaaaagccgtcctgctgctgaatcctccctggagtactgccttcaaaggggagaaagtggccctgatctgctcctccatatcccactcattagctcagggggatacgtactggtatcacgatgaaaaactgctcaagatcaagcatgataaaattcagatcacagagccagggaattaccaatgcaaaacccggggtagctctttgagcgatgctgttcatgtggagttttctccagattggttgatcctacaggcactgcacccggtcttcgagggcgataatgtgatcctgcgctgtcagggcaaggacaacaaaaatacccatcagaaggtctactataaagatggaaagcagctcccgaacagctacaatctggagaagatcacagttaattcagtctcccgagacaactccaaatatcattgtacggcgtataggaagttctatattctggacattgaggtgacaagcaagccccttaatatccaggtgcaggagcttttcttacaccccgtgttaagggcatcttcttcaactcccattgaggggagtcccatgaccctgacttgcgaaacacagctgagtccccagaggcctgacgttcagcttcagttctccctgttcagagactcccagactttgggacttgggtggtccagaagtccccggctccaaatcccagctatgtggaccgaggattcaggctcatactggtgtgaagtcgagaccgtcactcacagcatcaaaaagcgatccttacgctctcagattagagtccagcgggtgccagtgagtaacgttaaccttgagatcaggcctactgggggacagttgatcgaaggtgaaaacatggtcctgatttgttcagttgcacaggggtcagggaccgtcacgttttcgtggcacaaagaaggcagagtgagaagcttgggacgaaagacccagaggtccctgctagcagagctacatgtcctcactgtgaaggagagtgacgctggacgctactactgtgctgccgataacgtccatagccccatactctctacatggatcagagttacggtccgtatcccagtttcccaccccgtgctgactttcagagcccctagggcacacacagtcgttggcgacctgctcgagttacactgtgagtctttgaggggatctccccccatcctctatagattctaccatgaggacgtgactcttggcaattccagcgccccatcgggcggtggggcatcatttaacctgagtctgaccgccgagcactcgggaaattactcttgcgacgccgacaatgggcttggggcgcagcattctcacggcgtgtctcttagagtgacagtgcccgtctcaagacccgtgcttacgctgcgtgccccaggagctcaggcggttgttggggacctgctggagctgcactgtgagtctctgaggggatcttttcccattctttattggttttatcacgaggatgatacacttggtaacatctctgcccacagcggaggaggcgcctcttttaacctttccctcaccacagaacatagtgggaactattcatgcgaggcggacaatggactcggggcccagcactccaaagtggtgacgctgaacgtgaccgggacgagtcggaacaggactggcctgaccgccgcggggatcactggactcgtgctcagtattcttgtgctggccgccgccgcagccctgctccactatgccagagcaagacgaaagcccggcgggctgtctgcaactgggacttcatcacactccccgtcagaatgtcaggagccgagctcatctcggccctctcggattgaccctcaggagcctacacatagtaagcccctggcccccatggagctcgaacccatgtactcaaatgttaaccccggcgacagtaaccccatatatagccagatatggagtatccagcacacaaaagagaactctgcaaactgcccaatgatgcaccaggagcacgaggagctcactgtactctactcggagctgaaaaaggagcagtcttctcgattcagtatgagtctatag

SEQ ID NO: 285782 - DNA, 2205 bp, Artificial Sequence
  derived and/or modified sequence
atgttgctttggctcctactcctcattctcactcccggcagagagcagagcggtgtcgcccccaaagccgtcctcctactgaaccctccttggagtacagccttcaagggcgaaaaggtcgcactcatatgttcatctatttctcacagcctggcccagggggatacctactggtatcacgatgaaaagctgctcaaaattaaacacgacaagattcagataacagagcccggcaattaccagtgtaagacaagaggaagctctctgtccgacgctgtccatgtagagttttcccccgattggttgattttgcaggccctccaccccgtgttcgagggagataatgtcatcctccggtgccagggcaaggataacaaaaacactcaccagaaggtgtattacaaggatggaaagcagctgcccaatagctataacttggagaaaatcacggtgaacagcgtgagccgagataactcaaagtaccactgcacagcctaccgaaaattctacattttggatattgaggtgactagtaaaccacttaacatccaagtgcaggagctgttccttcaccctgtattacgcgcatcatccagtactcctatcgaaggttcccccatgaccctgacttgtgagacacagctgtctccccagcggcccgatgtccagctccagttctcactttttcgcgactcacaaacacttggccttggttggagccgatccccacgcctccagatccccgcaatgtggacagaagactccggctcatactggtgtgaggtcgaaaccgtcactcatagcattaagaaacggtctctaagaagtcagattcgggttcagagggtgccagtctccaatgtgaacctggaaattaggcccactgggggccaattaatcgaaggcgaaaacatggtgttgatctgctccgtggcgcaggggagtgggactgtgacattctcatggcacaaggagggacgggtccgctcactaggccgtaagacacagagaagtctgctcgccgagctgcacgtactgacggtaaaagagagcgacgctggtcggtattactgcgccgcagataacgtccattccccgattctgtccacctggatccgggtgactgtacgcatccccgtcagtcacccggtgctgaccttcagggcgcctcgggcacacaccgtagtgggggacttgcttgaactgcattgtgagagcctgaggggcagtccacccattttgtaccgtttttaccatgaggatgttaccttgggaaactcatcggccccatcagggggtggtgccagtttcaatctgagtcttaccgcagagcactctggcaattattcttgcgacgccgacaatgggttgggcgcgcaacacagccatggagtgtccctcagggtgactgtccctgttagccgccctgttctgacactccgggcacccggggcccaggccgtcgtgggcgatctactggagttacattgtgagtcattaagagggagctttcccatcctgtactggttctaccatgaggacgacacactgggcaacatctccgcgcattctggtgggggagcttcctttaatctatctctgaccacagagcacagcggtaattattcctgcgaagcggataatgggctcggagcccagcactccaaagtggttaccttgaatgtgaccggcacaagccggaatcgaactggcctgacggccgcggggataaccggtctagtgctttccattctcgtgttggccgccgccgcggctctgctgcattatgcacgagcaaggcgaaagcccggcgggctgagtgctaccggaaccagttcccattctccgagcgaatgccaggaaccgagctccagtcgacctagcaggatcgatccccaagagcccacgcatagcaagcccctggcgccaatggagcttgaacctatgtacagcaatgtcaaccctggagactcgaaccccatttacagtcagatctggtccatccaacatacaaaggaaaattccgctaattgcccgatgatgcaccaggaacatgaggagctcactgttctctatagtgagctgaagaagactcatcctgatgactcagcaggcgaagcatcttctcggggtcgcgcccatgaagaagacgacgaagagaactatgagaatgtgcccagggtgcttctggcatcagaccattag

SEQ ID NO: 285783 - DNA, 2229 bp, Artificial Sequence
  derived and/or modified sequence
atgttgctttggcttctgcttttaattctcacacctggccgagaacagagtggggtcgcccccaaagcagttttactccttaacccaccttggtcaacggccttcaagggcgaaaaggtcgcattgatctgcagctctatttctcactctctggcacaaggcgacacatattggtaccacgatgagaagctgctgaagattaaacacgacaagattcaaatcacagagcccgggaactatcagtgtaagaccagaggcagtagtttatcggatgcagtgcacgtagaatttagtcccgactggttgattctccaagccctgcatcctgtgttcgagggcgacaacgtaattcttagatgccagggcaaagataacaagaatactcaccaaaaggtgtactacaaggacggaaagcagctgccaaactcttacaacttggagaaaattaccgtcaactctgtcagtcgtgataatagtaagtaccactgtaccgcgtacaggaaattctacatcctcgatatcgaagtaacctctaagcctctaaacattcaggtgcaggaactttttctgcaccctgtgctgagagcgagctcctctactcccattgaggggagtcccatgactctaacgtgtgagactcagctgagcccacaaagacctgacgtccagttgcagtttagcctttttcgcgactcccagaccctcgggctcggctggagcagatcaccgcggctccaaattcccgctatgtggacggaggacagtgggtcctattggtgtgaggtggagacggtgacccactccattaaaaaaagatctctccgcagtcagatccgcgttcagcgcgtgcccgtgagtaacgtgaatcttgagattagaccgaccggcggacaactcatcgagggagagaatatggtcctcatatgttcggtggcacaaggctccgggacagttaccttctcctggcacaaggagggccgcgtcaggagtctcgggaggaaaacccagcgctctttactggcagaactccatgtgcttaccgtgaaggagagcgatgcaggacgctactactgtgcagcagataacgttcactcacccattctctctacatggattagagtgaccgtccggattcctgtgtcccacccagtcctgacctttcgggccccacgggctcacacagtggtgggagatctgctcgaactccattgcgagagccttagaggctccccgcccatcctgtacagattctaccacgaagacgttaccctgggcaattcctcagccccttctggcggtggcgcctcattcaacttaagcctaacagccgaacattccgggaactactcttgtgacgctgacaatggtctcggggcacagcatagtcacggcgtgagcttaagggttaccgttccggtttctcggcctgtgttgactcttagggctcctggcgcacaggccgtggtgggtgacctcttggagctgcattgcgaatcactgagggggagcttccccatactatactggttttaccatgaggatgacacattaggcaatattagcgctcattcagggggcggcgcctctttcaacctgtcccttaccacagagcattctgggaattattcgtgcgaagccgacaatggcctcggcgcacagcactctaaggtagtgactttgaacgtgaccggcaccagtcgcaaccgcaccggcttgacggctgcaggcattacaggcttagtgctgtcgatcctggtactggcagctgcagctgccctgctgcactatgccagagccagacgtaaacctgggggcttgtcggcaaccggcaccagtagccactcaccgagcgaatgccaggagcccagctcttctaggccctctcggattgacccccaggagcccacccacagcaagcctctcgcgccaatggaactcgaaccaatgtacagtaatgtgaatcctggggattcaaaccccatctatagccaaatctggtccattcaacacaccaaggaaaacagcgctaattgtcctatgatgcaccaggagcacgaggaattaacagtgctgtattccgaattaaaaaaaactcacccagatgactccgccggcgaggcctccagcaggggtcgagcgcatgaagaggacgacgaagaaaattacgaaaacatattgaacccgaggaaaaacaaagtacaagatttcccatgcctctgtaatacctag

SEQ ID NO: 285784 - DNA, 2205 bp, Artificial Sequence
  derived and/or modified sequence
atgttattgtggttgctcctgcttatcctaactcccggacgggaacagtctggagtggcacctaaagctgttctgttactaaaccccccttggagcacagctttcaaaggcgaaaaggttgcactgatttgcagctcaatttcccacagtttagcgcaaggggacacctattggtaccacgatgagaaactgctgaaaatcaaacacgataaaatccagattactgaaccaggaaattaccagtgcaaaacccgggggtcttcgttaagtgatgccgtccatgttgagttctcccctgactggttgatactccaggcgcttcatcctgtgttcgaaggcgataacgtgatactgcggtgccaggggaaggataacaaaaatacccatcagaaggtatattataaagatgggaagcaacttccaaatagctataacctggagaagattaccgtgaactctgtctccagggacaattctaaataccactgcactgcctaccggaagttctacattttggacatcgaagtcacgagcaagccgttgaacattcaggtgcaggagctttttctgcaccctgtcctgcgggcttcaagcagtaccccaatcgagggcagccccatgactctgacctgtgagacacagctgtccccccagcggcctgatgtccagctccaattcagtctcttccgcgactcacagacgctcggtctggggtggtcccgttctcctagactccagatccctgccatgtggacagaggatagcggctcctactggtgcgaggtggagactgtgacccattcgatcaagaagcggtcccttaggagccagatccgggtgcagcgggttcccgtctctaatgtgaatctggagatcagacctaccggcgggcaactgatagaaggtgaaaacatggtgttgatttgcagcgtggcacaaggtagtggtacagtgacattttcatggcataaggaggggagagtgaggagcctggggcggaagactcaaagatccctattggctgagttgcatgttcttactgtcaaggagtctgatgctggcagatactactgcgcagcagataacgtgcacagccctatactctccacttggatccgagtgacagtccgaatccccgtctcacatccagtgctgacctttagagctcctagggctcacactgttgttggcgatttgttggaattacactgcgaatctctgaggggtagccctcccattttgtaccgcttctaccacgaagacgtcacgctggggaatagctcagctccctctggagggggcgcctcgttcaacctgtccctgactgcggaacactctgggaactattcctgtgacgcagacaatggtctcggggcacagcatagccacggtgtaagccttcgggtcacagtcccggtctctagacccgttctgactctcagggctcctggcgcccaggcggtggtgggagacttactggaacttcattgcgagtccctgcgcggcagctttccaattctctattggttttaccatgaggacgataccctgggcaatataagcgcccatagcggaggaggggcatctttcaatcttagcctgacgacagagcattccggcaactactcatgcgaggcagataatggcctgggagcacagcactctaaagtcgtgaccctaaacgttactggaacttcacgtaataggacaggactgaccgccgctggtatcacaggcttggtgctgagcattctggttctggctgccgctgcagcattactgcattacgcaagggcaagacgaaaacccggtggactcagtgccaccggcacgtctagccatagcccttccgagtgtcaggagccctcctcttccagaccatctaggatcgatcctcaggagccaactcactcaaagccactggcacctatggagctggagccaatgtactctaacgtgaatcccggtgattccaaccccatttactcccaaatctggagtatacaacacactaaggagaacagtgccaattgtccaatgatgcatcaggaacacgaggagctgacggtgctgtactcagaattaaagaagacccacccagatgacagtgcaggggaggctagttcccgcggacgcgcgcacgaggaagacgacgaggagaattatgagaatgtgcctagggttctgctggcaagtgatcattag

SEQ ID NO: 285785 - DNA, 2124 bp, Artificial Sequence
  derived and/or modified sequence
atgctgctgtggctgctgctgctgatcctgaccccaggccgggagcagagcggcgtggcccccaaggctgtgctgctgctgaaccccccctggagcacagccttcaagggggagaaggtggccctgatctgcagcagcatcagccacagcctggcccagggcgacacctactggtaccatgatgagaagctgctgaagatcaagcatgacaagatccagatcacagagcccggcaactaccagtgcaagacccggggcagcagcctgagtgatgctgtgcacgtggagttctccccagactggctgatcctgcaggccctgcaccctgtgtttgaaggagacaacgtcatcctgcgctgccagggcaaggacaacaagaacacccaccagaaggtgtactacaaggatggcaagcagctgcccaacagctacaacctggagaagatcaccgtgaacagcgtgtcccgggacaacagcaagtaccactgcacagcctacaggaagttctacatcctggacatcgaggtgaccagcaagcccctgaacatccaggtgcaggagctgttcctgcaccctgtgctgcgggccagcagcagcacccccatcgagggcagccccatgaccctgacctgtgagacccagctgagcccccagaggccagatgtgcagctgcagttcagcctcttccgggacagccagaccctgggcctgggctggagccgcagcccccggctgcagatcccagccatgtggacagaagattctggcagctactggtgtgaggtggagaccgtgacccacagcatcaagaagaggagcctgcggagccagatccgggtgcagagggtgcctgtgtccaatgtgaacctggagatccggcccactggaggccagctgattgaaggagagaacatggtgctgatctgcagcgtggcccagggcagcggcaccgtgaccttctcctggcacaaggagggccgggtgcgcagcctgggcaggaagacccagaggagcctgctggccgagctgcacgtgctgactgtgaaggagagtgatgctggccgctactactgtgccgctgacaacgtgcacagccccatcctgagcacctggatccgggtgacagtgcgcatccctgtgagccaccctgtgctgaccttccgggccccccgggcccacacagtggtgggggacctgctggagctgcactgtgagagcctgcggggcagcccccccatcctgtaccgcttctaccatgaagatgtgaccctgggcaacagcagcgcccccagcggcggcggggccagcttcaacctgagcctgacagctgagcacagcggcaactacagctgtgatgctgacaatggcctgggcgcccagcacagccatggagtgtccctgcgggtgacagtgcctgtgtccaggcctgtgctgaccctgcgggcccctggggcccaggccgtggtgggggacctgctggagctgcactgtgagagcctgcggggcagcttccccatcctgtactggttctaccatgaagatgacaccctgggcaacatcagcgcccacagcggcggcggggccagcttcaacctgagcctgaccacagagcacagcggcaactacagctgtgaggccgacaatggcctgggcgcccagcacagcaaggtggtgaccctgaatgtgacaggcaccagcaggaacagaacaggcctgacagctgctggcatcaccggcctggtgctgagcatcctggtgctggccgctgctgctgccctgctgcactacgcccgggcccggaggaagccaggcggcctgagcgccaccggcaccagcagccacagccccagcgagtgccaggagcccagcagcagccggcccagcagaattgacccccaggagcccacccacagcaagcccctggcccccatggagctggagcccatgtacagcaatgtgaaccctggggacagcaaccccatctacagccagatctggagcatccagcacaccaaggaaaattctgccaactgccccatgatgcaccaggagcacgaggagctgactgtgctgtacagcgagctgaagaaggagcagagcagccgcttctccatgagcctgtag

SEQ ID NO: 285786 - DNA, 2205 bp, Artificial Sequence
  derived and/or modified sequence
atgctgctgtggctgctgctgctgatcctgaccccaggccgggagcagagcggcgtggcccccaaggctgtgctgctgctgaaccccccctggagcacagccttcaagggggagaaggtggccctgatctgcagcagcatcagccacagcctggcccagggcgacacctactggtaccatgatgagaagctgctgaagatcaagcatgacaagatccagatcacagagcccggcaactaccagtgcaagacccggggcagcagcctgagtgatgctgtgcacgtggagttctccccagactggctgatcctgcaggccctgcaccctgtgtttgaaggagacaacgtcatcctgcgctgccagggcaaggacaacaagaacacccaccagaaggtgtactacaaggatggcaagcagctgcccaacagctacaacctggagaagatcaccgtgaacagcgtgtcccgggacaacagcaagtaccactgcacagcctacaggaagttctacatcctggacatcgaggtgaccagcaagcccctgaacatccaggtgcaggagctgttcctgcaccctgtgctgcgggccagcagcagcacccccatcgagggcagccccatgaccctgacctgtgagacccagctgagcccccagaggccagatgtgcagctgcagttcagcctcttccgggacagccagaccctgggcctgggctggagccgcagcccccggctgcagatcccagccatgtggacagaagattctggcagctactggtgtgaggtggagaccgtgacccacagcatcaagaagaggagcctgcggagccagatccgggtgcagagggtgcctgtgtccaatgtgaacctggagatccggcccactggaggccagctgattgaaggagagaacatggtgctgatctgcagcgtggcccagggcagcggcaccgtgaccttctcctggcacaaggagggccgggtgcgcagcctgggcaggaagacccagaggagcctgctggccgagctgcacgtgctgactgtgaaggagagtgatgctggccgctactactgtgccgctgacaacgtgcacagccccatcctgagcacctggatccgggtgacagtgcgcatccctgtgagccaccctgtgctgaccttccgggccccccgggcccacacagtggtgggggacctgctggagctgcactgtgagagcctgcggggcagcccccccatcctgtaccgcttctaccatgaagatgtgaccctgggcaacagcagcgcccccagcggcggcggggccagcttcaacctgagcctgacagctgagcacagcggcaactacagctgtgatgctgacaatggcctgggcgcccagcacagccatggagtgtccctgcgggtgacagtgcctgtgtccaggcctgtgctgaccctgcgggcccctggggcccaggccgtggtgggggacctgctggagctgcactgtgagagcctgcggggcagcttccccatcctgtactggttctaccatgaagatgacaccctgggcaacatcagcgcccacagcggcggcggggccagcttcaacctgagcctgaccacagagcacagcggcaactacagctgtgaggccgacaatggcctgggcgcccagcacagcaaggtggtgaccctgaatgtgacaggcaccagcaggaacagaacaggcctgacagctgctggcatcaccggcctggtgctgagcatcctggtgctggccgctgctgctgccctgctgcactacgcccgggcccggaggaagccaggcggcctgagcgccaccggcaccagcagccacagccccagcgagtgccaggagcccagcagcagccggcccagcagaattgacccccaggagcccacccacagcaagcccctggcccccatggagctggagcccatgtacagcaatgtgaaccctggggacagcaaccccatctacagccagatctggagcatccagcacaccaaggaaaattctgccaactgccccatgatgcaccaggagcacgaggagctgactgtgctgtacagcgagctgaagaagacccacccagatgattctgctggggaggccagcagccggggccgggcccacgaggaggatgatgaggagaactatgaaaatgtgccccgggtgctgctggccagtgaccactag

SEQ ID NO: 285787 - DNA, 2229 bp, Artificial Sequence
  derived and/or modified sequence
atgctgctgtggctgctgctgctgatcctgaccccaggccgggagcagagcggcgtggcccccaaggctgtgctgctgctgaaccccccctggagcacagccttcaagggggagaaggtggccctgatctgcagcagcatcagccacagcctggcccagggcgacacctactggtaccatgatgagaagctgctgaagatcaagcatgacaagatccagatcacagagcccggcaactaccagtgcaagacccggggcagcagcctgagtgatgctgtgcacgtggagttctccccagactggctgatcctgcaggccctgcaccctgtgtttgaaggagacaacgtcatcctgcgctgccagggcaaggacaacaagaacacccaccagaaggtgtactacaaggatggcaagcagctgcccaacagctacaacctggagaagatcaccgtgaacagcgtgtcccgggacaacagcaagtaccactgcacagcctacaggaagttctacatcctggacatcgaggtgaccagcaagcccctgaacatccaggtgcaggagctgttcctgcaccctgtgctgcgggccagcagcagcacccccatcgagggcagccccatgaccctgacctgtgagacccagctgagcccccagaggccagatgtgcagctgcagttcagcctcttccgggacagccagaccctgggcctgggctggagccgcagcccccggctgcagatcccagccatgtggacagaagattctggcagctactggtgtgaggtggagaccgtgacccacagcatcaagaagaggagcctgcggagccagatccgggtgcagagggtgcctgtgtccaatgtgaacctggagatccggcccactggaggccagctgattgaaggagagaacatggtgctgatctgcagcgtggcccagggcagcggcaccgtgaccttctcctggcacaaggagggccgggtgcgcagcctgggcaggaagacccagaggagcctgctggccgagctgcacgtgctgactgtgaaggagagtgatgctggccgctactactgtgccgctgacaacgtgcacagccccatcctgagcacctggatccgggtgacagtgcgcatccctgtgagccaccctgtgctgaccttccgggccccccgggcccacacagtggtgggggacctgctggagctgcactgtgagagcctgcggggcagcccccccatcctgtaccgcttctaccatgaagatgtgaccctgggcaacagcagcgcccccagcggcggcggggccagcttcaacctgagcctgacagctgagcacagcggcaactacagctgtgatgctgacaatggcctgggcgcccagcacagccatggagtgtccctgcgggtgacagtgcctgtgtccaggcctgtgctgaccctgcgggcccctggggcccaggccgtggtgggggacctgctggagctgcactgtgagagcctgcggggcagcttccccatcctgtactggttctaccatgaagatgacaccctgggcaacatcagcgcccacagcggcggcggggccagcttcaacctgagcctgaccacagagcacagcggcaactacagctgtgaggccgacaatggcctgggcgcccagcacagcaaggtggtgaccctgaatgtgacaggcaccagcaggaacagaacaggcctgacagctgctggcatcaccggcctggtgctgagcatcctggtgctggccgctgctgctgccctgctgcactacgcccgggcccggaggaagccaggcggcctgagcgccaccggcaccagcagccacagccccagcgagtgccaggagcccagcagcagccggcccagcagaattgacccccaggagcccacccacagcaagcccctggcccccatggagctggagcccatgtacagcaatgtgaaccctggggacagcaaccccatctacagccagatctggagcatccagcacaccaaggaaaattctgccaactgccccatgatgcaccaggagcacgaggagctgactgtgctgtacagcgagctgaagaagacccacccagatgattctgctggggaggccagcagccggggccgggcccacgaggaggatgatgaggagaactatgagaacatcctgaaccccaggaagaacaaggtgcaggacttcccctgcctgtgcaacacctag

SEQ ID NO: 285788 - DNA, 2124 bp, Artificial Sequence
  derived and/or modified sequence
atgctgctgtggctgctgctgctgatcctgacccccggccgggagcagagcggtgtggcacccaaggccgttctcttgcttaatcccccctggagtaccgcctttaagggcgaaaaggtagccctgatctgttcgtccatttcccattccctagctcagggcgacacttattggtatcacgacgagaagctattgaaaattaaacacgataaaatccagattaccgagccaggcaattatcagtgcaaaaccagaggtagttccctgtctgatgccgtgcacgtcgaattcagcccggattggctcatccttcaggctctgcacccggtcttcgaaggggacaatgtgatactgcgctgtcagggcaaggacaacaaaaatactcaccagaaggtttattacaaggacggcaaacagctgcccaacagttacaacttggagaagattaccgtcaatagtgtctcacgagacaactcaaagtaccattgcactgcgtatagaaagttctatatcctggatattgaagtcacgagcaagccactcaacatacaggtgcaggagttgtttctgcatccagtgctgcgcgcctcatcaagtactcctatcgaaggctctcctatgaccttgacgtgtgaaacccagctttcgccccagcggcccgacgttcagcttcaattcagtctattccgagacagccagacactcgggcttgggtggtcacggagtccgcgtctgcagatccctgccatgtggactgaagactcaggtagttactggtgtgaagttgagaccgtcactcactccataaaaaagagatctttacgcagtcagatccgggtccaacgcgtaccagtgagcaatgtgaacctcgagattcgccctaccggaggccagttgatcgagggcgaaaacatggtgctgatctgttcagtcgcacagggcagtgggaccgtaacattcagttggcacaaagaagggcgcgtacggagtcttggccggaaaacccagcgtagccttctggccgagctgcacgtgctgacagttaaggagtcggatgccggccgctactactgcgcagccgacaatgtgcactcaccaatcctcagcacatggatccgcgtgactgtcaggatacccgtgtcacatcctgtactcacatttagagctcctcgcgcacacacagtggtcggcgatcttctggagctgcattgcgaatccttgcgcggatctccccccattctctacaggttttaccacgaagatgttacattagggaattcatcagcgccgtctggggggggggcctctttcaatctgtctctgaccgctgagcacagtggcaactactcttgtgatgcggataatggactgggggcccaacatagccatggggtgtctttgcgcgtcacagtccccgtcagccgcccggtgctgacactacgggcccccggagcgcaagcagtggtgggtgatctcctcgaactgcactgtgagtctctgaggggctcgttccccatattgtactggttctatcacgaggatgacacccttggcaatatttctgcccactccggaggaggagcgagttttaacttaagcctgaccaccgaacatagtggaaattacagctgtgaagcagacaacggactgggtgcccaacactcgaaggtggtcacgctaaacgtaactgggacctcacgcaatcgtacaggcttgacagcagcggggatcactggcctcgtgctgagcattttggtccttgccgccgcagccgccctgctccattatgcccgtgcaagacggaaacccggaggcctaagtgccaccggaacttccagtcattccccttctgagtgccaggaaccctcctcttctaggccctctagaatcgatccccaggagcctacgcactccaaacccctggcaccaatggagttggaacccatgtacagcaatgtgaatcctggggacagtaacccaatttactctcagatctggagtattcagcatactaaggaaaacagcgccaactgccctatgatgcatcaagagcacgaagagctgacagtcctttacagcgagctgaagaaagaacagtcctcgcggttcagtatgtctctttag

SEQ ID NO: 285789 - DNA, 2205 bp, Artificial Sequence
  derived and/or modified sequence
atgctgctgtggctgctgctgctgatcctgacccccggccgggagcagtctggcgtggctcccaaagctgttctacttctcaaccctccttggtcaacggcatttaagggcgagaaagtcgcactgatttgttcctccatttctcattcccttgcgcagggtgatacatattggtaccatgatgagaaacttcttaaaattaaacacgataaaatccagatcaccgagcccggcaattatcagtgtaagacccgtggaagttctctttctgacgcggtccacgtagagttttctcctgattggcttatcctccaagctctgcacccagttttcgaaggtgataatgtgatcctccgatgtcagggaaaagataacaagaatacacatcagaaagtgtactacaaagatggaaaacagttgcctaattcctacaacttggagaagatcactgttaattccgttagtagagacaattccaaatatcactgcactgcctatcggaagttctacattctcgacatagaggtgacgtccaagcccttaaacattcaagtgcaggagcttttcttacacccggtgctgcgggcctcttcgtctacgcccattgaaggaagccctatgactttgacctgcgaaacccagctgagcccccaaagaccggatgtgcagctacagttctctctgttcagagactcccaaacgctggggttagggtggtctagaagtccccggcttcaaataccagcaatgtggaccgaggactctggctcctactggtgtgaggtagagaccgtgactcactcaatcaagaagcggtcactgagatcacaaattagggtgcagagagtgccagtatccaatgtgaatctcgagattcgtcccactggcggacaattgattgagggagaaaatatggtgctgatctgtagtgtggcacagggcagcggtaccgtgaccttctcgtggcacaaagagggtagggtccgaagcctgggtaggaaaacacaacgtagtttactggcagaactgcatgtgctgaccgtgaaggaatctgacgcagggaggtattattgtgcagcagataacgtgcatagtcctatcctatctacatggattcgcgtgaccgtcaggattccagtgtctcatccagtcctcaccttcagggctccaagggcccacaccgtagttggcgatctcttggagttacattgcgagtccctacgcggaagccctccaattttatatcggttttaccatgaagatgtgacccttggaaattccagtgctccttctggggggggtgcatcctttaacctgagcctgactgctgagcattccggtaactatagctgcgatgccgataatggattgggggcccagcatagccacggcgtgagtctccgtgtgactgtgccagtgtcccgacccgtgctcacgctgcgagccccaggtgctcaggctgtggttggagacctgctggaactacactgtgagtcccttcgtggaagctttccgattctctactggttttaccacgaagacgataccctcgggaatatcagtgcacattctggggggggcgcctcgtttaatctctctctcacgaccgagcacagcggaaactatagctgcgaagcggataatgggttaggtgcccagcacagcaaagtcgtgacgctgaacgtgacggggacgagccgcaaccgcaccggtctcacagctgccgggattactggacttgtgctgagtattttggttctcgcagccgccgccgctttgctccattacgcacgcgctcgacgtaaaccagggggattgagtgcgactggaacgtcttcccactctccaagcgagtgccaagagccctcttcatccagaccctcacggatcgaccctcaagagcctactcattcaaagcctttagcccctatggagttagagcctatgtactctaacgtcaaccctggagactcaaacccaatctacagtcagatctggtccatccagcacactaaggagaactccgccaattgtcccatgatgcaccaggagcacgaagagctaacagtcctttacagcgagctgaagaagacgcatcctgacgattctgccggggaggcttcctcaaggggtagagcccacgaggaagatgatgaggagaattatgaaaatgtcccccgggtgctgctggcttcggaccattag

SEQ ID NO: 285790 - DNA, 2229 bp, Artificial Sequence
  derived and/or modified sequence
atgctgctgtggctgctgctgctgatcctgacccccggccgggagcagagtggagtcgcccctaaggctgtgctgcttctgaaccctccatggtctacagctttcaaaggggagaaggtggcactcatctgttcctccattagccatagccttgcccagggcgatacttattggtaccacgatgagaagcttttaaagatcaaacacgacaagattcaaatcaccgaacctgggaactatcagtgtaagacccgtgggagcagcctcagtgatgcggttcatgtggaattttccccagattggctgattctgcaggcgcttcaccctgtgtttgagggagacaatgttattctccggtgccagggcaaagataacaaaaatacccatcaaaaagtgtactacaaggacgggaagcagctgcccaacagctataatttggagaaaattacagtaaattccgtgagccgagataacagcaaataccactgcacagcctatagaaagttttacatcctggatatcgaggtcactagtaagccccttaatatacaagtccaggaactcttcttgcacccagtgttgagggcttcttcatcgacccctatcgagggatcccccatgacactcacctgcgagactcagctgagccctcaacgccccgatgtacagcttcaattttcgcttttcagggatagtcagacgctggggttgggatggtcccgaagcccccggctccagattccggctatgtggactgaagattctgggtcctattggtgcgaagtggagactgtgacacacagtattaagaaaagatcacttcggtctcagatccgtgtccagagagttcctgtgtcaaacgttaacctggagatcaggcctaccggtggtcaactcatcgagggggaaaacatggttcttatatgttccgtcgcccagggctctggtaccgtgacattttcctggcacaaggaaggcagggtgcgatcccttgggcgcaaaacacaacggtctctgctggccgagctgcacgtacttaccgtcaaggagagtgacgcgggtcgatattactgcgccgctgataatgtgcattctcctatcttgagtacctggatccgcgttaccgtcagaattcctgtctcccacccagtgcttacttttcgcgcacccagggcccacacagtcgtgggcgatctcctagagctccactgtgagtctctccgcggctccccaccgattctttaccgtttctatcacgaggatgttaccctcgggaattcgtcagcaccgtcgggcggcggggccagtttcaacctgagcctgacagcagaacactcaggcaattatagctgcgatgctgataacggcctcggtgcccagcactctcatggagtaagcttaagagtgaccgtacctgtctcaagacccgtgttaacactgcgcgccccgggggctcaagcggtggtgggcgacttgttggagcttcactgcgagtctttgcggggatcatttcccattctttactggttctaccacgaagatgacaccctgggcaacatcagtgcccatagcgggggcggagcttcttttaatttgtcgctcaccactgaacactccggcaactactcgtgcgaggcagacaatgggctgggggcccaacattcgaaagtagtcaccctaaacgtgaccggaacttcccgaaaccggaccggccttaccgccgccggaattaccggactggttctcagtatactggtcttagccgcagccgctgctttgcttcattacgccagagctagaagaaagcctgggggtttaagcgccacaggcacatccagccactcccctagcgagtgtcaggaacccagtagttctcggcccagtaggatagatccacaggagcccacccactccaagccactcgcccctatggaactcgagcctatgtactcaaatgtgaacccgggcgactctaatcccatttactcacagatatggagcatacagcacacaaaagaaaactctgctaattgtccaatgatgcaccaggagcacgaggagttgactgtcctctattctgaactgaaaaaaacccacccagacgatagtgcaggtgaagctagtagtcgcggcagggcccacgaagaggacgacgaagagaattatgagaacatcctgaatccacggaaaaataaggttcaggacttcccctgtctgtgtaacacctag

SEQ ID NO: 285791 - DNA, 2205 bp, Artificial Sequence
  derived and/or modified sequence
atgctgctgtggctgctgctgctgatcctgacccccggccgggagcagtcaggcgttgctcccaaagccgtccttttactcaaccccccctggagcaccgctttcaaaggcgaaaaagtagcccttatttgttcctctattagtcatagcttggcccagggagatacatattggtatcacgacgagaaacttctgaaaattaagcacgataagatccagatcaccgagccggggaactaccaatgtaaaacacgtggcagcagtctgtccgacgccgtccacgtggagtttagtccggattggctgatcctgcaggccctgcaccccgtgttcgagggagataacgttatccttcgttgtcaggggaaggataacaagaacacccatcagaaggtgtattataaggacgggaagcagctgcctaattcatacaatctcgaaaaaattaccgttaactctgttagccgggacaacagcaagtatcactgcaccgcttacaggaagttttacatcctcgacattgaggtcaccagtaagcccctaaatattcaggtccaagaactcttcctccatcctgtgcttagagcctcttctagcacgccaatcgaagggtcccccatgacactgacgtgtgagacccagctcagtccacagagaccggatgtgcagctgcaattctccctctttagagattcacaaacactgggccttggatggtctaggtctcctaggctccagatccctgcaatgtggaccgaggatagcggaagttattggtgtgaagttgagacggtcacacactccataaaaaagaggtcactgcgaagtcaaattagagtacaacgggtccctgtgtctaatgtgaacttggagattcggcccacgggaggtcagctcattgagggcgagaacatggtcctaatctgtagtgtggctcagggctcgggaacagttactttttcctggcacaaggaaggacgggtcaggagcctcggcaggaagacacaacgcagtctgcttgctgagcttcatgtcctcactgtgaaggagtcagatgctgggagatactactgcgctgccgacaacgtacactccccgatcctcagcacatggattcgagtcactgtgaggattcccgtgagtcacccagtcctgaccttcagggcaccacgggcccacactgtcgttggcgatctcctcgaactgcactgtgagagtctgcggggcagccccccaatcctctacaggttctatcatgaggatgttacattgggcaatagctccgcccccagcgggggaggggcaagttttaatctgagcctgactgccgaacattcgggaaactactcatgtgacgccgacaacgggttaggagcacagcattctcatggagtgtccctgcgcgtgaccgtccccgtttccagacctgttttaaccttgcgggcaccgggcgcccaggcggtagttggtgatctgctagagctgcactgcgagtcacttaggggatcttttcccatcttatactggttctatcatgaggacgacaccctgggaaatatctctgctcacagcggcggaggagcttccttcaatctctctctgacgaccgagcattctggaaactactcttgcgaggccgacaacggcctaggcgcccagcattctaaagtggtgacactgaacgtgacagggacgagtcgtaatcggaccggactgaccgctgctggcataacgggactcgtcctgtcaatattagtcttggccgcagcggccgcattacttcactacgcccgagctagaagaaaaccgggggggctttctgccacgggcacatcctcccatagcccctccgagtgtcaggagccttcatcatctcgccctagccggattgacccgcaagagccaacacattcaaagccattagcccctatggagctggaacccatgtacagtaacgttaaccctggcgatagcaaccccatctactcccagatttggtccattcagcatacgaaggaaaacagcgctaactgtccaatgatgcatcaagaacacgaggaacttacggtgctatacagcgaactaaaaaaaacccacccggacgattctgcaggtgaggcctctagcagaggacgggcccatgaggaagatgatgaagaaaattacgaaaacgtcccacgagtgcttctggcctccgaccactag

SEQ ID NO: 285792 - DNA, 2124 bp, Artificial Sequence
  derived and/or modified sequence
atgctcctgtggctcttgcttctaatcctgacacccggtcgtgaacagtctggggtggctccgaaggctgtgttgttgctaaacccaccgtggtctaccgcttttaagggggaaaaagtggccctgatatgcagctccatctcgcattcgttggctcagggcgatacctactggtaccacgatgagaagttgctgaaaattaagcacgataagatccagatcaccgaacccggtaattaccagtgtaagaccaggggaagtagtttatctgacgcggtgcacgtggagtttagccccgactggctgattttacaggcactgcaccctgttttcgaaggcgacaatgtcatcctaaggtgccaggggaaagacaataaaaacactcatcaaaaagtctactacaaggatggaaagcagctccctaattcttacaatctggaaaaaataaccgtgaacagtgtgtccagggacaattctaaatatcattgcaccgcgtataggaaattttacatcttggatatagaggtgacttcaaagcccctgaatatccaggtccaggagctttttctgcatcccgtcctaagagcttcatcttccacccctattgagggttcaccaatgacactgacatgcgagacacaactttcaccccagcggcctgatgtccaattacaattcagcctgtttcgcgattcccagacattgggtctcggctggtctcgctcccccaggcttcaaatcccagcaatgtggaccgaagacagtggctcatattggtgtgaggtggagaccgttacacacagcatcaagaaaagatccctcaggtctcagattcgcgtgcagagagtgcctgtcagcaatgtgaatctagaaatccggccaactgggggacaactcatcgagggggaaaatatggtgttaatctgcagcgtcgcccaggggagcgggaccgtgaccttctcctggcataaagagggcagggtccgcagccttggcagaaagacccagaggagtctgctggccgagcttcatgtgctaaccgtgaaggagtctgatgccggtcgctattattgcgcggcagataacgtgcacagccccatactttcgacgtggataagggtaactgttcggattcccgtctcccaccctgtgctcacgttcagagcccctcgggctcacacagtcgttggagatctcctggagcttcactgcgagtccctcagggggagccctcccatcctgtataggttctaccacgaggatgttacattgggaaactcctcagcaccttctggcggaggcgcttcctttaatcttagtttgaccgcagagcactccggtaattacagttgcgatgccgataacgggctgggggctcaacactctcatggggtgagcttgcgtgtaactgtgccggttagcagaccagtactgacactccgcgctcctggggctcaggccgttgtgggggatctgttagaactgcactgtgaatctctccgtggttccttccccattctgtattggttttatcatgaggacgacactctggggaatatctccgctcacagtggcggtggcgctagcttcaatttgtctcttacaactgagcattccggcaattattcttgcgaggcagataacgggctgggcgcacagcattcgaaagttgtaactctgaatgtgacgggcacatctcggaatcggaccggcctgactgcagctggtatcacgggacttgtactctcaatcctggttctggccgcagctgccgctctgctgcattatgccagagctaggcgcaaacctggcggactgtcagccacagggacatcatctcattctcccagcgagtgccaggaaccatcaagctctcgaccaagccgcattgacccgcaggaaccgacacattccaaaccactggcacccatggaactggaaccaatgtactccaatgtgaatccaggcgacagcaaccccatttattctcagatttggtcaatccagcacactaaagagaactccgcgaattgccccatgatgcatcaggagcacgaggaactaaccgtactgtactcagagcttaaaaaggaacagagctctcgcttctcgatgtccttatag

SEQ ID NO: 285793 - DNA, 2205 bp, Artificial Sequence
  derived and/or modified sequence
atgctcctctggcttctcttgctgatattgacacccggtagggaacagtcaggcgtcgcccctaaggcagttcttctgttgaaccccccatggtcaaccgcattcaagggcgagaaagtcgctctgatttgtagcagcatcagccacagtctggctcaaggggatacctactggtaccatgacgagaagctcctcaaaataaagcatgacaaaattcagatcacagagccgggtaattatcaatgcaaaacgagggggagtagcctgtccgacgcagtgcatgtggagttcagccccgactggctgatcctgcaggcgctccaccctgttttcgagggagacaatgtgattctgagatgccagggaaaggataacaagaacacccatcagaaagtttactataaagatggaaaacagcttcctaatagttataatctggaaaagatcaccgttaattcagtgtctagagataatagtaagtatcattgtacagcctataggaagttttacatcctcgacatcgaggtaactagtaaaccactgaatatccaagtccaagaactatttctgcatccagtacttcgagcttcatcttccactccaatcgaggggtctccaatgactctcacatgtgagacacagttgtcaccgcagcggccagatgtgcagctccagttttccttattccgcgactctcagacactgggcctgggatggtccaggtctccacggctgcagattcctgctatgtggaccgaagactcgggcagctattggtgcgaggtcgaaacagtgacacactccattaaaaaacgttctctccgatcccagattagagttcaaagggtccccgtgagcaacgtgaaccttgagatacggcctaccggcggtcagctgatcgagggagaaaacatggtgctcatctgctctgtggctcagggtagtggaacagtgactttctcctggcataaagaagggcgtgtgcgcagtctgggcagaaagactcaaaggtccctgctcgccgaacttcacgtgttgacagttaaagaaagcgatgctggcagatactactgcgccgcagataatgtccacagccctatactgtctacatggatccgtgtgacggtcagaatccccgtgagtcacccagttctcacctttcgagcgcctcgcgcacatacagtggtgggggacttgctcgaactgcattgcgagagcctgagagggagccctcccatcctgtaccgtttttaccatgaagatgtaacactcggcaattcatcggccccaagcggtggaggggctagctttaacttgtctctgacagctgagcacagtggaaactattcttgcgacgccgataacggtctcggcgcacaacactcccacggagtctccctgcgagtaaccgtcccagtgtctaggcctgtcctaaccttaagggccccaggcgctcaggctgtggttggtgacctgctagagctgcactgcgagagcttgaggggaagctttcctatactgtattggttctatcacgaagacgacacactcggcaatatcagcgcgcactctgggggaggcgcatctttcaaccttagtcttacaaccgagcactcaggaaattattcttgtgaggcagataacgggctgggggcacaacatagtaaggtcgtgacgctgaacgttacaggaacatctagaaataggactggcttaacagcagcaggcatcaccgggttggtgctgagcattctcgtactggctgccgcagctgcactactacactacgcacgggctcgaagaaaaccaggcggacttagcgccactgggacctcctctcattctccatccgaatgtcaagaaccttcttccagtaggccctcccgtatcgatccacaggagcccactcactcaaagccattggcgcctatggaattagagcctatgtactctaacgtaaatcccggagatagcaatccaatctattcacagatttggtcgattcagcacactaaggaaaattcagctaactgtcctatgatgcatcaggagcatgaagaactcacggtcctttattccgagctgaagaagacccaccccgacgattccgccggagaagcatcttccagaggacgcgcacacgaggaggatgatgaagagaactatgagaacgtcccgagggtgttgctcgccagtgaccattag

SEQ ID NO: 285794 - DNA, 2229 bp, Artificial Sequence
  derived and/or modified sequence
atgctcttgtggttgttacttctaatcctcacaccgggtagggagcagagcggagttgcgccaaaggcggttctattgctgaacccaccatggtcaaccgcttttaagggcgaaaaggtggctcttatttgcagtagtatctctcattcactggcacagggcgatacttactggtaccacgatgagaagctgctgaaaatcaagcatgataaaatccagattacagaaccaggcaattatcagtgtaaaactcggggatcctcactgtcggacgcagtgcacgtggagttttcccctgattggctcatccttcaggcactacaccccgttttcgagggagacaatgttattctgcgatgccaagggaaggacaacaagaatactcatcagaaggtctactacaaagacggcaagcagctccccaactcttacaacctcgagaagattaccgtgaactccgttagtagagacaattcgaagtaccactgtaccgcttaccggaagttttatattctcgatattgaagtcactagtaaacccctgaacattcaggtgcaagagttgttccttcatcccgtcttgagggcatcatcaagcactcctattgaaggtagcccaatgactctgacttgcgaaactcagctaagtccgcagcgacctgacgtccagctgcagttctccctgtttcgggattcccagaccctgggcctcggatggtctcgatccccccgactgcagataccagccatgtggaccgaagattctggaagttattggtgtgaagtagagacagttacccattcaatcaagaagcgcagtctgcgaagccagatccgcgtccaaagggtccccgtgagcaatgtaaacctggaaattcggcctacgggcggacagctcatagaaggcgagaacatggttcttatctgctctgtggctcaaggctccggaaccgtcacgttttcttggcacaaggagggcagggtgagatctctcggtcggaaaactcagcggagcttgcttgccgaattgcatgtgcttacagtgaaggaatctgatgccggtagatactactgtgcggctgataatgtccatagcccaatactctctacttggattagggttacagttcgcatccccgtgtcccaccccgttctgacattccgagccccacgggctcacactgtggtcggtgacctgttggagttgcattgtgaatcactgaggggtagtcctccaatcctgtaccggttctaccacgaagatgttacactggggaactcatccgctccttcaggcggaggtgcaagcttcaacttgtcattgaccgcggagcacagtgggaattattcctgtgacgctgacaatgggttgggtgcacagcattcccacggagtgagcttacgggtgactgtgccagtttcccggccagttctgacactcagggccccaggcgctcaggctgtggtgggggatcttctcgagttgcattgtgagtcactgcgcggttcttttccgatcctgtattggttctatcatgaagatgacaccctagggaacatcagcgctcattcgggcggtggggcaagctttaaccttagtctcaccacagaacactccggtaattacagctgtgaggctgataatgggctaggggcacagcacagcaaagtcgtgaccctgaatgtgactggcacgtcacggaatcggaccggactgaccgccgctggcatcactgggctcgtgctctctatcctagtcctcgccgctgctgccgcactcttgcattacgcgagagcacgcaggaagcccggtgggctgagtgccaccggaaccagctcccactctccatctgagtgtcaggagcccagctcaagcaggccctctcgcatcgacccccaggagcccacacattccaaacccttagccccaatggaacttgagcccatgtattcgaacgtaaatccaggcgactccaaccctatatactctcagatttggtcaattcagcacaccaaggagaacagtgccaactgccccatgatgcatcaggaacatgaggagttaacggtcctgtatagcgaactgaaaaaaactcatcccgacgacagcgctggcgaggcttcaagcagaggacgggctcacgaggaggatgatgaagagaactacgagaacatcctgaaccctaggaagaacaaggtccaagatttcccatgtctctgtaatacctag

SEQ ID NO: 285795 - DNA, 2205 bp, Artificial Sequence
  derived and/or modified sequence
atgttgctctggctgttgttactgatcctgacacccggaagagagcagtcaggtgtggctccgaaagctgtgctactgctgaatcctccttggtccacagctttcaagggggagaaggtggcccttatatgctcttccattagccacagtctcgcacaaggggacacctattggtaccatgatgagaaactgctcaagattaagcacgacaaaatccagatcacagaacccggtaactaccaatgtaaaaccagagggagctctctctcggacgccgtgcacgtggagttttcacctgattggttaatactgcaggctcttcaccctgtttttgaaggggataacgtcatcttgaggtgccaggggaaggacaataaaaacactcaccagaaggtttattataaggatggtaagcagctgcctaactcatataatttagaaaaaattacagtgaactccgtaagccgggacaattccaagtatcattgcaccgcataccgaaagttctacattctggacatcgaggtgacctcaaaacccttgaatatccaggttcaggagttatttctccacccggtcctcagggcatcatcatccaccccaatagagggctccccgatgacactgacatgcgagacccaactgtctccacagcgtcccgacgttcagctgcagttctccttattcagggatagccagactctgggcctggggtggagccggagtcccaggttgcagatccccgcaatgtggaccgaggactcaggatcatactggtgcgaggttgaaactgtgacccactcaattaagaagcgctccttgcgcagccagataagagttcagcgagtcccagtgagtaacgtaaaccttgagatacgaccaaccggtgggcagctaatcgaaggggagaacatggtactcatttgctctgtggcccagggatccgggaccgtgacattttcgtggcataaagagggcagagtgaggagcctcgggcgtaagacacagagatctcttctggctgagctgcacgtcctcacagttaaggaatcagacgcagggagatactattgcgcggcagacaatgtccattcacctatcctctcaacctggattagagtgacagttagaatcccagtgagccatcctgtgctgacctttcgagcacctcgagcgcacacagttgtgggcgacctgctcgagttgcattgcgagagccttaggggttctccacccatcttataccgattttatcatgaggacgttactctcgggaactcttccgccccttcggggggaggtgcctccttcaatttgtcactgacggctgaacattccggcaattattcttgcgatgctgacaacggtctcggcgctcaacattcgcacggagtcagtcttcgggtcactgtccctgtatcaagacctgtgcttacgcttcgagccccaggagcccaggcagttgtcggtgatctgctcgaacttcactgcgagagcttgcgtggctctttcccaatcctgtactggttctaccacgaggacgacacactgggaaatatttcggcccatagcgggggtggagccagctttaacctttcactgacgactgagcactccgggaattattcctgtgaagctgataatggactgggggcacagcactccaaggtcgtgactctcaacgtcaccggaacctcccgaaacaggacaggactcacagctgccggtatcacaggccttgtgctcagtattctggtgctcgccgcagccgctgccctgctgcactatgctcgcgctcggcgaaagccaggaggcctgtcagccactgggacaagttctcatagcccgtccgaatgtcaggagccaagctcaagccggccaagccggatcgacccccaagagccaactcactctaagccactagctcccatggaactcgaaccaatgtacagcaacgtgaatccgggagactcaaaccccatctactctcaaatttggagcatacagcatactaaggagaactccgctaactgtccgatgatgcaccaggaacacgaagaattgacagtcttgtacagcgagctcaaaaaaacacacccagacgactcagcaggcgaggcttcaagccgcggaagggcccatgaagaagatgatgaggagaattacgagaacgtccctcgtgttctgttagcaagcgaccattag

SEQ ID NO: 285796 - DNA, 1755 bp, Artificial Sequence
  derived and/or modified sequence
ggccactgtcaggcaccagatcatttcctcttcgcaaagctcaagacgcagacaaatgccagtgactttcctatcggcacgagtctgaaatatgaatgtaggcctgaatattacgggcgtcccttctccatcacatgcctggacaatttggtgtggtcatcccccaaagacgtttgcaaacgtaaatcttgcaaaacgcctcccgatcctgttaacgggatggtgcacgtgataaccgatattcaggtagggtcaaggatcaactactcctgcacgactgggcatcgactgattggacattctagtgccgaatgtatacttagcgggaacgctgcacactggtcaaccaaaccgccaatttgtcagaggatcccctgtggacttccgcccaccatagccaatggagatttcattagcaccaatcgtgaaaactttcattacggcagtgtggtgacctaccggtgtaaccccgggagcggcggacggaaagtcttcgaacttgtgggggagcccagtatctactgtacctcaaacgatgaccaggtgggcatctggagcggtccagctcctcagtgcatcatcccaaacaaatgtaccccgccaaatgtggaaaatgggatcctggtttctgacaaccgctctttgtttagtctgaacgaggttgtcgagttccgctgtcaaccgggcttcgtaatgaagggcccacgcagagtgaagtgccaagctctgaataagtgggaacccgaactccccagctgcagtagagtatgccaacccccccccgacgtgctgcacgctgagagaacccagcgcgataaagataacttctcacctgggcaggaagtcttctatagctgcgaacccggctatgatttgcgaggtgcagcctccatgcggtgtactccacagggcgactggtcacccgccgctcccacctgtgaggtgaaaagctgtgacgactttatgggacagcttctcaacgggcgtgtgttgttccccgttaatctgcagctgggtgccaaggtcgactttgtttgtgacgaaggctttcagctgaaagggagttctgcatcttattgcgtacttgctggtatggagtccctctggaacagtagcgttcctgtgtgtgaacagatcttctgcccttctccgccagtgattccaaacgggcggcacaccgggaaaccactcgaggtgttccctttcgggaaaactgtgaactacacttgtgacccgcatcccgatagaggcacaagttttgacttgattggtgaaagcaccatccggtgtacaagtgatcctcaaggcaatggagtctggtccagccccgctccgcggtgcggaattctcggtcactgccaggctcccgaccacttcctcttcgccaagctcaagactcaaaccaacgcttctgatttccctataggtacctctctgaaatacgaatgtcgccccgagtattacgggcgtcccttctctattacctgtctggataatctggtgtggagcagccccaaggacgtctgcaagcgcaagagttgcaaaacacccccagaccccgtaaacggcatggtgcacgtcatcacggatatacaggttggctcacgtattaactactcttgcacaacgggacatagattaattgggcacagttcagccgaatgtattctgagcggcaacgccgcgcattggagtacaaaacctccaatctgccaaaggtcatgccacctaccctgtgaactgtttgggaggtag

SEQ ID NO: 285797 - DNA, 1755 bp, Artificial Sequence
  derived and/or modified sequence
ggccactgccaggccccagaccacttcctgtttgccaagctgaagacccagaccaatgccagtgacttccccatcggcaccagcctgaagtatgagtgcaggcctgagtactacggccggcccttcagcatcacctgcctggacaacctggtgtggagcagccccaaggatgtgtgcaagaggaagagctgcaagaccccaccagaccctgtgaatggcatggtgcacgtgatcacagacatccaggtgggcagccgcatcaactacagctgcaccaccggccacaggctcatcggccacagcagcgctgagtgcatcctgtctggaaatgctgcccactggagcaccaagccacccatctgccagaggatcccctgtggcctgccccccaccatcgccaacggggacttcatcagcaccaaccgggagaacttccactacggctctgtggtgacctaccgctgcaaccctggcagcggcggcaggaaggtgtttgagctggtgggggagcccagcatctactgcaccagcaatgatgaccaggtgggcatctggagcggccctgccccccagtgcatcatccccaacaagtgcaccccacccaacgtggagaatggcatcctggtgtctgacaacagaagcctcttcagcctgaatgaggtggtggagttccgctgccagcccggctttgtgatgaagggcccccggcgggtgaagtgccaggccctgaacaagtgggagcctgagctgcccagctgcagccgggtgtgccagcccccaccagatgtgctgcacgccgagaggacccagagggacaaggacaacttcagccctggccaggaggtgttctacagctgtgagcccggctatgacctgcggggagctgcctccatgcgctgcaccccccagggcgactggagccctgctgcccccacctgtgaggtgaagagctgtgatgacttcatgggccagctgctgaatggccgggtgctcttccctgtgaacctgcagctgggcgccaaggtggactttgtgtgtgatgagggcttccagctgaagggcagcagcgccagctactgtgtgctggccggcatggagagcctgtggaacagctctgtgcctgtgtgtgagcagatcttctgccccagcccccctgtgatccccaacggccgccacacaggcaagcccctggaggtgttcccctttgggaagacagtgaactacacctgtgacccccacccagaccggggcaccagctttgacctgattggagagagcaccatccgctgcaccagtgacccccagggcaatggagtgtggagcagccctgccccccgctgtggcatcctgggccactgccaggccccagaccacttcctgtttgccaagctgaagacccagaccaatgccagtgacttccccatcggcaccagcctgaagtatgagtgcaggcctgagtactacggccggcccttcagcatcacctgcctggacaacctggtgtggagcagccccaaggatgtgtgcaagaggaagagctgcaagaccccaccagaccctgtgaatggcatggtgcacgtgatcacagacatccaggtgggcagccgcatcaactacagctgcaccaccggccacaggctcatcggccacagcagcgctgagtgcatcctgtctggaaatgctgcccactggagcaccaagccacccatctgccagaggagctgccacctgccctgtgagctgtttggccgctag

SEQ ID NO: 285798 - DNA, 1755 bp, Artificial Sequence
  derived and/or modified sequence
ggccactgccaggcccccgaccacttcctgttcgccaagctgaagacccaaacgaatgcctccgacttccctatcggcacatcactgaaatacgagtgccgtcccgaatattatgggaggccgttttccattacatgcctggataacttggtctggagcagccctaaagatgtgtgcaagcggaagtcctgtaaaacacctcccgatcctgtcaatggtatggtacatgtgataacagacattcaagtgggaagcaggatcaattatagttgcacaactggtcatcgccttatcggacactcatcagccgagtgcattctgagcgggaacgcagctcactggtctactaagccacccatctgccagaggattccttgcggcctgccacctaccatcgctaacggcgacttcattagtacaaacagagagaactttcactacggaagcgtggttacatatcgatgcaacccgggctcaggggggcgcaaggtttttgaactggtgggggagccgagcatttactgtacaagcaacgacgaccaggtcggaatctggtccggcccagccccacagtgcatcatccccaacaagtgcacaccacccaatgtggagaatggtatcctcgttagtgacaacagatccctgttttcccttaacgaggtggtggagttcagatgtcagcccggctttgttatgaagggtccgaggagggtgaaatgccaggcactcaataaatgggaaccggaattaccttcttgctctagggtgtgccagccccctcccgacgtccttcatgccgagcgcacccagcgcgataaagataacttcagcccggggcaagaagttttctactcttgcgagccaggttacgatttgcgcggcgccgctagcatgagatgcactccccaaggggattggtcccccgctgcccccacttgtgaggtcaagagctgcgatgatttcatgggccaactcttgaacggacgagttctgtttcctgttaacctgcagttgggcgccaaagtggactttgtgtgcgatgaggggttccagttgaaagggagctctgctagctactgcgttctggcgggaatggagagcctgtggaacagcagtgtgcctgtgtgcgaacagatcttttgcccttcgccacccgtgatcccaaacggtcgccacacaggaaaaccactcgaagtgtttccatttggaaagacagtgaattacacctgcgacccacaccccgacagagggacaagcttcgaccttatcggcgagagcacaatcaggtgcaccagcgacccgcagggtaatggcgtctggtcatctcctgctccaagatgtggcatattgggacattgtcaggcccccgaccacttcctatttgccaaactcaagacccaaacgaatgcgagcgatttcccaatagggacctctttaaagtacgagtgtcgaccagaatactacggacgtcctttcagtatcacatgtctggacaacctggtgtggagtagccctaaagatgtgtgcaaaagaaagtcctgcaaaacgcctcccgatccggtgaacggaatggtgcacgtaattacagacatccaggtcggaagtcgtattaactatagttgcactactggacacaggctgatcggccatagcagcgccgagtgcattttgtcaggcaatgccgcccactggtcaactaaacctccgatttgtcaaagaagttgtcatcttccttgcgaactgtttgggcggtag

SEQ ID NO: 285799 - DNA, 1755 bp, Artificial Sequence
  derived and/or modified sequence
gggcactgccaagctcctgatcatttccttttcgccaaactgaagacccagactaatgcctccgacttcccgatcgggacatcgctgaagtatgagtgtcgcccagagtattatggcaggcctttcagtatcacatgtctggataatctggtttggagcagtccaaaggatgtatgtaagagaaagtcgtgcaagactccacctgatcccgtcaacggcatggtacatgtgattaccgatatccaagtgggcagcagaattaactattcctgtaccactgggcatcggttgattgggcacagctctgccgaatgtatcttgtcaggtaacgctgcccactggagtacaaagccaccaatatgccagagaattccctgtggcctgccgcctactattgctaacggggacttcatcagtaccaatagggagaatttccactacggtagcgtggtcacgtacagatgtaatcccggaagcggcggtcgcaaggtgtttgaactcgtcggagaacccagcatctattgtacttcaaatgacgatcaggtgggaatatggtccggcccagcccctcagtgtatcattcctaataaatgtacccctccgaacgtcgaaaatgggattcttgtgtctgacaatcggtcactgttctcccttaacgaggtggtggagttcagatgccaaccaggtttcgtcatgaaaggcccaagaagagttaaatgtcaggctcttaacaagtgggaaccggaactgccatcttgcagtcgggtgtgccagccccctcctgatgtcctgcatgccgaaaggacacagcgtgataaagacaattttagccccggacaggaggtgttctatagctgtgagccaggctacgatctccggggagcagcgtctatgcgttgcactccgcaaggggattggagtcccgcagcacccacgtgtgaggtgaagtcttgcgacgacttcatgggccaactcttgaacggacgggtgctatttcccgttaaccttcaactcggagccaaagtcgattttgtgtgcgatgaaggattccagctgaaggggagcagcgctagctattgcgtgttggccggtatggagagcctctggaacagttcagttcccgtatgcgagcaaatcttctgcccttcacccccagtgatccctaatggtcgccacacaggcaaaccactggaggtattccctttcgggaagacggttaactatacttgtgacccacacccggatagagggacctccttcgacctcatcggcgagagcaccattagatgtactagtgaccctcaaggaaacggtgtctggtcctctcctgcccctcgctgcggcattctgggccactgtcaggctcctgatcacttcctgttcgcaaaattgaagacccagactaacgcctccgacttcccgatcggtacatcccttaagtatgagtgtcggcctgagtactatggccgtccttttagcattacctgtctggataacctcgtttggagctctcctaaagacgtgtgtaagcgcaagtcttgcaaaactccccctgaccccgtgaatggaatggtgcacgtgatcaccgacatccaggtgggatccaggataaattactcctgtactactgggcatcgtctcataggccatagttcagccgaatgtatactttctggcaatgccgctcactggagcacaaagccacccatttgtcagagaagttgtcacctgccttgcgagctctttgggagatag

SEQ ID NO: 285800 - DNA, 2152 bp, Artificial Sequence
  derived and/or modified sequence
ggtcactgtcaagccccagatcattttctgtttgccaagttgaaaacccaaaccaatgcatctgactttcccattgggacatctttaaagtacgaatgccgtcctgagtactacgggaggccattctctatcacatgtctagataacctggtctggtcaagtcccaaagatgtctgtaaacgtaaatcatgtaaaactcctccagatccagtgaatggcatggtgcatgtgatcacagacatccaggttggatccagaatcaactattcttgtactacagggcaccgactcattggtcactcatctgctgaatgtatcctctcgggcaatgctgcccattggagcacgaagccgccaatttgtcaacgaattccttgtgggctaccccccaccatcgccaatggagatttcattagcaccaacagagagaattttcactatggatcagtggtgacctaccgctgcaatcctggaagcggagggagaaaggtgtttgagcttgtgggtgagccctccatatactgcaccagcaatgacgatcaagtgggcatctggagcggcccggcccctcagtgcattatacctaacaaatgcacgcctccaaatgtggaaaatggaatattggtatctgacaacagaagcttattttccttaaatgaagttgtggagtttaggtgtcagcctggctttgtcatgaaaggaccccgccgtgtgaagtgccaggccctgaacaaatgggagccggagctaccaagctgctccagggtatgtcagccacctccagatgtcctgcatgctgagcgtacccaaagggacaaggacaacttttcacccgggcaggaagtgttctacagctgtgagcccggctacgacctcagaggggctgcgtctatgcgctgcacaccccagggagactggagccctgcagcccccacatgtgaagtgaaatcctgtgatgacttcatgggccaacttcttaatggccgtgtgctatttccagtaaatctccagcttggagcaaaagtggattttgtttgtgatgaaggatttcaattaaaaggcagctctgctagttactgtgtcttggctggaatggaaagcctttggaatagcagtgttccagtgtgtgaacaaatcttttgtccaagtcctccagttattcctaatgggagacacacaggaaaacctctggaagtctttccctttgggaaaacagtaaattacacatgcgacccccacccagacagagggacgagcttcgacctcattggagagagcaccatccgctgcacaagtgaccctcaagggaatggggtttggagcagccctgcccctcgctgtggaattctgggtcactgtcaagccccagatcattttctgtttgccaagttgaaaacccaaaccaatgcatctgactttcccattgggacatctttaaagtacgaatgccgtcctgagtactacgggaggccattctctatcacatgtctagataacctggtctggtcaagtcccaaagatgtctgtaaacgtaaatcatgtaaaactcctccagatccagtgaatggcatggtgcatgtgatcacagacatccaggttggatccagaatcaactattcttgtactacagggcaccgactcattggtcactcatctgctgaatgtatcctctcgggcaatgctgcccattggagcacgaagccgccaatttgtcaacgatcatgccatcttccctgtgagttgtttggaagatgagctttctacattttggggagcaaagacgaatgagcaattgcaagctaacaaggaatataaaatgtgtataatcctgggtttagtgatggtgtgaggaaatcagcaatttcaaacccagttggtgggaggataagtgggaacaaactttgtagaaggccaataaactggctgggcactgccctacggtagagtaggacacagtattcagttcttccaagatcagacgagattgggcgcatttagggtggtatggttgtagatcagtatccagttctttttattatttctgaatctgtaagtatcatgtttattatatgtaatattgtatatttgtactttgtctttgttagttcttccagagcttttgttcttattatttaataaagatgttatactg

SEQ ID NO: 285801 - DNA, 1755 bp, Artificial Sequence
  derived and/or modified sequence
ggccactgccaggcccccgaccacttcctgttcgccaagctgaagacccagaccaacgccagcgacttccccatcggcaccagcctgaagtacgagtgcagacccgagtactacggcagacccttcagcatcacctgcctggacaacctggtgtggagcagccccaaggacgtgtgcaagagaaagagctgcaagaccccccccgaccccgtgaacggcatggtgcacgtgatcaccgacatccaggtgggcagcagaatcaactacagctgcaccaccggccacagactgatcggccacagcagcgccgagtgcatcctgagcggcaacgccgcccactggagcaccaagccccccatctgccagagaatcccctgcggcctgccccccaccatcgccaacggcgacttcatcagcaccaacagagagaacttccactacggcagcgtggtgacctacagatgcaaccccggcagcggcggcagaaaggtgttcgagctggtgggcgagcccagcatctactgcaccagcaacgacgaccaggtgggcatctggagcggccccgccccccagtgcatcatccccaacaagtgcaccccccccaacgtggagaacggcatcctggtgagcgacaacagaagcctgttcagcctgaacgaggtggtggagttcagatgccagcccggcttcgtgatgaagggccccagaagagtgaagtgccaggccctgaacaagtgggagcccgagctgcccagctgcagcagagtgtgccagcccccccccgacgtgctgcacgccgagagaacccagagagacaaggacaacttcagccccggccaggaggtgttctacagctgcgagcccggctacgacctgagaggcgccgccagcatgagatgcaccccccagggcgactggagccccgccgcccccacctgcgaggtgaagagctgcgacgacttcatgggccagctgctgaacggcagagtgctgttccccgtgaacctgcagctgggcgccaaggtggacttcgtgtgcgacgagggcttccagctgaagggcagcagcgccagctactgcgtgctggccggcatggagagcctgtggaacagcagcgtgcccgtgtgcgagcagatcttctgccccagcccccccgtgatccccaacggcagacacaccggcaagcccctggaggtgttccccttcggcaagaccgtgaactacacctgcgacccccaccccgacagaggcaccagcttcgacctgatcggcgagagcaccatcagatgcaccagcgacccccagggcaacggcgtgtggagcagccccgcccccagatgcggcatcctgggccactgccaggcccccgaccacttcctgttcgccaagctgaagacccagaccaacgccagcgacttccccatcggcaccagcctgaagtacgagtgcagacccgagtactacggcagacccttcagcatcacctgcctggacaacctggtgtggagcagccccaaggacgtgtgcaagagaaagagctgcaagaccccccccgaccccgtgaacggcatggtgcacgtgatcaccgacatccaggtgggcagcagaatcaactacagctgcaccaccggccacagactgatcggccacagcagcgccgagtgcatcctgagcggcaacgccgcccactggagcaccaagccccccatctgccagagaagctgccacctgccctgcgagctgttcggcagatag

SEQ ID NO: 285802 - protein, 375 aa, Artificial Sequence
  derived and/or modified sequence
MDLGIPDLLDAWLEPPEDIFSTGSVLELGLHCPPPEVPGLQESEPEDFLKLFIDPNEVYCSEASPGSDSGISEDPCHPDSPPAPRATSSPMLYEVVYEAGALERMQGETGPNVGLISIQLDQWSPAFMVPDSCMVSELPFDAHAHILPRAGTVAPVPCTTLLPCQTLFLTDEEKRLLGQEGVSLPSHLPLTKAEERVLKKVRRKIRNKQSAQDSRRRKKEYIDGLESRVAACSAQNQELQKKVQELERHNISLVAQLRQLQTLIAQTSNKAAQTSTCVLILLFSLALIILPSFSPFQSRPEAGSEDYQPHGVTSRNILTHKDVTENLETQVVESRLREPPGAKDANGSTRTLLEKMGGKPRPSGRIRSVLHADEM

SEQ ID NO: 285803 - protein, 248 aa, Artificial Sequence
  derived and/or modified sequence
MVPDSCMVSELPFDAHAHILPRAGTVAPVPCTTLLPCQTLFLTDEEKRLLGQEGVSLPSHLPLTKAEERVLKKVRRKIRNKQSAQDSRRRKKEYIDGLESRVAACSAQNQELQKKVQELERHNISLVAQLRQLQTLIAQTSNKAAQTSTCVLILLFSLALIILPSFSPFQSRPEAGSEDYQPHGVTSRNILTHKDVTENLETQVVESRLREPPGAKDANGSTRTLLEKMGGKPRPSGRIRSVLHADEM

SEQ ID NO: 285804 - protein, 228 aa, Artificial Sequence
  derived and/or modified sequence
MDLGIPDLLDAWLEPPEDIFSTGSVLELGLHCPPPEVPGLQESEPEDFLKLFIDPNEVYCSEASPGSDSGISEDPCHPDSPPAPRATSSPMLYEVVYEAGALERMQGETGPNVGLISIQLDQWSPAFMVPDSCMVSELPFDAHAHILPRAGTVAPVPCTTLLPCQTLFLTDEEKRLLGQEGVSLPSHLPLTKAEERVLKKVRRKIRNKQSAQDSRRRKKEYIDGLESR

SEQ ID NO: 285805 - DNA, 1128 bp, Artificial Sequence
  derived and/or modified sequence
atggacctgggtatccccgacttactggatgcctggttggagcccccggaggacatattctctacaggctcggtgctcgagctgggactgcactgcccccccccagaggtgcccggccttcaagaaagcgaacccgaggattttctgaagttgtttattgaccccaatgaggtgtactgttctgaggctagccctggctccgatagcggtatatcggaggatccctgtcaccctgatagtccccctgccccgagagccacatcctctccgatgctgtatgaggtggtgtatgaagctggggctcttgagcgaatgcagggagagaccggtcccaatgtgggcttaatatctatccaactcgaccagtggtcacctgcctttatggttcctgattcctgcatggtttctgagctgcccttcgatgcccacgctcacattctgcccagggcaggcacggtggccccagtgccctgcactaccctgctcccttgccagaccctctttctgacagacgaagagaagaggcttcttggacaggagggagttagtctcccatcccatctgccactcaccaaggccgaggagagagtgctgaagaaggtccgaaggaagattagaaacaaacagagcgcccaagacagcagaaggcggaagaaagaatacatcgatggccttgaatcccgcgtcgccgcctgctctgcacaaaaccaagagctgcaaaagaaggttcaggagttagaacggcataacattagcctcgttgctcaactgagacagttgcagacactcattgcacagacctcaaacaaggcggcacagacaagtacctgcgtactgatccttttgttctcactcgccctgatcattttgccatcattttcacctttccagtcgcgcccggaagccggaagtgaagactatcaaccacacggtgtcacttcaaggaacatactgacacacaaggatgtcacggagaacttagagacacaagtggtcgagtctcgactgcgtgaacccccaggcgctaaagatgctaatggctcaactcgaactttgctcgaaaagatgggaggaaagccaagaccttccggtaggatccgctcggtgcttcacgcagatgaaatgtag

SEQ ID NO: 285806 - DNA, 747 bp, Artificial Sequence
  derived and/or modified sequence
atggttcctgacagctgtatggtgtcagagctgccttttgatgcacacgcccatattctgccgagagccggtactgttgcacctgtgccttgcacaacactcctgccttgccagaccctcttcctgaccgatgaggagaagaggctgctcggtcaggagggcgtctctctcccctctcacttgcctttgaccaaggctgaggagagggtgttaaagaaggttcgtagaaaaattcgcaacaaacagtcagctcaagactcaagacgccggaagaaggaatacatagacgggctggaaagtcgcgtggccgcctgctctgcacagaaccaggaattgcagaaaaaggtgcaggaactggagcgccacaacatcagtctggtggcacaactgagacagctccagacactaattgcacagacctctaataaggcagcacagacttcaacatgcgtgctgattcttctctttagtttagccctgatcatcctgccgtctttttccccctttcagagccggcccgaagctggctctgaggattatcagcctcacggcgttacctcgaggaacatcttaacacacaaggatgtcaccgaaaacctggagactcaggtggtggagtccagattgagagaaccacctggtgcgaaggacgctaatggcagcactagaacacttctggagaagatgggaggtaaaccaaggcccagtgggaggatccggagtgtgttacacgctgatgagatgtag

SEQ ID NO: 285807 - DNA, 687 bp, Artificial Sequence
  derived and/or modified sequence
atggatctgggaattcctgatttgctagacgcctggctggaacccccagaagatatattctccacaggatcggtcctggagctgggcctgcactgcccaccccccgaagtgcctggattgcaggagtccgagccagaagactttctgaaattgttcattgacccgaatgaagtgtattgctcagaagcaagccctggctccgacagcggcatatctgaagatccctgtcatccggattcccctcctgctccaagagccacatcctctcctatgctgtacgaggttgtgtacgaggcgggtgccttggaaagaatgcaaggggaaacagggcctaacgtgggattgatttcaattcagctggatcagtggagtcccgccttcatggtgccagatagctgtatggtatccgaactacctttcgatgcccatgcacacattctccccagggccggtacagttgcccccgtcccatgtacaactctgctcccatgccagacactcttccttaccgacgaagagaaacggcttctgggtcaggaaggggtcagtcttccaagccatctccctctcacgaaagcagaagagcgggtgctaaaaaaagtgcgccggaaaattcggaataagcaatctgcacaggactctcgacgacgcaagaaagaatacattgatggcctggagtcaagatag

SEQ ID NO: 285808 - DNA, 1128 bp, Artificial Sequence
  derived and/or modified sequence
atggacctgggcatcccagacctgctggatgcctggctggagcccccagaggacatcttcagcacaggctctgtgctggagctgggcctgcactgccccccacctgaggtgcccggcctgcaggagagcgagcctgaggacttcctgaagctgttcatcgaccccaatgaggtgtactgcagcgaggccagccctggcagtgacagcggcatcagcgaggacccctgccacccagacagccccccagccccccgggccaccagcagccccatgctgtatgaggtggtgtatgaagctggggccctggagaggatgcagggcgagaccggccccaacgtgggcctcatcagcatccagctggaccagtggagccctgccttcatggtgcctgacagctgcatggtgtctgagctgccctttgatgcccacgcccacatcctgccccgggccggcaccgtggcccctgtgccctgcaccaccctgctgccctgccagaccctcttcctgacagatgaggagaagaggctgctgggccaggagggcgtgtccctgcccagccacctgcccctgaccaaggccgaggagcgggtgctgaagaaggtgcggaggaagatccggaacaagcagagcgcccaggacagcagaagaaggaagaaggagtacattgatggcctggagagccgggtggccgcctgcagcgcccagaaccaggagctgcagaagaaggtgcaggagctggagcggcacaacatcagcctggtggcccagctgcggcagctgcagaccctcatcgcccagaccagcaacaaggccgcccagaccagcacctgtgtgctgatcctgctcttcagcctggccctgatcatcctgcccagcttcagccccttccagagcaggcctgaggccggcagcgaggactaccagccccacggcgtgaccagcaggaacatcctgacccacaaggatgtgacagagaacctggagacccaggtggtggagagccggctgcgggagcccccaggggccaaggatgccaacggcagcaccaggaccctgctggagaagatgggcggcaagccccggcccagcggccgcatccgctctgtgctgcacgcagatgagatgtag

SEQ ID NO: 285809 - DNA, 747 bp, Artificial Sequence
  derived and/or modified sequence
atggtgcctgacagctgcatggtgtctgagctgccctttgatgcccacgcccacatcctgcccagggctggcaccgtggcccctgtgccctgcaccaccctgctgccctgccagaccctcttcctgacagatgaggagaagaggctgctgggccaggagggcgtgtccctgcccagccacctgcccctgaccaaggccgaggagcgggtgctgaagaaggtgcggaggaagatccggaacaagcagagcgcccaggacagcagaagaaggaagaaggagtacattgatggcctggagagccgggtggccgcctgcagcgcccagaaccaggagctgcagaagaaggtgcaggagctggagcggcacaacatcagcctggtggcccagctgcggcagctgcagaccctgattgcccagaccagcaacaaggccgcccagaccagcacctgtgtgctgatcctgctcttcagcctggccctgatcatcctgcccagcttcagccccttccagagcaggcctgaggccggcagcgaggactaccagccccatggagtgaccagcaggaacatcctgacccacaaggatgtgacagagaacctggagacccaggtggtggagagccggctgcgggagcccccaggggccaaggatgccaacggcagcaccaggaccctgctggagaagatgggcggcaagccccggcccagcggccgcatccgctctgtgctgcatgctgatgagatgtag

SEQ ID NO: 285810 - DNA, 687 bp, Artificial Sequence
  derived and/or modified sequence
atggacctgggcatcccagacctgctggatgcctggctggagcccccagaggacatcttcagcacaggctctgtgctggagctgggcctgcactgccccccacctgaggtgcccggcctgcaggagagcgagcctgaggacttcctgaagctgttcatcgaccccaatgaggtgtactgcagcgaggccagccctggcagtgacagcggcatcagcgaggacccctgccacccagacagccccccagccccccgggccaccagcagccccatgctgtatgaggtggtgtatgaagctggggccctggagaggatgcagggcgagaccggccccaacgtgggcctcatcagcatccagctggaccagtggagccctgccttcatggtgcctgacagctgcatggtgtctgagctgccctttgatgcccacgcccacatcctgccccgggccggcaccgtggcccctgtgccctgcaccaccctgctgccctgccagaccctcttcctgacagatgaggagaagaggctgctgggccaggagggcgtgtccctgcccagccacctgcccctgaccaaggccgaggagcgggtgctgaagaaggtgcggaggaagatccggaacaagcagagcgcccaggacagcagaagaaggaagaaggagtacattgatggcctggagagcaggtag

SEQ ID NO: 285811 - DNA, 1128 bp, Artificial Sequence
  derived and/or modified sequence
atggacctgggcatccccgacctgctggacgcctggctggagccccctgaagatatcttcagcacaggaagcgttctggagcttggcctgcactgccctccacctgaggtgcccggtcttcaggagtctgagccagaggacttcctgaagctatttatcgaccccaatgaggtctattgctccgaggcatctcctggttccgattcaggtatcagtgaggacccgtgtcatcccgattctcctcccgcaccacgggcgacaagttctccaatgctttatgaagtggtttacgaggcaggagccctagaaagaatgcagggagagacagggccaaatgtggggttgatctcaatacagctggaccagtggtctccggcgttcatggtccccgatagttgtatggtttctgaactgcctttcgatgcacacgcacacatccttcctcgggccggcacagtggctcctgtgccttgcaccactctgctgccctgtcagactctgttcctgacagacgaagagaaacgtctgctaggccaggagggggtaagcctcccttcacatctgcccctgaccaaagcggaggaaagggtgctgaagaaagtgcgccgcaagataagaaacaagcaatcagctcaggattctcggagaaggaaaaaggaatatattgacggactggagtcccgagtagcggcttgcagcgcccaaaatcaggaactgcaaaagaaagtgcaggagctagagcgacacaacatctctctggtcgcccagctcagacagttgcagacccttattgctcagacatctaataaagcggctcagacgtccacatgtgtcctgattctgctattcagccttgcgttgataattctcccttccttctccccctttcagtctaggcctgaagccgggtccgaggactaccagccccacggggtgacatctcgaaatatcctgacgcataaggacgttaccgagaatttggagacccaggtcgttgagtcccggctaagagaaccccctggagctaaagatgcaaatggcagcaccaggacacttctggaaaagatggggggcaagccccgaccttccggcagaatccggtcagtattgcacgcagatgagatgtag

SEQ ID NO: 285812 - DNA, 747 bp, Artificial Sequence
  derived and/or modified sequence
atggtgcccgacagctgcatggtgagcgagctgcccttcgacgcccatgctcacatcctgcctcgggctggcacagtcgcacctgtaccttgtaccacacttttgccatgccagaccctctttcttacagacgaagagaagcgcctgcttgggcaggaaggcgtgagcctgccgtcgcacctcccgctgactaaagctgaggagcgggttctcaaaaaagtccggaggaaaatcaggaacaaacaatccgcacaagacagccgacggcgcaagaaggagtatattgatgggttggaatctagagtagccgcttgttctgcacagaaccaagaactgcagaaaaaggtgcaggagcttgagaggcacaatataagcttggtcgcccagctgcgccagctccagactctgattgcacagactagcaataaggcggctcaaacttctacctgcgtgttaattcttctattttccctagccctcatcatccttccgtctttcagtcctttccaatctcgtccggaggctggaagcgaagactatcagccccacggtgtgacctcgagaaatattctgacccacaaagatgttaccgaaaatcttgagactcaggtggtagaatcacgactaagggagccccccggcgcaaaagatgctaacggttccacccgcacattgctggaaaagatgggagggaagccacgccctagtgggcgtatacggagcgtcctccacgccgacgagatgtag

SEQ ID NO: 285813 - DNA, 687 bp, Artificial Sequence
  derived and/or modified sequence
atggacctgggcatccccgacctgctggacgcctggctggagccccccgaggacatcttttcaaccggctctgtgctcgagctcggtctgcactgcccccctcccgaggtaccaggcctgcaagaatctgagccagaggatttcctaaaactctttatcgacccaaatgaagtgtactgcagcgaagctagcccaggcagtgatagtggaatcagtgaagacccttgccatcctgactcgcccccggctccgagagcgaccagttcccccatgctgtacgaggtcgtctacgaggccggcgctctggagcgcatgcagggcgagaccggccccaatgtgggactgattagtatccagctcgatcagtggtctccggctttcatggtccctgatagctgcatggtatccgagctaccctttgacgcccatgcccacatcctgccaagagctggaactgtggcgccagtcccgtgcacaaccctcctgccctgtcagaccctatttctgaccgacgaagagaagagacttctgggtcaagagggggtgagtttgccatcccatctgccactgaccaaagctgaggaacgtgtgctgaaaaaagtcaggcggaaaatcagaaataagcaatcggctcaggacagtaggaggaggaagaaggagtacatcgacggtttggagagccgctag

SEQ ID NO: 285814 - DNA, 1128 bp, Artificial Sequence
  derived and/or modified sequence
atggatctcgggattccggatctcctggacgcatggctcgagccacccgaggacatcttttccactggaagcgtccttgagctcggactgcactgtccgcctcctgaagtccctggattgcaggaaagtgagcctgaagattttcttaaattgtttatagaccctaacgaggtttactgcagcgaggcaagccctggaagtgattcaggaatcagtgaggatccttgccaccccgactcacctcccgctcccagagccacctcatcaccgatgctatacgaagtcgtgtacgaagctggcgctcttgagagaatgcaaggggagaccggaccaaatgtcggcttgatatccatccagcttgatcagtggtccccagccttcatggtgcctgactcatgcatggtctcggaactcccttttgacgctcacgcccacatacttcccagagctggcacggtggcccctgtcccctgtacgactctcttaccttgccagaccctcttcctcactgacgaggagaaacggctcctgggacaggagggagtcagccttcccagccacctgccactcacaaaggcggaagaaagggttttgaagaaggtccggaggaagattcggaacaagcagagcgcacaagatagtcgcagacgcaaaaaggagtatatcgacgggctcgagtccagggtggcagcctgtagcgctcagaatcaagaactgcagaaaaaagtccaggaactggagaggcataatatttccctggtcgcccagctgcgccagctgcagacgctcatcgctcagaccagcaacaaagctgcacagacaagtacgtgcgtcctgatactgttgttcagtctcgcgctgattatcctgccttctttctccccatttcagagccgcccagaagctggctcagaagattaccagcctcacggcgtgacgagtcgtaatatcttgactcataaagatgtcactgagaacctggagacacaggtggtggaatctcgactgagggaaccacctggggcaaaagatgccaatgggtctacgaggacacttctggaaaaaatgggtgggaaacctaggcccagcggccgaatccggtcggtcctccatgccgatgaaatgtag

SEQ ID NO: 285815 - DNA, 747 bp, Artificial Sequence
  derived and/or modified sequence
atggtgcctgatagctgcatggtcagcgaactccccttcgacgcccatgcacatattctgcctcgtgcaggcactgtggctcctgtcccctgtaccactctcttgccttgtcagaccctattccttaccgatgaggagaagcgactactgggccaggagggagtttctctccctagtcatctgccactgactaaggctgaggagagagtcctcaaaaaggtgcggagaaaaatccgcaacaaacagagtgctcaggactctcgcaggagaaagaaggagtatattgatggcctggagtcaagggtggctgcctgctctgctcaaaatcaggaactgcaaaagaaagtgcaggagctggaacgccacaacatttcattggttgcccagctccgacaactgcagacactaatcgcccagaccagcaataaggctgcacagactagcacatgtgtgctgattctgcttttttccctagcgctaattattctaccaagctttagccccttccagtcccgtcctgaggctggcagcgaggattaccagccccacggcgtgacctcccgtaacattctgacccataaggacgtgactgaaaatttggaaacccaggtggttgaaagtcgcctccgggaacctcccggtgcgaaagacgctaacgggagtaccaggactcttctggaaaagatgggcggtaagccgagacccagcggtagaatcagatctgtgctccacgccgatgaaatgtag

SEQ ID NO: 285816 - DNA, 687 bp, Artificial Sequence
  derived and/or modified sequence
atggatctgggcattccagacctcttggacgcatggctggagccaccagaggacatatttagcaccggtagcgtcctggagctcgggctgcactgtccgcctcctgaagtccctgggctccaggaatcagagcccgaggatttccttaaactatttattgatccaaatgaagtctactgctccgaggcatccccaggcagtgattccggcatttcggaagacccttgccacccagactcgcctcctgctccacgcgctacctcaagccctatgttatacgaagtcgtgtacgaggccggagctctggagcggatgcagggagagactggtccaaatgtggggctcatctctattcagctggatcagtggtcccctgcctttatggtgccagacagttgcatggtctccgaacttccctttgatgcacacgcgcacatccttccgagagcgggtaccgtcgctcctgtgccatgtaccaccctgctcccttgccagacgctgttccttactgatgaagagaagcgtctgctcggccaagagggggtgtccctcccctcccacctccccttgactaaagcagaggaaagggtgctgaaaaaagtgcgcaggaagatccggaataaacagtcagcccaagacagcagacgcaggaagaaagaatatatcgatggcctggaaagcagatag

SEQ ID NO: 285817 - DNA, 1496 bp, Artificial Sequence
  derived and/or modified sequence
aaaaggtgtagtgtttggggaggtcaacgggctatgctggcttgacagggctgggctcttcagaacagaagcatggatctcggaatccctgacctgctggacgcgtggctggagcccccagaggatatcttctcgacaggatccgtcctggagctgggactccactgcccccctccagaggttccgggccttcaagagagtgagcctgaagatttcttgaagcttttcattgatcccaatgaggtgtactgctcagaagcatctcctggcagtgacagtggcatctctgaggacccctgccatccagacagtccccctgcccccagggcaaccagttctcctatgctctatgaggttgtctatgaggcaggggccctggagaggatgcagggggaaactgggccaaatgtaggccttatctccatccagctagatcagtggagcccagcatttatggtgcctgattcctgcatggtcagtgagctgccctttgatgctcatgcccacatcctgcccagagcaggcaccgtagccccagtgccctgtacaaccctgctgccctgtcaaaccctgttcctgaccgatgaggagaagcgtctgctggggcaggaaggggtttccctgccctctcacctgcccctcaccaaggcagaggagagggtcctcaagaaggtcaggaggaaaatccgtaacaagcagtcagctcaggacagtcggcggcggaagaaggagtacattgatgggctggagagcagggtggcagcctgttctgcacagaaccaagaattacagaaaaaagtccaggagctggagaggcacaacatctccttggtagctcagctccgccagctgcagacgctaattgctcaaacttccaacaaagctgcccagaccagcacttgtgttttgattcttcttttttccctggctctcatcatcctgcccagcttcagtccattccagagtcgaccagaagctgggtctgaggattaccagcctcacggagtgacttccagaaatatcctgacccacaaggacgtaacagaaaatctggagacccaagtggtagagtccagactgagggagccacctggagccaaggatgcaaatggctcaacaaggacactgcttgagaagatgggagggaagccaagacccagtgggcgcatccggtccgtgctgcatgcagatgagatgtgagctggaacagaccttcctggcccacttcctgatcacaaggaatcctgggcttccttatggctttgcttcccactgggattcctacttaggtgtctgccctcaggggtccaaatcacttcaggacaccccaagagatgtcctttagtctctgcctgaggcctagtctgcatttgtttgcatatatgagagggtacctcaaatacttctgttatgtatctgtgattttatttcttctttgggtatagggttgaggggaaataagttttgagtgagaaataaacgttttagctgaaatt

SEQ ID NO: 285818 - DNA, 1531 bp, Artificial Sequence
  derived and/or modified sequence
ctagtaaattcgcaggtctcttgactctttccgcctttgtttacaaccctgccatgatctccctcttgcaaaagcgagggctacagaacaggcattcaggagtcctgtgctccagtcacagccttttctgttcttcagctaggagacaccaaaccctcaggaagatttactatagctaagagaaaactgcagcagaaagggcgcggctacctacttcttaaattccgtttgtggaccctcagactcttagtcccctactcccagatacagcggccctaccgtggctcctggcaagaagcatggatctcggaatccctgacctgctggacgcgtggctggagcccccagaggatatcttctcgacaggatccgtcctggagctgggactccactgcccccctccagaggttccggtaactaggctacaggaacagggactgcaaggctggaagtccggtggggaccgtggctgtatcagtggagcccagcatttatggtgcctgattcctgcatggtcagtgagctgccctttgatgctcatgcccacatcctgcccagagcaggcaccgtagccccagtgccctgtacaaccctgctgccctgtcaaaccctgttcctgaccgatgaggagaagcgtctgctggggcaggaaggggtttccctgccctctcacctgcccctcaccaaggcagaggagagggtcctcaagaaggtcaggaggaaaatccgtaacaagcagtcagctcaggacagtcggcggcggaagaaggagtacattgatgggctggagagcagggtggcagcctgttctgcacagaaccaagaattacagaaaaaagtccaggagctggagaggcacaacatctccttggtagctcagctccgccagctgcagacgctaattgctcaaacttccaacaaagctgcccagaccagcacttgtgttttgattcttcttttttccctggctctcatcatcctgcccagcttcagtccattccagagtcgaccagaagctgggtctgaggattaccagcctcacggagtgacttccagaaatatcctgacccacaaggacgtaacagaaaatctggagacccaagtggtagagtccagactgagggagccacctggagccaaggatgcaaatggctcaacaaggacactgcttgagaagatgggagggaagccaagacccagtgggcgcatccggtccgtgctgcatgcagatgagatgtgagctggaacagaccttcctggcccacttcctgatcacaaggaatcctgggcttccttatggctttgcttcccactgggattcctacttaggtgtctgccctcaggggtccaaatcacttcaggacaccccaagagatgtcctttagtctctgcctgaggcctagtctgcatttgtttgcatatatgagagggtacctcaaatacttctgttatgtatctgtgattttatttcttctttgggtatagggttgaggggaaataagttttgagtgagaaataaacgttttagctg

SEQ ID NO: 285819 - DNA, 982 bp, Artificial Sequence
  derived and/or modified sequence
gactctttccgcctttgtttacaaccctgccatgatctccctcttgcaaaagcgagggctacagaacaggcattcaggagtcctgtgctccagtcacagccttttctgttcttcagctaggagacaccaaaccctcaggaagatttactatagctaagagaaaactgcagcagaaagggcgcggctacctacttcttaaattccgtttgtggaccctcagactcttagtcccctactcccagatacagcggccctaccgtggctcctggcaaggtggcatccacttttgtagtaagcatggatctcggaatccctgacctgctggacgcgtggctggagcccccagaggatatcttctcgacaggatccgtcctggagctgggactccactgcccccctccagaggttccgggccttcaagagagtgagcctgaagatttcttgaagcttttcattgatcccaatgaggtgtactgctcagaagcatctcctggcagtgacagtggcatctctgaggacccctgccatccagacagtccccctgcccccagggcaaccagttctcctatgctctatgaggttgtctatgaggcaggggccctggagaggatgcagggggaaactgggccaaatgtaggccttatctccatccagctagatcagtggagcccagcatttatggtgcctgattcctgcatggtcagtgagctgccctttgatgctcatgcccacatcctgcccagagcaggcaccgtagccccagtgccctgtacaaccctgctgccctgtcaaaccctgttcctgaccgatgaggagaagcgtctgctggggcaggaaggggtttccctgccctctcacctgcccctcaccaaggcagaggagagggtcctcaagaaggtcaggaggaaaatccgtaacaagcagtcagctcaggacagtcggcggcggaagaaggagtacattgatgggctggagagcaggt

SEQ ID NO: 285820 - DNA, 1128 bp, Artificial Sequence
  derived and/or modified sequence
atggacctgggcatccccgacctgctggacgcctggctggagccccccgaggacatcttcagcaccggcagcgtgctggagctgggcctgcactgccccccccccgaggtgcccggcctgcaggagagcgagcccgaggacttcctgaagctgttcatcgaccccaacgaggtgtactgcagcgaggccagccccggcagcgacagcggcatcagcgaggacccctgccaccccgacagcccccccgcccccagagccaccagcagccccatgctgtacgaggtggtgtacgaggccggcgccctggagagaatgcagggcgagaccggccccaacgtgggcctgatcagcatccagctggaccagtggagccccgccttcatggtgcccgacagctgcatggtgagcgagctgcccttcgacgcccacgcccacatcctgcccagagccggcaccgtggcccccgtgccctgcaccaccctgctgccctgccagaccctgttcctgaccgacgaggagaagagactgctgggccaggagggcgtgagcctgcccagccacctgcccctgaccaaggccgaggagagagtgctgaagaaggtgagaagaaagatcagaaacaagcagagcgcccaggacagcagaagaagaaagaaggagtacatcgacggcctggagagcagagtggccgcctgcagcgcccagaaccaggagctgcagaagaaggtgcaggagctggagagacacaacatcagcctggtggcccagctgagacagctgcagaccctgatcgcccagaccagcaacaaggccgcccagaccagcacctgcgtgctgatcctgctgttcagcctggccctgatcatcctgcccagcttcagccccttccagagcagacccgaggccggcagcgaggactaccagccccacggcgtgaccagcagaaacatcctgacccacaaggacgtgaccgagaacctggagacccaggtggtggagagcagactgagagagccccccggcgccaaggacgccaacggcagcaccagaaccctgctggagaagatgggcggcaagcccagacccagcggcagaatcagaagcgtgctgcacgccgacgagatgtag

SEQ ID NO: 285821 - DNA, 747 bp, Artificial Sequence
  derived and/or modified sequence
atggtgcccgacagctgcatggtgagcgagctgcccttcgacgcccacgcccacatcctgcccagagccggcaccgtggcccccgtgccctgcaccaccctgctgccctgccagaccctgttcctgaccgacgaggagaagagactgctgggccaggagggcgtgagcctgcccagccacctgcccctgaccaaggccgaggagagagtgctgaagaaggtgagaagaaagatcagaaacaagcagagcgcccaggacagcagaagaagaaagaaggagtacatcgacggcctggagagcagagtggccgcctgcagcgcccagaaccaggagctgcagaagaaggtgcaggagctggagagacacaacatcagcctggtggcccagctgagacagctgcagaccctgatcgcccagaccagcaacaaggccgcccagaccagcacctgcgtgctgatcctgctgttcagcctggccctgatcatcctgcccagcttcagccccttccagagcagacccgaggccggcagcgaggactaccagccccacggcgtgaccagcagaaacatcctgacccacaaggacgtgaccgagaacctggagacccaggtggtggagagcagactgagagagccccccggcgccaaggacgccaacggcagcaccagaaccctgctggagaagatgggcggcaagcccagacccagcggcagaatcagaagcgtgctgcacgccgacgagatgtag

SEQ ID NO: 285822 - DNA, 687 bp, Artificial Sequence
  derived and/or modified sequence
atggacctgggcatccccgacctgctggacgcctggctggagccccccgaggacatcttcagcaccggcagcgtgctggagctgggcctgcactgccccccccccgaggtgcccggcctgcaggagagcgagcccgaggacttcctgaagctgttcatcgaccccaacgaggtgtactgcagcgaggccagccccggcagcgacagcggcatcagcgaggacccctgccaccccgacagcccccccgcccccagagccaccagcagccccatgctgtacgaggtggtgtacgaggccggcgccctggagagaatgcagggcgagaccggccccaacgtgggcctgatcagcatccagctggaccagtggagccccgccttcatggtgcccgacagctgcatggtgagcgagctgcccttcgacgcccacgcccacatcctgcccagagccggcaccgtggcccccgtgccctgcaccaccctgctgccctgccagaccctgttcctgaccgacgaggagaagagactgctgggccaggagggcgtgagcctgcccagccacctgcccctgaccaaggccgaggagagagtgctgaagaaggtgagaagaaagatcagaaacaagcagagcgcccaggacagcagaagaagaaagaaggagtacatcgacggcctggagagcagatag

SEQ ID NO: 285823 - protein, 415 aa, Artificial Sequence
  derived and/or modified sequence
VKHRSSVMKQFLETAINLQLFKQFIDGRLAKLNAGRGFSDVFEEEITSGGFCGGNPRSYQQWVHTVKKGGALFNTAMTKATPAVRTAYKFAKNHAKLGLKEVKSKLKHKENEEDYGTCSSSVQYTPVYKLHNEKGGNSEKRKLAQARLKRPLKSLDGALYDDEDDDDIERASKLSSEDGEEASAYLYESDDSVETRVKTPYSGEMDLLGEILDTLSTHSSDQGKLAAAKSLDFFRSMDDIDYKPTNKSNAPSENNLAFLCGGSGDQAEWNLGQDDSALHGKHLPPSPRKRVSSSGLTDSLFILKEENSNKHLGADNVSDPTSGLDFQLTSPEVSQTDKGKTEKRETLSQISDDLLIPGLGRHSSTFVPWEKEGKEAKETSEDIGLLHEVVSLCHMTSDFQQSLNISDKNTNGNQT

SEQ ID NO: 285824 - DNA, 1248 bp, Artificial Sequence
  derived and/or modified sequence
gtgaagcatcgctccagtgtgatgaagcagttcctggagaccgcgatcaatctccagctgtttaaacagttcatagacgggaggttggctaagctgaacgccgggcgcggattttctgacgtgttcgaagaagagataacgtcaggtggattctgtggtggaaatccacggagctaccagcagtgggtccataccgtgaagaagggcggggctttgttcaatactgccatgacaaaggcaactcccgcagtaaggaccgcttataagtttgctaaaaatcacgccaagctcgggctcaaggaggttaagtccaaactgaagcacaaagagaatgaggaggattacggcacctgcagttcttcagtgcagtacacccctgtttacaagctacataatgagaaggggggaaactcggagaagcgaaagctcgctcaggccaggctgaaacgtccattgaaatcactagacggagccctctatgatgacgaagatgatgacgatatcgagagagccagtaaactgtcatcagaggacggagaagaggcttctgcctacttgtatgaatcagacgattctgtggagacacgggtaaagacaccatattccggagagatggacctgctgggcgagatattagatacactaagcacccactcctctgatcagggaaagctggccgccgccaaatctctggacttttttagatctatggatgatatagattacaagccgacgaataagtccaatgccccatctgagaataacctggcttttctgtgcggcggatccggggaccaggctgagtggaacctgggtcaagacgactctgccctgcatggaaagcatctcccacccagcccacgcaagcgcgtctccagctccggcctgacagattctctgtttatattaaaagaggaaaactccaataaacatttaggagcagataatgtgagcgatcctacgagcgggctggactttcagctcacatcccccgaggtctctcagactgacaaggggaagaccgaaaaaagagagactctgagtcaaatctcggacgatctgttgattcccggactgggaagacactcatccactttcgtcccctgggagaaggagggtaaggaggccaaagaaacgagcgaggacattggcctactccacgaagtggtttcattatgccatatgaccagtgacttccaacagtctctgaacatttcagataagaacacaaatggcaatcagacctag

SEQ ID NO: 285825 - DNA, 1248 bp, Artificial Sequence
  derived and/or modified sequence
gtgaagcacaggagctctgtgatgaagcagttcctggagacagccatcaacctgcagctgttcaagcagttcattgatggccgcctggccaagctgaatgccggccggggcttcagtgatgtgtttgaggaggagatcaccagcggcggcttctgtggcggcaaccccaggagctaccagcagtgggtgcacacagtgaagaagggcggggccctcttcaacacagccatgaccaaggccaccccagctgtgaggacagcctacaagtttgccaagaaccacgccaagctgggcctgaaggaggtgaagagcaagctgaagcacaaggaaaatgaagaagattatggcacctgcagcagctctgtgcagtacacccctgtgtacaagctgcacaatgagaagggcggcaacagcgagaagaggaagctggcccaggcccggctgaagaggcccctgaagagcctggatggagccctgtatgatgatgaagatgatgatgacatcgagcgggccagcaagctgagcagtgaagatggagaggaggccagcgcctacctgtatgaaagtgatgacagcgtggagaccagggtgaagaccccctacagcggggagatggacctgctgggggagatcctggacaccctgagcacccacagcagtgaccagggcaagctggccgccgccaagagcctggacttcttccgctccatggatgacatcgactacaagcccaccaacaagagcaatgcccccagcgagaacaacctggccttcctgtgtggcggcagcggggaccaggccgagtggaacctgggccaggatgacagcgccctgcacggcaagcacctgccccccagccccaggaagagggtgagcagcagcggcctgacagacagcctcttcatcctgaaggaggagaacagcaacaagcacctgggcgctgacaacgtgtctgaccccaccagcggcctggacttccagctgaccagccctgaggtgtcccagacagacaagggcaagacagagaagcgggagaccctgagccagatcagtgatgacctgctgatccctggcctgggccgccacagcagcacctttgtgccctgggagaaggagggcaaggaggccaaggagaccagtgaagatattggcctgctgcacgaggtggtgtccctgtgccacatgaccagtgacttccagcagagcctgaacatcagtgacaagaacaccaatggaaaccagacctag

SEQ ID NO: 285826 - DNA, 1248 bp, Artificial Sequence
  derived and/or modified sequence
gtgaagcaccggagcagcgtgatgaagcagttcctggagaccgccattaatctccagctgtttaagcagttcatagacggaagattggctaaactgaacgctggacgtgggttctctgacgtgttcgaggaggagatcaccagtgggggcttttgtgggggcaatccaaggtcttatcaacaatgggttcacacagtgaagaaaggcggtgccctttttaataccgctatgacgaaggccactcctgcagtcagaactgcctacaagtttgccaagaatcatgccaaactgggcctaaaggaagtgaagtccaagctcaagcacaaggagaatgaagaagattacgggacctgttctagctcagtgcagtacactccggtgtataagctccacaacgaaaagggagggaatagcgagaagcgaaaattagctcaggctaggctgaagagaccactgaaatctctggacggggccctttatgacgatgaggatgacgatgacatcgaaagggctagtaaactgtcttccgaggatggtgaggaggcctcagcctatctatacgagagtgatgactctgtggagactagggtaaaaaccccgtactccggggaaatggatctcctcggcgagatcctggatacattgtctacacactcaagcgaccagggaaaacttgctgcggccaagtcactcgatttttttcgaagcatggatgacatcgactacaagcctacaaacaaatcaaatgctccttctgagaacaatctggctttcctgtgcggcggctcaggagatcaagcagagtggaatttggggcaggatgatagcgcgctccatggcaaacatttgcctcctagccccagaaaacgcgtgagctcttccggcctgacagactcactttttatcctgaaagaagaaaattcaaacaagcatttaggcgctgacaacgtaagcgatccaacttcaggccttgacttccagttaacatcccccgaggtgtctcaaactgacaagggtaaaaccgaaaagcgggaaactttatctcagatatctgacgatttacttatccctggacttggaagacattcgtctacatttgtcccatgggaaaaagagggcaaggaggcaaaagagacgagcgaagatatcgggctcctccatgaggtggtttctctctgtcatatgacatctgatttccaacagtctctgaatatctcagataagaataccaatgggaatcagacatag

SEQ ID NO: 285827 - DNA, 1248 bp, Artificial Sequence
  derived and/or modified sequence
gtgaagcacaggagctcagtaatgaagcagttcctggaaaccgcgattaatttgcagttgttcaaacaattcatcgatggacgactggctaagctcaacgctgggagagggttcagcgatgtgtttgaagaggagattacatccgggggtttttgcggcggaaaccccagatcgtaccagcagtgggtacacaccgtgaagaaggggggagcactgttcaacaccgctatgaccaaggctacaccagctgtgaggactgcctacaaatttgctaagaatcatgcaaagctaggacttaaagaggttaagagcaaattgaaacacaaagaaaacgaggaagactacgggacatgttcttcttccgtgcagtacactcctgtttacaagctgcataatgagaagggcggaaacagcgaaaaacgaaaactagctcaagctcggcttaaacgtcccctgaaaagcctggatggagccctttacgacgatgaggacgacgatgatattgaaagagccagtaagctgtcttccgaggatggagaagaggcctctgcttatctgtacgagtctgatgactctgtcgagacccgggtcaaaacaccatactccggtgaaatggacctgctgggtgagattctggatacccttagtacgcactcatctgaccagggcaaattggctgccgcaaaatccttggatttcttccggagcatggacgatattgactacaagcccaccaataaaagtaatgcccctagcgagaacaatcttgcttttctctgtgggggatccggtgaccaagcggagtggaatctcggacaggacgacagcgcactgcatggcaagcatctccccccatccccgaggaaaagagtgtcatccagcggactgactgattctctgttcatattaaaagaagagaattccaacaagcatctgggcgctgacaatgtctccgaccctacctctggactggactttcaacttacctccccagaggtgagccagactgacaagggcaaaaccgaaaaaagagaaaccctgtcgcaaatctccgacgacttgctgatccccggacttgggcgacacagcagcacctttgtcccatgggaaaaggaagggaaggaggccaaggagacaagtgaggacataggcctactgcatgaagtggtgtcactatgtcacatgacaagtgattttcagcagtccctgaacatttcagataagaacaccaacggaaaccagacctag

SEQ ID NO: 285828 - DNA, 1248 bp, Artificial Sequence
  derived and/or modified sequence
gtgaagcacagaagcagcgtgatgaagcagttcctggagaccgccatcaacctgcagctgttcaagcagttcatcgacggcagactggccaagctgaacgccggcagaggcttcagcgacgtgttcgaggaggagatcaccagcggcggcttctgcggcggcaaccccagaagctaccagcagtgggtgcacaccgtgaagaagggcggcgccctgttcaacaccgccatgaccaaggccacccccgccgtgagaaccgcctacaagttcgccaagaaccacgccaagctgggcctgaaggaggtgaagagcaagctgaagcacaaggagaacgaggaggactacggcacctgcagcagcagcgtgcagtacacccccgtgtacaagctgcacaacgagaagggcggcaacagcgagaagagaaagctggcccaggccagactgaagagacccctgaagagcctggacggcgccctgtacgacgacgaggacgacgacgacatcgagagagccagcaagctgagcagcgaggacggcgaggaggccagcgcctacctgtacgagagcgacgacagcgtggagaccagagtgaagaccccctacagcggcgagatggacctgctgggcgagatcctggacaccctgagcacccacagcagcgaccagggcaagctggccgccgccaagagcctggacttcttcagaagcatggacgacatcgactacaagcccaccaacaagagcaacgcccccagcgagaacaacctggccttcctgtgcggcggcagcggcgaccaggccgagtggaacctgggccaggacgacagcgccctgcacggcaagcacctgccccccagccccagaaagagagtgagcagcagcggcctgaccgacagcctgttcatcctgaaggaggagaacagcaacaagcacctgggcgccgacaacgtgagcgaccccaccagcggcctggacttccagctgaccagccccgaggtgagccagaccgacaagggcaagaccgagaagagagagaccctgagccagatcagcgacgacctgctgatccccggcctgggcagacacagcagcaccttcgtgccctgggagaaggagggcaaggaggccaaggagaccagcgaggacatcggcctgctgcacgaggtggtgagcctgtgccacatgaccagcgacttccagcagagcctgaacatcagcgacaagaacaccaacggcaaccagacctag

SEQ ID NO: 285829 - DNA, 6960 bp, Artificial Sequence
  derived and/or modified sequence
gtaaagcaccgctcaagcgtgatgaaacagttcctggaaactgccattaacctccagctttttaagcagtttatcgatggtcgactggcaaaactaaatgcaggaaggggtttctctgatgtatttgaagaagagatcacttcaggtggcttttgtggagggaacccgaggtcatatcaacaatgggtgcatacagtcaagaaaggaggtgcactgttcaacacagcaatgaccaaagcaacccctgctgtacggacagcatataaatttgcaaaaaatcatgcaaagctgggactaaaggaagtgaagagtaaactaaaacacaaggaaaatgaagaagattatgggacctgttctagttctgtacaatatacaccagtttacaaattacacaatgaaaagggaggaaactcagaaaagcgtaagcttgctcaggcacgcttaaaaaggcctcttaagagccttgatggtgctctatatgatgatgaagatgatgatgacattgaaagagcaagcaagttatcttctgaagatggtgaagaagcttctgcttatctctatgagagtgatgactctgttgaaacaagagtgaagactccttactcaggtgaaatggacttactaggagagattcttgatacattgagcacacacagctcagatcaggggaagctggcagctgcaaagagcttggatttctttagatcaatggatgacattgattacaaacctacgaataaatctaatgctcctagtgagaataacctggctttcctctgtggtggttctggtgaccaagcagagtggaatcttgggcaagacgatagtgccctccatggcaaacacctccctccatctcctaggaagcgggtttcctctagtggtttgacagattctctgtttatcctgaaagaggaaaacagtaacaagcacctcggtgctgacaatgtgagtgaccctacttcaggactggatttccaactcacttcccctgaagtttcccagactgataaaggaaaaacagaaaagagggaaacactaagccagatttcagatgatctgcttatacccggtcttgggcggcattcatcgacttttgttccttgggagaaagaagggaaagaagccaaagagacttcagaagatattggactgctccatgaagtagtgtcattatgtcatatgacatctgacttccaacaaagcttgaacatttcagacaaaaacacaaatggaaaccaaacttaaatcttgcatccaagcttctatggagacattttgagattcaatgcaatctgtataataaacagaattatttgtaggaatggcaactcatactatttaaatttttttttgcatttgcaacatttttctcacttgttcatttcgaggatatatgaaatgcattgatttttaaatataaagcgaattctactgtgcttttaaatcaggtactagtgtgtatgtatgtttaaagtatgtattgaccatgagatttcccagtgtttggtgcttaatgccgtttattttatttaagctaagaatgcatatgtaacccatgcacataaccagtagctactatactaatctggttgagcatgaactgatcaagatatcaaaacttatcaaaactagcctgaagctgatgaaactgttaacccactaattgccttaatcttaaagctgttttttaagcatacttaaataatgtatgaaagtatgtataaagtttgaaggataagttattagtgttctgcagagcaataatgcctttttctattcatcaaatcaaggtcaaaattcatcttttcaagattaaaaagctctcttaatggaaatatttaatttgcttatataaagcactatagccatgttttccaaaaagtataaaaatatacacttacctttcattcagtgaaatataggaagtgctgaattacaatgtgaagttaatgacttctgtttacaaatgagacactctaacgagttttcagtctctctgtatgcctttgctatttaggggtccaccccaagaaagccaaatacaacataaaccgtcctgacaaaaaaaaaaaaaaaaatctttttttaactaataattctctatcaaaatgcttcatatcatcatctcaaatttactttttaaaataattgactttgtattttagaagttttagatttacagaaaaattgcaaagatagtacagagagttcccatctacccctgttactaacatcttacgttactatggtacatctgccccaattagtgaaccaatattgatattccatactttattcagattttcttagttttctcctaatatccattttccacatcaagatcctattcagaataccacactatattgagttggaatgtctccttaggctcctcttgcctgtgacagtttcttagactttccttatttttgatgacattgacagctttgaagagtactgtcagataaattgtagcatgctcctctcttggagtttgttgggtatttttttcatgattagactgggattgtgggttttgaggagatgatcacagaagtaaagtgccattttcatcaggtcatatcaagggtacgtactgtcaacatgatttgtgaatgctgacagggaccttgataacctggctgaggtagcgtttgtcactctaaagttcttcctgccctttccatgctgtcatttttggaaggaagtcactacatgcaggagtgaggagtcataattccccttctttagggcagagaagtatctacataaataactgggaattctgtatagaaaatttgtttcttctttctcaaattcactgttgagctttggaattcatctgagaaggaatcatgtactaattacttcatgatagactagattaccaggcacaatcagggaaaaaagcagtgatagtatggttaaattgttattagcattttcagtatatccactttatacatccccaatcatgattttttttacatttctttttagaaaagatgttcaagaaatcattaaagaaccccaataagactatattctaaatatttattgaaagaatataatttcagctaaaatcctagaagagggtttgaaataatttaaagaaaatgaccaagtttttttaaaacctacgtttcaaaatctaaatggatatgtgttatttgggacacttattcattatgattatataagaagacaattcttgtttcccttataagtatggactgtatacattaaggaaaacaatgtttaatccttattttttaatacagaagtctcaaggttcttgtcaaattttgcctttataagcttattacaaaattacaacttactttactgaagtttataatggaagaagtccatatagcaaaagagctgttttaaatcagaaggaaaaaaggttactctggttgttaatctgcttggcaaatattccttcataatttgtgaaaagaatgcaaatcagcattttaatatgaattttgaaatgaggtatggttttttgtttgtttttttcagaactcagtctgaaaaacaactgtgagtgtagcatgggtcaaatttggtttttagtccatttgctttatcaacatcacggcttcagaaatccaaattttgttctacttttcagccacctttcaaggtgtttggttataatactgtgttgctttgaggatatttagccactcataaataattgtctcaaggtatttaaaagtgatttgtgccttattttaatgcaaaattagcagttttattctattttaaaaacaaaggcagaaaaacaattctgcatgttattctttaaaaacatccagaataatactaccaagtatttgtatttcaaaccagtaaaattttgaatattcaaagtctgctcttaaacttagacttcctagtattatggtggttatagtgagaatgaaattaaactgggtgagttccgaaataaaggaaagtgttatattctacagtgcccatattttctatggtaactaaatcaaatatttgtaagttcctctgctttttgaaattatttttcaaagaagcaacacctgttatacaacagaattgtataaactaaaaagacttttggccttggtacatagtctttatctggcctgcaatggagtcatggttctttctgaatcccactctcacttttttctttttacccttagatattgcatccgtggtatttcaggggtatagagaaataatattggaatttaggagctatttttttaagtgaaaatattactaagtggtatcttttgatgattacctactttaatgtgtcttagaaaagcaccaaaacatagcatgattattttttcagttaattaaaattagttaataacatgttcatttaaaaactattcattgactttttgtaccagtcatatgcagggtacagtaactgaggatatgggaaataaaataactgacatagtccctgctctgaaggaacaaaggaaaaggaattgcaaatttttattaaaataataataataataataataataataataataataataataatgtgttttgcctggaagttattagctgagattctaacacacaaaaagttcaaaaaaaaagaacaaaaactggctgcttaatttaaagcatgctctaagtatgaaccatagtatcatttctaatttcattaactttctcaattattatgctaagtatattatgctgctaagatacccacatttaaggggcagatttagagactcttttagaaactgagtgtctttatcttattatcagataaccaggctgcacagggctctctataatggaatgatgctccttttcaatacttagagccactgtactcagtttaggagtaactgaaggtgtggatgcatgttaatgggaatccaatttttactatttttatatgaataacagcgttctgtagaaacagtctctcccttctaaataaaaactatgtgactgctgttactagtgctattctatgcgaatatcctaataataggattcaggaattctaatgaattgtttcttaattaaggtgaacaagtagactcctgatcaagaggagaacactgtgaatgtctcataatcaatagaccttcattctcttgtagaaaatgtggattttcaggaaaagactgattattttcatgaataaattttcttatacaaattccattttgtttgacataaaagaccctgaatcttaagatatttgtaaatcagaatatttaagaatgtaaaatgaatccccaaatctagtttcctccaaagcacttcttaatgtaggaaatagtttttacaaaccctatgtcagtactaatgttcctgggtcaaacccagtaatattgttagtgtatgttgttacaccttatttaagaggcagagtggttttgagcaagtcagttaacgtgatttgatgaagaaataaggaattatatacatttagacagaagaatattttattttgaaaataggatttcgtgcaataatttttcttgcataacttagttcatataaatatgtacatctgtttttctggcagatgccttaaggtcatgtttttcagtatttgagtaaatctgtatgtagcaatgttctcattgatttcagaaaaaaatatattctttatattgttgccaggagaaatgtttttgtttatttaaaattattatggatattgtgttgttgtatcataactaactgcctcagcaacaataaatatgcaataagaaaatcctgtaccttagattagattgacaatactgttactttaaaagaaatatatacggtacaaattgctgattctacatgtgtacatttaacagatactcagttctgcaccacctaaatcaaaatggcatttgtatgctgatgattacatatgtggattgtagtatcctttgtgatgaatctttgataagatttataaagggcattgccaatactttttgactgtgtaaattaattttttgtatgatgtacagtttgtttaatcttagagcttctatagatttctactttattatacttgaatgaggcagaaaagcactgtggaaaatctgtagctctggatgcaacatgcagacataccaaaaaaataataataaagcaaggtactgaagagcaatgttaacagaatgctttatatccagaatgctatgtttttttcaagccacattttagttgaatgaagtaaagttattcaatcttttattttaaaatattggaaagtcacaaatgattacttctttgatatgatgaacctataagtctattcatctctgttatttcatttctcaaatgtgagccttgttgaggtccattatcaaatctacactttggttgattatatgatgtttaggacaaggcagaatttaaaacctgcatgtttagtgcatcacatgtcaagtcaccatccttctgacagtgtaacttccataacgttattttgagagccatttaataatcatatttgaaaaagtggatttcttgagtctgttgtagtttagtacttacagcagtgcctaaaacagcaactaatatgaactgcctgagtcctacaacataaatgcataaagcttttttatgtaaaagccacaggaggggttcaaaattgaacttttccaaagtttatttctcttgcgttagatgaaaaactatttaaaaggactgaaaaccctgagctttttgctcgtcttggtagcagatatctgtaaaaacctacccagaattgtgattttacttcattgttcttgcatccttgaggctacagtataaatcatctccaaacttgactactattgggaagatgtgtataaaagcatcgctttgggaatttttttaaaaatatgcaaaaataaatattgaataaaatctacattaccataaaacacccaaaaatgcagttctaaaataaaattggtcacaattaaa

SEQ ID NO: 285830 - protein, 512 aa, Artificial Sequence
  derived and/or modified sequence
MKAGCSIVEKPEGGGGYQFPDWAYKTESSPGSRQIQLWHFILELLQKEEFRHVIAWQQGEYGEFVIKDPDEVARLWGRRKCKPQMNYDKLSRALRYYYNKRILHKTKGKRFTYKFNFNKLVMPNYPFINIRSSGVVPQSAPPVPTASSRFHFPPLDTHSPTNDVQPGRFSASSLTASGQESSNGTDRKTELSELEDGSAADWRRGVDPVSSRNAIGGGGIGHQKRKPDIMLPLFARPGMYPDPHSPFAVSPIPGRGGVLNVPISPALSLTPTIFSYSPSPGLSPFTSSSCFSFNPEEMKHYLHSQACSVFNYHLSPRTFPRYPGLMVPPLQCQMHPEESTQFSIKLQPPPVGRKNRERVESSEESAPVTTPTMASIPPRIKVEPASEKDPESLRQSAREKEEHTQEEGTVPSRTIEEEKGTIFARPAAPPIWPSVPISTPSGEPLEVTEDSEDRPGKEPSAPEKKEDALMPPKLRLKRRWNDDPEARELSKSGKFLWNGSGPQGLATAAADA

SEQ ID NO: 285831 - DNA, 855 bp, Artificial Sequence
  derived and/or modified sequence
cccggagacgccgcggaggagaccggaccgaagacggaccgtgccgggaagagcaggcgggtgaaaatgaaagccggctgtagcatcgtggaaaagccagaaggaggtggagggtatcagtttcctgactgggcctacaaaacagagtcatccccaggctcccggcagatccagctgtggcacttcatcctggagctgctgcagaaggaagagttccgccatgtcatcgcctggcagcagggagagtacggggaatttgtcatcaaggatccagatgaggtggcccgcctctggggccgcaggaaatgcaaaccacagatgaattatgacaagctgagccgggccctcagatactattacaacaagaggatccttcataaaacaaaagggaaaagatttacctataaatttaacttcaacaagctggtgatgcccaactacccattcatcaacattcggtcaagtggtgtggttcctcagagtgcaccaccagtgccaacagcctcttcccggttccatttcccacctctggacacccattctccaaccaatgatgtgcagccgggacggttctctgctagctcccaactgcttctggccaggagtccagtaatggtactgatagaaagactgagctttcagagctggaggatggctcagctgctgactggcgccggggtgtggatcccgtgtcctccaggaatgccattggtggaggagggattggccatcagaaacgcaagcctgacataatgcttcctctgtttgctaggccagggatgtaccctgacccccacagtcccttcgctgtctctccaatccctggccgcggaggtgtccttaatgtcccctagg

SEQ ID NO: 285832 - DNA, 1539 bp, Artificial Sequence
  derived and/or modified sequence
atgaaggcaggatgttccattgtagagaagccagaggggggcggcggctaccagttcccagattgggcctataagactgagagctccccaggcagcaggcagattcaactgtggcacttcatcctggagctcctgcagaaggaagagtttcgtcacgtgatcgcttggcaacagggggagtatggcgagttcgtcatcaaagaccccgacgaggttgcgcgcctttggggcagaaggaagtgcaagcctcagatgaattacgataaactatccagagcccttagatactattacaataaacgcattcttcacaaaacgaagggcaagaggtttacttacaagttcaatttcaacaaactggtgatgccgaactatccttttattaatattcggagctctggcgttgttcctcagagcgcacctccggtccctaccgcctcatcccggttccactttcccccactcgatactcatagtcctactaacgacgtgcaacctggtcgtttcagtgcctcgagtttgactgcttccggacaggagtcatcaaacggaactgataggaaaacggagctgagcgaacttgaggatggaagcgccgcagattggagacggggcgtggacccagtcagcagcaggaatgccatcggaggcggcggtatcgggcaccagaaaagaaagcccgatattatgctgcctctgttcgccaggccgggaatgtacccggatccacactctccatttgccgttagtcctatccccgggcgaggtggggtactcaacgtccctatttcccccgccctgtcattgacgcctaccattttctcctattcaccatcacccggtctgagtccttttacgagctcttcctgcttctcttttaacccagaggagatgaagcactacctgcacagccaggcctgctctgtgtttaattaccacctctcaccaaggacttttcctagataccccgggctgatggtcccccctctccagtgtcagatgcacccagaagagagcacgcagttctccatcaagctccaaccaccacctgtgggcaggaagaatcgcgaaagggtcgaatcttcagaagaatcggctccagtgaccacacctacgatggcctccatccctccgcgtatcaaagtggaaccagcctccgaaaaagacccagaatcgctgcgccagtcagccagagagaaggaagagcacactcaagaagagggcacggtcccatcccggacaatcgaagaggaaaaaggcactatcttcgcccgccccgcagcccccccaatatggccctccgtgccaatctccactccctccggcgagccactcgaggttaccgaggattctgaagacagacccgggaaggaaccttcagccccggagaaaaaagaggacgcacttatgcccccgaagctgcggctcaagcggagatggaacgacgatccagaggcacgtgagctttcaaagtccggaaaattcctctggaacggctcaggccctcagggtcttgccactgccgccgcagacgcatag

SEQ ID NO: 285833 - DNA, 1539 bp, Artificial Sequence
  derived and/or modified sequence
atgaaggccggctgcagcatcgtggagaagccagagggcggcggcggctaccagttcccagactgggcctacaagacagagagcagccctggcagccggcagatccagctgtggcacttcatcctggagctgctgcagaaggaggagttccgccacgtgattgcctggcagcagggcgagtatggagaatttgtgatcaaggaccctgatgaggtggcccggctgtggggccgcaggaagtgcaagccccagatgaactatgacaagctgagccgggccctgcgctactactacaacaagaggatcctgcacaagaccaagggcaagcgcttcacctacaagttcaacttcaacaagctggtgatgcccaactaccccttcatcaacatccgcagcagtggagtggtgccccagagcgcccctcctgtgcccacagccagcagccgcttccacttcccccccctggacacccacagccccaccaatgatgtgcagcccggccgcttcagcgccagcagcctgacagccagcggccaggagagcagcaatggaacagacaggaagacagagctgtctgagctggaggatggcagcgctgctgactggaggagaggagtggaccctgtgagcagcagaaatgccatcggcggcggcggcatcggccaccagaagaggaagccagacatcatgctgcccctgtttgcccggcccggcatgtacccagacccccacagcccctttgctgtgagccccatccctggccggggcggcgtgctgaatgtgcccatcagccctgccctgagcctgacccccaccatcttctcctacagccccagccctggcctgagccccttcaccagcagcagctgcttctccttcaaccctgaggagatgaagcactacctgcacagccaggcctgcagcgtcttcaactaccacctgagccccaggaccttcccccgctacccaggcctgatggtgccccccctgcagtgccagatgcaccctgaggagagcacccagttcagcatcaagctgcagcccccacctgtgggcaggaagaaccgggagcgggtggagagcagcgaggagagcgcccctgtgaccacccccaccatggccagcatccccccacgcatcaaggtggagcccgccagcgagaaggaccctgagagcctgcggcagagcgcccgggagaaggaggagcacacccaggaggagggcaccgtgcccagcaggaccatcgaggaggagaagggcaccatctttgcccggcctgctgccccacccatctggcccagcgtgcccatcagcaccccatctggagagcccctggaggtgacagaagattctgaggacaggcctgggaaggagcccagcgcccctgagaagaaggaggatgccctgatgccacccaagctgcggctgaagaggcgctggaatgatgatcctgaggcccgggagctgagcaagagcggcaagttcctgtggaatggcagcggcccccagggcctggccacagctgctgctgatgcctag

SEQ ID NO: 285834 - DNA, 1539 bp, Artificial Sequence
  derived and/or modified sequence
atgaaggccggctgcagcatcgtggagaagcccgagggcggcggcggataccagtttccagattgggcctacaagacagagagtagccccggttctaggcagattcaactatggcattttatcttagaattgttgcagaaggaggagttcagacacgtgatcgcatggcagcaaggagagtacggggagtttgtgattaaggacccagatgaggtagcccgtctgtgggggcgccggaagtgtaagcctcagatgaattacgataagctcagtagggccctgagatattattacaataagcggattctgcacaagaccaagggcaaaagatttacctataagtttaactttaataagctggtaatgcctaattatcccttcatcaatatcaggtcctccggcgtagtgccccagagcgcgccacccgtgccgactgccagctcccgctttcattttcccccccttgatacacactcgcccacaaacgatgtgcagcctggcaggttctccgcatcaagtcttactgcaagcggccaagagagctcgaacggcacagacaggaaaacagaattgagtgagcttgaggacggaagtgctgcagattggcgcagaggagtggacccggtgtcctcccggaacgccatcggaggagggggcattggacaccaaaagaggaaaccggatattatgctccccctcttcgccagacccgggatgtaccccgatccacacagcccttttgccgtgtcccccataccagggaggggaggcgtgttaaatgtccccatctctcccgccctcagcttgacacctacaatcttttcctactctccctcccctggactgtcaccgttcacgtctagcagctgctttagcttcaatccggaggagatgaaacactacttgcattcccaggcatgttcggtttttaattaccacctatcaccaaggaccttccccagatatccaggcttgatggtgccacccttacagtgccagatgcatcccgaggagtccacacagttttcgattaaattacagccgccacctgtcgggaggaaaaatagggagagagtcgaatcttcagaggaaagtgcgccagtgacaacccccacaatggcctcgatccctcccaggatcaaagtggaaccggcctcagaaaaagacccggaaagtctcagacagtccgccagggagaaggaagagcatacacaagaagaaggcaccgtgccaagtcgaaccatagaggaggagaagggaaccatattcgcccgccctgctgcccccccaatctggccatccgtccctatttccaccccaagcggcgagcctcttgaggtcaccgaggatagtgaagacagacccggcaaagaaccttccgcccccgagaagaaagaggatgctctgatgcctcctaaactgcgcctgaagaggcggtggaatgatgaccctgaagccagggaactatctaagtcggggaaattcttatggaacgggtctggccctcaaggtctggccaccgcagctgctgacgcctag

SEQ ID NO: 285835 - DNA, 393 bp, Artificial Sequence
  derived and/or modified sequence
ggagagggcactgcagctgccagcgcaggaggattcgggtttgggagcagcagcaacaccacatccttcggcacgctcgcgagtcagaatgcccccactttcggatcactgtcccaacagacttctggttttgggacccagagtagcggattctctggttttggatcaggcacaggagggttcagctttgggtcaaataactcgtctgtccagggttttggtggctggcgaagctgagggcgtgtcagcaggctgttcagaccgacgttgccatcaaaacacatacacccagaaagaaacaacagaaaccaaaactcacaaggcgcatgattacttgttttatatttcatgttgggttttccctcccactattaaacagtctgtttccgtaca

SEQ ID NO: 285836 - DNA, 1539 bp, Artificial Sequence
  derived and/or modified sequence
atgaaagcgggatgctccatcgtggagaagcccgagggcggaggcggataccaatttccggactgggcttacaaaacggaaagctcacccggtagtcggcagatccaactgtggcacttcatccttgagctcctgcaaaaggaggaatttagacacgtcatagcttggcagcagggggaatatggcgaattcgtcatcaaggatccagatgaggtcgcgagactatggggtcgaaggaagtgtaaaccccagatgaactatgacaaattaagccgagccctgcggtattattataacaaacgcatcttacacaaaaccaaaggcaaaaggttcacatataaatttaactttaacaagctcgttatgcccaactatccctttatcaatatccggtcctcaggggtcgtaccccagtcagcccctcctgtgccaacagcttcttccaggttccacttcccccctttggacacacactctcccacaaatgatgtccagcccggtagatttagcgcttcatcgctcacggcctctggtcaggagtcctctaatggaacagaccgcaaaactgagctctctgaattggaggacgggtcggccgctgattggaggaggggagttgaccccgtttcctcacgcaacgcaattggcggtggtggcatcggacaccagaagcggaagcctgacatcatgctgccgttattcgcacggccaggcatgtaccccgacccccattctccattcgccgtctctccaatacctggtcgcggtggcgtcttgaacgtgccaatttctccagcactgagcctgactccgactattttctcatattctccatcgccgggactgtctcccttcacttcatcatcttgcttcagcttcaatcctgaggagatgaagcactacttgcattctcaggcatgttctgtctttaactaccaccttagcccaaggacattccccaggtatccgggtttaatggtgcctcctctgcagtgtcaaatgcatccagaagagagcacgcagttctccataaagttgcagccccctccagttgggcgaaagaatagagagcgagtggagtcttccgaggagtccgcaccggtgaccaccccgaccatggcatctatccctccaaggataaaggtggagccagcctcggagaaggatccagagtctctgagacagagcgcgagggagaaagaggaacacacacaagaggagggaactgtgccatcccgtaccatcgaggaagaaaaggggactattttcgcaagacctgctgctccgcctatttggccgagcgtgccaatctcaactccatccggtgaacccttggaagtgactgaggactcagaggaccgtcctggaaaggaaccatccgcccctgagaaaaaggaggatgccttgatgccacctaagctgcgcttgaagcgaagatggaacgatgaccctgaggccagagagctgagcaagtcaggaaagtttctttggaacgggagcggccctcaaggactagccaccgccgctgccgacgcgtag

SEQ ID NO: 285837 - DNA, 1539 bp, Artificial Sequence
  derived and/or modified sequence
atgaaggccggctgcagcatcgtggagaagcccgagggcggcggcggctaccagttccccgactgggcctacaagaccgagagcagccccggcagcagacagatccagctgtggcacttcatcctggagctgctgcagaaggaggagttcagacacgtgatcgcctggcagcagggcgagtacggcgagttcgtgatcaaggaccccgacgaggtggccagactgtggggcagaagaaagtgcaagccccagatgaactacgacaagctgagcagagccctgagatactactacaacaagagaatcctgcacaagaccaagggcaagagattcacctacaagttcaacttcaacaagctggtgatgcccaactaccccttcatcaacatcagaagcagcggcgtggtgccccagagcgccccccccgtgcccaccgccagcagcagattccacttcccccccctggacacccacagccccaccaacgacgtgcagcccggcagattcagcgccagcagcctgaccgccagcggccaggagagcagcaacggcaccgacagaaagaccgagctgagcgagctggaggacggcagcgccgccgactggagaagaggcgtggaccccgtgagcagcagaaacgccatcggcggcggcggcatcggccaccagaagagaaagcccgacatcatgctgcccctgttcgccagacccggcatgtaccccgacccccacagccccttcgccgtgagccccatccccggcagaggcggcgtgctgaacgtgcccatcagccccgccctgagcctgacccccaccatcttcagctacagccccagccccggcctgagccccttcaccagcagcagctgcttcagcttcaaccccgaggagatgaagcactacctgcacagccaggcctgcagcgtgttcaactaccacctgagccccagaaccttccccagataccccggcctgatggtgccccccctgcagtgccagatgcaccccgaggagagcacccagttcagcatcaagctgcagcccccccccgtgggcagaaagaacagagagagagtggagagcagcgaggagagcgcccccgtgaccacccccaccatggccagcatcccccccagaatcaaggtggagcccgccagcgagaaggaccccgagagcctgagacagagcgccagagagaaggaggagcacacccaggaggagggcaccgtgcccagcagaaccatcgaggaggagaagggcaccatcttcgccagacccgccgccccccccatctggcccagcgtgcccatcagcacccccagcggcgagcccctggaggtgaccgaggacagcgaggacagacccggcaaggagcccagcgcccccgagaagaaggaggacgccctgatgccccccaagctgagactgaagagaagatggaacgacgaccccgaggccagagagctgagcaagagcggcaagttcctgtggaacggcagcggcccccagggcctggccaccgccgccgccgacgcctag

SEQ ID NO: 285838 - DNA, 5254 bp, Artificial Sequence
  derived and/or modified sequence
ccggagacgccgcggaggagaccggaccgaagacggaccgtgccgggaagagcaggcgggtgaaaatgaaagccggctgtagcatcgtggaaaagccagaaggaggtggagggtatcagtttcctgactgggcctacaaaacagagtcatccccaggctcccggcagatccagctgtggcacttcatcctggagctgctgcagaaggaagagttccgccatgtcatcgcctggcagcagggagagtacggggaatttgtcatcaaggatccagatgaggtggcccgcctctggggccgcaggaaatgcaaaccacagatgaattatgacaagctgagccgggccctcagatactattacaacaagaggatccttcataaaacaaaagggaaaagatttacctataaatttaacttcaacaagctggtgatgcccaactacccattcatcaacattcggtcaagtggtgtggttcctcagagtgcaccaccagtgccaacagcctcttcccggttccatttcccacctctggacacccattctccaaccaatgatgtgcagccgggacggttctctgctagctccctaactgcttctggccaggagtccagtaatggtactgatagaaagactgagctttcagagctggaggatggctcagctgctgactggcgccggggtgtggatcccgtgtcctccaggaatgccattggtggaggagggattggccatcagaaacgcaagcctgacataatgcttcctctgtttgctaggccagggatgtaccctgacccccacagtcccttcgctgtctctccaatccctggccgcggaggtgtccttaatgtccccatttcaccagccctctccctgactcccaccatcttctcctatagcccatcaccaggcctgagccctttcaccagcagcagctgcttctccttcaaccctgaggaaatgaaacactaccttcattctcaagcttgttctgtgttcaactaccatctgagtcctcggacttttccccgttacccagggctcatggttccaccactgcagtgccaaatgcatcctgaggagtcaactcagttctccatcaagctgcagcccccaccagttgggcggaagaaccgggagagggttgagagcagcgaggagtcagcaccagtcaccacgcccaccatggcttctattcccccaagaatcaaggtggaacctgcctctgaaaaggatcctgagagcctcaggcagtcggcacgagagaaggaggagcacactcaagaagagggcactgtgccaagcaggaccattgaagaggaaaaaggcaccatctttgcccgtcctgctgcaccacccatctggccctctgtgcccattagcaccccaagtggagaacctctggaggtgactgaagacagtgaggataggcctggcaaagagcccagtgcacctgagaagaaagaagatgcactgatgccccccaagcttcggttgaagcggcgctggaatgatgaccctgaagcccgagagctgagcaagagtggcaagtttctctggaatgggtcaggaccccagggcttggcaacagcagctgctgatgcttagaactggaagtggattaggagctgtttatactataatcaaatacatacatgtatttatgtagcaagatttcagggtgggggggagggagttaaactggtttgatcattctaggggcatagacttgtatttttatgttttggggatgggatggggttatcttctgttgtaaattaggtgggatatgaacacacttattttcctggtgagtaggacacagggagggtattgaactcaaaggagaaggagcctctatttcctgttgaggcttatactttctgacaaggaaactcccaaagggccaagatactttttggtcccatgatagtcaggttccagacttctttcttttctattgtatttgtatgtggaaagccattaatgaatttattttactccaagagatacacataaaagggaaaagggcatggttgggaggttgagcagtaagagaccattaatactaagtattttgcctgaaatgcttctttataattatttcagggaaggaataagataatctcagacttactggggtggggcttggggaatgtttggatgttgctctttttcttcttccttcttttttttttttttttttttttggttggtgttgtttggcatttttttcttttcctttttaaagaaaatgttttcaggaaacatgaacaaacatactgccaattatagtggggctgggaaggcacaggagctggcgacctctcagctgcatagttgggacggcaaaccctgctgtgagcttctcagacttttcacctacttcacctattaagaagccatgaggagttgtaaactcttgttcagggaagaaaagagggcaggaggaagtaacccaatgcctttaaatacaaaacagatgaaaaacaaaatactcatttttccttttctattgtgggtttggggagccaaaccaagtgtgactgtgagcacgttcactgagaggcatgacaacattattgaagaggtctttccattatgtctggttctcttattttcttaagtcaagccttaactatgaacatactttaagatgatacgggtctgtcaccataaacctgtaaaagggcatcgacagcttttcagataatccaggaatgttgagacatggctaagtttctagctgatacttagtcattccctcttgatattgttgggatgggtagccaaaaggcaggcttgtgggagttaagagccaatgatacctggaaacatgggaggtagctgggggtacaagtggatgttgagactgaaggaagaggtggaaagaagacacagaaggcacccagatgccaaaaggcctggcatgaatgagagttggcatctgtcctgttgtggtgttcccattcttgccatacccatttgcccagattgttctgattctcatgttcaattgactatcccacatgagactacagtttataggcagtgaggaattgtttcttcctgggaaatgtccttccagcaacttcagaggaatgggaaagtgttaatcttacgtgaagcaaaggagcctggactaggggcagagagaaagaagcagcagcccaccttctttgtgtttgcacatgtgcctatgtcgtgtacattggtacctgactgtggctcagatctgcgtcgcagcagcgagagaagaaatcactccatatccgatgagaggaagggtggcacagagatggtgtctacaattagagacatttctgactccaccttagcctaagcaaactttatatactgagtaacatttgaaggttgtcttttaatggtggggggtgttttttcctttttaaactacagtgcttgcacaagagagggagggactcagaaaaggttagggcaggtgagggagacagtagatggcctgggatgacttgagtccatcatactattgcttggcaggtgtcctcccccatgtttgattcaaattccatgagtgacctacctttccccaggaatgggactgagagggtagtctccagcaactcagtctgcacagggctccccgttcaggctgcctttggtggttgtgcttttgtaagtttctttctctgcacttcgacttacctctgaatcagaaagcaagcccagcaggtgaatgagggatgtctgcttggcattgcccaatctaaccagggaggctggctggccacccactgtccgctagaggggagagctagcaggtgttggtatgaactcaggaatagaaacacgaggcctttttaaatacgagggagaagaatccatgatgcatacctgtaaccccctagaacccaagtgccagaattcctagatgctgcttctgtttgaacaaaatgtcactgcttttacacttgaaaaaaacacactcgaaaaatgttcaactccatgaaaaatattttttggctttaagaaattgtttggtgtttaactgtttcctttgattgccattccaccagtaaattgttggttgatttgcactgcactctggggttggggttgggaggggagggtccttatacagagccgaacctggggttgctcaggaagtgggccagggaatgtggaagtcgttgacattgcctgggccaaaagagtgggagatagtttttctcccctcagcccactcctggtagcacctgtcgccagcctggtacaaagccaggcctttttcttctgtgagcatctcatcactgtccagcagcaggtggaaaaagggggacaacaaccagacctattttttctcccccattttttccaaattttgctgtgccaaatgtttaaaattttataaatatgaatctattgaaatttccttaatcaagagcttcttcgtgtaaagtttgcttttttagctatagaaaaagaaaacagtaaatatctcttaatggcatccagccttgctgagctcaccttttttcctgaagaatgggtaggagtgaaatatttaatgtaaacatttcaccaagtccctttaccctaattttgaagctgcattaaacccaactcactaacacagggaatgattgcaccctagtcctctgtgggccaagaaactttcagaagcattaaaaaaatagttgaagtatatcacttctcaccaagtgggtagagtcagttggctgtttgtcccttgttttttatttattccataattatgtttgtgctttttgttttgtaaacagtaatggaacgtacatttttattttgtttagaagacaactttgattcaatctttcaagaactgttccattcttggtttcttcttagggggataaaaagttaccagttaatttgttttgagatatttaagcattctttgagttatagaattgtgatgcagggatttgtgaatgagacatttacatgtgaaaggtgacttcactagttacctgcttgagcagagtaaagtgtgtatatgtacataaaatgtaagtaatcttaactccattgtgcagtgccttttagatgttccgctttctataaagtcttcaaatttttgcatatatattatatatatatgatgtaatgttatagaaatatatgtataatatacatattttttccaggggtatctgatagctctgtattttgttatggaagttgaaagaaaaaagtattttacctcagaaattaaataaaaaaatacttttaagtaa

SEQ ID NO: 285839 - protein, 151 aa, Artificial Sequence
  derived and/or modified sequence
RARIYSPVRSPSARFERLPPRSEDIYADPAAYVMRRSISSPKYDYLGDRRPVPAGLFPYNYPPSPTVHDKMDELLDLQLQRNLEYLDQQMSESETLISMVNRMVENSSPRSQLFMQVPPYPEVFRDSLHTYKLNEQDTDKLLGKLCEQNKV

SEQ ID NO: 285840 - protein, 104 aa, Artificial Sequence
  derived and/or modified sequence
RARIYSPVRSPSARFERLPPRSEDIYADPAAYVMRRSISSPKMSESETLISMVNRMVENSSPRSQLFMQVPPYPEVFRDSLHTYKLNEQDTDKLLGKLCEQNKV

SEQ ID NO: 285841 - protein, 133 aa, Artificial Sequence
  derived and/or modified sequence
RARIYSPVRSPSARFERLPPRSEDIYADPAAYVMRRSISSPKYDYLGDRRPVPAGLFPYNYPPSPTVHDKMMSESETLISMVNRMVENSSPRSQLFMQVPPYPEVFRDSLHTYKLNEQDTDKLLGKLCEQNKV

SEQ ID NO: 285842 - DNA, 315 bp, Artificial Sequence
  derived and/or modified sequence
agagccagaatctacagccccgtgagaagccccagcgccagattcgagagactgccccccagaagcgaggacatctacgccgaccccgccgcctacgtgatgagaagaagcatcagcagccccaagatgagcgagagcgagaccctgatcagcatggtgaacagaatggtggagaacagcagccccagaagccagctgttcatgcaggtgcccccctaccccgaggtgttcagagacagcctgcacacctacaagctgaacgagcaggacaccgacaagctgctgggcaagctgtgcgagcagaacaaggtgtag

SEQ ID NO: 285843 - DNA, 402 bp, Artificial Sequence
  derived and/or modified sequence
agagccagaatctacagccccgtgagaagccccagcgccagattcgagagactgccccccagaagcgaggacatctacgccgaccccgccgcctacgtgatgagaagaagcatcagcagccccaagtacgactacctgggcgacagaagacccgtgcccgccggcctgttcccctacaactacccccccagccccaccgtgcacgacaagatgatgagcgagagcgagaccctgatcagcatggtgaacagaatggtggagaacagcagccccagaagccagctgttcatgcaggtgcccccctaccccgaggtgttcagagacagcctgcacacctacaagctgaacgagcaggacaccgacaagctgctgggcaagctgtgcgagcagaacaaggtgtag

SEQ ID NO: 285844 - DNA, 315 bp, Artificial Sequence
  derived and/or modified sequence
agggcccgaatctactccccagtacgctccccttcagcacggtttgaacgcctgcccccaaggtctgaagatatttacgccgaccctgcggcatacgtcatgaggaggtccatttcgagccccaagatgtccgagagtgaaacactaattagcatggtgaaccgaatggtggagaacagctcccccagatcacaactgttcatgcaggttcctccctatcctgaagtctttagggacagcctccatacctataagctgaacgagcaggatacagacaaacttcttggtaagctgtgcgagcagaataaggtttag

SEQ ID NO: 285845 - DNA, 402 bp, Artificial Sequence
  derived and/or modified sequence
agggctaggatttattcaccagtgcgctccccatccgcccggtttgaacgcctgccgccccggagtgaagacatttacgccgatccggctgcctacgtgatgcggcgaagtatcagtagcccaaaatatgattacctgggtgatagaagacccgtcccagcaggtttgtttccttacaactatccccccagtccaacagttcacgataaaatgatgtcagagagcgaaactctaatttcgatggtcaatcgtatggtggaaaacagcagtcctaggtcccagctattcatgcaggtgcccccatatcctgaggtgtttcgtgattccctacatacatacaagctcaacgagcaggacacagacaagctcctaggaaagctgtgcgaacaaaacaaagtgtag

SEQ ID NO: 285846 - DNA, 315 bp, Artificial Sequence
  derived and/or modified sequence
cgggcccgcatctacagccctgtgcgcagccccagcgccaggtttgagcggctgcccccaagaagtgaggacatctatgctgaccctgctgcctacgtgatgagaagaagcatcagcagccccaagatgtctgagagcgagaccctcatctccatggtgaacaggatggtggagaacagcagccccaggagccagctgttcatgcaggtgcccccctacccagaggtgttccgggacagcctgcacacctacaagctgaatgagcaggacacagacaagctgctgggcaagctgtgtgagcagaacaaggtgtag

SEQ ID NO: 285847 - DNA, 402 bp, Artificial Sequence
  derived and/or modified sequence
cgggcccgcatctacagccctgtgcgcagccccagcgccaggtttgagcggctgcccccaagaagtgaggacatctatgctgaccctgctgcctacgtgatgagaagaagcatcagcagccccaagtatgactacctgggggacagaagacctgtgcctgctggcctcttcccctacaactacccacccagccccaccgtgcatgacaagatgatgtctgagagcgagaccctcatctccatggtgaacaggatggtggagaacagcagccccaggagccagctgttcatgcaggtgcccccctacccagaggtgttccgggacagcctgcacacctacaagctgaatgagcaggacacagacaagctgctgggcaagctgtgtgagcagaacaaggtgtag

SEQ ID NO: 285848 - DNA, 315 bp, Artificial Sequence
  derived and/or modified sequence
cgggcccggatctacagccccgtgcggagccccagcgcccggttcgaacgcctacccccccggagcgaggacatttacgccgatcctgcagcttacgttatgcgccgctccatctcttcccccaagatgtccgagagcgaaacacttatctccatggttaatagaatggttgaaaactcatcccctagatctcagttatttatgcaagtccctccctatccagaagtgtttagagactccttgcacacctataagctgaacgagcaggatacagataaactcctgggtaagctgtgtgagcaaaacaaggtgtag

SEQ ID NO: 285849 - DNA, 402 bp, Artificial Sequence
  derived and/or modified sequence
cgggcccggatctacagccccgtgcggagccccagcgcccggttcgaaagactcccccccaggtctgaggacatttatgccgatccagccgcgtacgttatgagacggagcatttccagtcctaagtatgactatcttggagatagacgccccgtgccagccggcctatttccttataactaccccccaagtcctaccgtgcatgataagatgatgtctgagtcagagaccctaatcagtatggtcaatagaatggtcgagaattcttcccccagaagtcagctgttcatgcaagtacccccctacccagaggtgtttagggatagcctacacacctacaagctcaatgagcaggacacagataagctcctcggcaagctttgtgaacagaacaaggtgtag

SEQ ID NO: 285850 - DNA, 313 bp, Artificial Sequence
  derived and/or modified sequence
ccgtgcccgcatttactcccctgtccgctcacccagtgcccgttttgagcggctgccacctcgcagtgaggacatctatgctgaccctgctgcctatgtgatgaggcgatccatcagctcccccaagatgagtgagagcgagactctcatcagtatggtgaaccgcatggtggaaaactcctcccccaggtcccaactcttcatgcaagtccctccatacccagaagtgttccgggacagcctccacacctacaagttaaacgagcaagacacagataagctgctgggaaaattgtgtgagcagaacaaggtg

SEQ ID NO: 285851 - DNA, 400 bp, Artificial Sequence
  derived and/or modified sequence
ccgtgcccgcatttactcccctgtccgctcacccagtgcccgttttgagcggctgccacctcgcagtgaggacatctatgctgaccctgctgcctatgtgatgaggcgatccatcagctcccccaagtatgattacctgggagacaggcggccagtccctgcaggactgttcccctacaactacccaccatcccccacggtccacgataagatgatgagtgagagcgagactctcatcagtatggtgaaccgcatggtggaaaactcctcccccaggtcccaactcttcatgcaagtccctccatacccagaagtgttccgggacagcctccacacctacaagttaaacgagcaagacacagataagctgctgggaaaattgtgtgagcagaacaaggtg

SEQ ID NO: 285852 - DNA, 315 bp, Artificial Sequence
  derived and/or modified sequence
cgggctagaatttactctcccgtgcgctctccttctgcaagatttgaacggctgccacctcgatctgaggacatctacgctgaccccgctgcctacgttatgcgaaggtcaatttccagtcctaagatgagcgagtcggaaaccctcatctcaatggtcaaccggatggtcgagaatagtagcccaagatctcagctgtttatgcaggtgcctccgtatcctgaagtgttccgggactctcttcatacttacaaattgaatgaacaagataccgataaactgttaggcaagctgtgtgagcaaaataaagtgtag

SEQ ID NO: 285853 - DNA, 402 bp, Artificial Sequence
  derived and/or modified sequence
cgtgccaggatttattcccctgtccgctccccatcagccagatttgaacggcttccaccacgttcagaggatatctacgcagaccctgcagcctatgttatgaggcgctctatcagctcaccaaagtatgactatttgggggatcgcagacctgtaccggctgggttatttccttataattaccccccttcacctaccgtgcacgacaagatgatgtctgaaagtgaaaccctcatcagtatggtcaataggatggttgaaaacagctctccacggagtcaactttttatgcaggtgcccccttaccctgaggtgtttcgcgatagcctgcatacctataagctgaatgaacaggataccgacaagctgctcggcaagctgtgtgagcaaaacaaagtatag

SEQ ID NO: 285854 - protein, 106 aa, Artificial Sequence
  derived and/or modified sequence
RARIYSPVRSPSARFERLPPRSEDIYADPAAYVMRRSISSPKYDYLGDRRPVPAGLFPYNYPPSPTVHDKMVPPYPEVFRDSLHTYKLNEQDTDKLLGKLCEQNKV

SEQ ID NO: 285855 - DNA, 321 bp, Artificial Sequence
  derived and/or modified sequence
agagccagaatctacagccccgtgagaagccccagcgccagattcgagagactgccccccagaagcgaggacatctacgccgaccccgccgcctacgtgatgagaagaagcatcagcagccccaagtacgactacctgggcgacagaagacccgtgcccgccggcctgttcccctacaactacccccccagccccaccgtgcacgacaagatggtgcccccctaccccgaggtgttcagagacagcctgcacacctacaagctgaacgagcaggacaccgacaagctgctgggcaagctgtgcgagcagaacaaggtgtag

SEQ ID NO: 285856 - DNA, 321 bp, Artificial Sequence
  derived and/or modified sequence
agagctcggatctattcccctgtacggtctccctcagctaggttcgagagactgcctcccaggtccgaggacatttatgccgaccccgctgcctatgtgatgcgtagatccattagcagtccgaagtatgattatctaggagatcggcggccagtgcccgccgggctctttccttacaattaccctccctcacctaccgtacacgacaagatggttccaccctacccagaggtgttcagggatagcctgcatacatacaaactcaatgagcaggacacagataaacttttgggcaagttatgtgagcagaacaaggtgtag

SEQ ID NO: 285857 - DNA, 321 bp, Artificial Sequence
  derived and/or modified sequence
cgggcccgcatctacagccctgtgcgcagccccagcgccaggtttgagcggctgcccccaagaagtgaggacatctatgctgaccctgctgcctacgtgatgagaagaagcatcagcagccccaagtatgactacctgggggacagaagacctgtgcctgctggcctcttcccctacaactacccacccagccccaccgtgcatgacaagatggtgcccccctacccagaggtgttccgggacagcctgcacacctacaagctgaatgagcaggacacagacaagctgctgggcaagctgtgtgagcagaacaaggtgtag

SEQ ID NO: 285858 - DNA, 321 bp, Artificial Sequence
  derived and/or modified sequence
cgggcccggatctacagccccgtgcggagccccagcgcccggttcgaaagactgcctccgcggtccgaagatatctacgcggatcccgctgcttacgttatgcggaggtctattagtagtccgaaatacgattatttgggcgataggaggcccgtccccgccggtcttttcccctacaattaccccccaagcccaactgttcacgacaaaatggtgccaccataccctgaagtgttcagggactccttgcatacttacaagttaaatgaacaggataccgataagctacttggaaagctgtgcgagcagaacaaggtatag

SEQ ID NO: 285859 - DNA, 319 bp, Artificial Sequence
  derived and/or modified sequence
ccgtgcccgcatttactcccctgtccgctcacccagtgcccgttttgagcggctgccacctcgcagtgaggacatctatgctgaccctgctgcctatgtgatgaggcgatccatcagctcccccaagtatgattacctgggagacaggcggccagtccctgcaggactgttcccctacaactacccaccatcccccacggtccacgataagatggtccctccatacccagaagtgttccgggacagcctccacacctacaagttaaacgagcaagacacagataagctgctgggaaaattgtgtgagcagaacaaggtg

SEQ ID NO: 285860 - DNA, 321 bp, Artificial Sequence
  derived and/or modified sequence
cgagcaagaatctatagccctgttagaagcccaagtgctaggttcgagcgcctgccaccacgttccgaggacatttacgctgaccctgctgcatacgtaatgaggcgatcaataagcagtcccaagtacgactaccttggggaccgcaggcctgttcccgctggtctctttccctacaactatccccctagccctaccgtgcatgataagatggtgcccccatatcctgaggttttccgcgacagtttacacacatataagttgaatgaacaggatacagacaaactcctggggaagctgtgcgagcagaacaaggtgtag

SEQ ID NO: 285861 - protein, 83 aa, Artificial Sequence
  derived and/or modified sequence
RARIYSPVRSPSARFERLPPRSEDIYADPAAYVMRRSISSPKYDYLGDRRPVPAGLFPYNYPPSPTVHDKMKLLGKLCEQNKV

SEQ ID NO: 285862 - DNA, 252 bp, Artificial Sequence
  derived and/or modified sequence
agagccagaatctacagccccgtgagaagccccagcgccagattcgagagactgccccccagaagcgaggacatctacgccgaccccgccgcctacgtgatgagaagaagcatcagcagccccaagtacgactacctgggcgacagaagacccgtgcccgccggcctgttcccctacaactacccccccagccccaccgtgcacgacaagatgaagctgctgggcaagctgtgcgagcagaacaaggtgtag

SEQ ID NO: 285863 - DNA, 252 bp, Artificial Sequence
  derived and/or modified sequence
cgcgcaagaatctactcccctgttagatctccttcagctcggttcgagagactgcctccacggtccgaagacatttatgccgaccccgccgcctatgtaatgaggagaagcatctcttctcccaagtatgattacctgggtgacaggcgacccgttcctgccggcctgttcccctacaattaccctcctagtccaactgtgcacgataaaatgaagctgttgggaaagctctgtgagcaaaataaagtgtag

SEQ ID NO: 285864 - DNA, 252 bp, Artificial Sequence
  derived and/or modified sequence
cgggcccgcatctacagccctgtgcgcagccccagcgccaggtttgagcggctgcccccaagaagtgaggacatctatgctgaccctgctgcctacgtgatgagaagaagcatcagcagccccaagtatgactacctgggggacagaagacctgtgcctgctggcctcttcccctacaactacccacccagccccaccgtgcatgacaagatgaagctgctgggcaagctgtgtgagcagaacaaggtgtag

SEQ ID NO: 285865 - DNA, 252 bp, Artificial Sequence
  derived and/or modified sequence
cgggcccggatctacagccccgtgcggagccccagcgcccggttcgagagactccctccacggtcagaggatatctacgccgatcccgctgcctacgtgatgcgccgatccatatctagccccaagtatgactacctgggtgaccgacgccccgtgccggcaggcctctttccctacaattatcccccatccccaaccgttcatgacaaaatgaaattgctcggtaagctctgcgagcagaacaaggtgtag

SEQ ID NO: 285866 - DNA, 250 bp, Artificial Sequence
  derived and/or modified sequence
ccgtgcccgcatttactcccctgtccgctcacccagtgcccgttttgagcggctgccacctcgcagtgaggacatctatgctgaccctgctgcctatgtgatgaggcgatccatcagctcccccaagtatgattacctgggagacaggcggccagtccctgcaggactgttcccctacaactacccaccatcccccacggtccacgataagatgaagctgctgggaaaattgtgtgagcagaacaaggtg

SEQ ID NO: 285867 - DNA, 252 bp, Artificial Sequence
  derived and/or modified sequence
cgggcacgtatctactctccggtgaggtctcccagtgctaggtttgaacggctgccgccacggagcgaagatatttacgccgatcctgcggcttacgtcatgcgtcggtccatatcctcacctaagtatgactacctgggagaccgcaggcctgtgccagctggcttgtttccctacaactatcccccaagcccaactgttcacgataaaatgaaactgcttggaaagctttgtgagcagaataaagtgtag

SEQ ID NO: 285868 - protein, 2653 aa, Artificial Sequence
  derived and/or modified sequence
VPNQMFQQYPRMTYPPLHGPMRFPPSLSETNKGLRGRGPPPSWASEPERPSILSASELKELDKFDNLDAEADEGWAGAQMEVDYTEQLNFSDDDEQGSNSPKENNSEDQGSKASENNENKKETDEVSNTKSSSQIPAQPSVAKVPYGKGPSFNQERGTSSHLPPPPKLLAQQHPPPDRQAVPGRPGPFPSKQQVADEDEIWKQRRRQQSEISAAVERARKRREEEERRMEEQRKAACAEKLKRLDEKLGILEKQPSPEEIREREREKEREREKELEKEQEQEREKEREKDRERQQEKEKELEKEQEKQREMEKERKQEKEKELERQKEKEKELQKMKEQEKECELEKEREKLEEKIEPREPNLEPMVEKQESENSCNKAEEEPVFTRQDSNRSEKEATPVVHETEPESGSQPRPAVLSGYFKQFQKSLPPRFQRQQEQMKQQQWQQQQQQGVLPQTVPSQPSSSTVPPPPHRPLYQPMQPHPQHLASMGFDPRWLMMQSYMDPRMMSGRPAMDIPPIHPGMIPPKPLMRRDQMEGSPNSSESFEHIARSARDHAISLSEPRMLWGSDPYPHAEPQQATTPKATEEPEDVRSEAALDQEQITAAYSVEHNQLEAHPKADFIRESSEAQVQKFLSRSVEDVRPHHTDANNQSACFEAPDQKTLSAPQEERISAVESQPSRKRSVSHGSNHTQKPDEQRSEPSAGIPKVTSRCIDSKEPIERPEEKPKKEGFIRSSEGPKPEKVYKSKSETRWGPRPSSNRREEVNDRPVRRSGPIKKPVLRDMKEEREQRKEKEGEKAEKVTEKVVVKPEKTEKKDLPPPPPPPQPPAPIQPQSVPPPIQPEAEKFPSTETATLAQKPSQDTEKPLEPVSTVQVEPAVKTVNQQTMAAPVVKEEKQPEKVISKDLVIERPRPDSRPAVKKESTLPPRTYWKEARERDWFPDQGYRGRGRGEYYSRGRSYRGSYGGRGRGGRGHTRDYPQYRDNKPRAEHIPSGPLRQREESETRSESSDFEVVPKRRRQRGSETDTDSEIHESASDKDSLSKGKLPKREERPENKKPVKPHSSFKPDNHVRIDNRLLEKPYVRDDDKAKPGFLPKGEPTRRGRGGTFRRGGRDPGGRPSRPSTLRRPAYRDNQWNPRQSEVPKPEDGEPPRRHEQFIPIAADKRPPKFERKFDPARERPRRQRPTRPPRQDKPPRFRRLREREAASKSNEVVAVPTNGTVNNVAQEPVNTLGDISGNKTPDLSNQNSSDQANEEWETASESSDFNERRERDEKKNADLNAQTVVKVGENVLPPKREIAKRSFSSQRPVDRQNRRGNNGPPKSGRNFSGPRNERRSGPPSKSGKRGPFDDQPAGTTGVDLINGSSAHHQEGVPNGTGQKNSKDSTGKKREDPKPGPKKPKEKVDALSQFDLNNYASVVIIDDHPEVTVIEDPQSNLNDDGFTEVVSKKQQKRLQDEERRKKEEQVIQVWNKKNANEKGRSQTSKLPPRFAKKQATGIQQAQSSASVPPLASAPLPPSTSASVPASTSAPLPATLTPVPASTSAPVPASTLAPVLASTSAPVPASPLAPVSASASVSASVPASTSAAAITSSSAPASAPAPTPILASVSTPASVTILASASIPILASALASTSAPTPAPAASSPAAPVITAPTIPASAPTASVPLAPASASAPAPAPTPVSAPNPAPPAPAQTQAQTHKPVQNPLQTTSQSSKQPPPSIRLPSAQTPNGTDYVASGKSIQTPQSHGTLTAELWDNKVAPPAVLNDISKKLGPISPPQPPSVSAWNKPLTSFGSAPSSEGAKNGQESGLEIGTDTIQFGAPASNGNENEVVPVLSEKSADKIPEPKEQRQKQPRAGPIKAQKLPDLSPVENKEHKPGPIGKERSLKNRKVKDAQQVEPEGQEKPSPATVRSTDPVTTKETKAVSEMSTEIGTMISVSSAEYGTNAKESVTDYTTPSSSLPNTVATNNTKMEDTLVNNVPLPNTLPLPKRETIQQSSSLTSVPPTTFSLTFKMESARKAWENSPNVREKGSPVTSTAPPIATGVSSSASGPSTANYNSFSSASMPQIPVASVTPTASLSGAGTYTTSSLSTKSTTTSDPPNICKVKPQQLQTSSLPSASHFSQLSCMPSLIAQQQQNPQVYVSQSAAAQIPAFYMDTSHLFNTQHARLAPPSLAQQQGFQPGLSQPTSVQQIPIPIYAPLQGQHQAQLSLGAGPAVSQAQELFSSSLQPYRSQPAFMQSSLSQPSVVLSGTAIHNFPTVQHQELAKAQSGLAFQQTSNTQPIPILYEHQLGQASGLGGSQLIDTHLLQARANLTQASNLYSGQVQQPGQTNFYNTAQSPSALQQVTVPLPASQLSLPNFGSTGQPLIALPQTLQPPLQHTTPQAQAQSLSRPAQVSQPFRGLIPAGTQHSMIATTGKMSEMELKAFGSGIDIKPGTPPIAGRSTTPTSSPFRATSTSPNSQSSKMNSIVYQKQFQSAPATVRMTQPFPTQFAPQILSQPNLVPPLVRAPHTNTFPAPVQRPPMALASQMPPPLTTGLMSHARLPHVARGPCGSLSGVRGNQAQAALKAEQDMKAKQRAEVLQSTQRFFSEQQQSKQIGGGKAQKVDSDSSKPPETLTDPPGVCQEKVEEKPPPAPSIATKPVRTGPIKPQAIKTEETKS

SEQ ID NO: 285869 - protein, 2850 aa, Artificial Sequence
  derived and/or modified sequence
MSEKSGQSTKAKDGKKYATLSLFNTYKGKSLETQKTTARHGLQSLGKVGISRRMPPPANLPSLKAENKGNDPNVNIVPKDGTGWASKQEQHEEEKTPEVPPAQPKPGVAAPPEVAPAPKSWASNKQGGQGDGIQVNSQFQQEFPSLQAAGDQEKKEKETNDDNYGPGPSLRPPNVACWRDGGKAAGSPSSSDQDEKLPGQDESTAGTSEQNDILKVVEKRIACGPPQAKLNGQQAALASQYRAMMPPYMFQQYPRMTYPPLHGPMRFPPSLSETNKGLRGRGPPPSWASEPERPSILSASELKELDKFDNLDAEADEGWAGAQMEVDYTEQLNFSDDDEQGSNSPKENNSEDQGSKASENNENKKETDEVSNTKSSSQIPAQPSVAKVPYGKGPSFNQERGTSSHLPPPPKLLAQQHPPPDRQAVPGRPGPFPSKQQVADEDEIWKQRRRQQSEISAAVERARKRREEEERRMEEQRKAACAEKLKRLDEKLGILEKQPSPEEIREREREKEREREKELEKEQEQEREKEREKDRERQQEKEKELEKEQEKQREMEKERKQEKEKELERQKEKEKELQKMKEQEKECELEKEREKLEEKIEPREPNLEPMVEKQESENSCNKAEEEPVFTRQDSNRSEKEATPVVHETEPESGSQPRPAVLSGYFKQFQKSLPPRFQRQQEQMKQQQWQQQQQQGVLPQTVPSQPSSSTVPPPPHRPLYQPMQPHPQHLASMGFDPRWLMMQSYMDPRMMSGRPAMDIPPIHPGMIPPKPLMRRDQMEGSPNSSESFEHIARSARDHAISLSEPRMLWGSDPYPHAEPQQATTPKATEEPEDVRSEAALDQEQITAAYSVEHNQLEAHPKADFIRESSEAQVQKFLSRSVEDVRPHHTDANNQSACFEAPDQKTLSAPQEERISAVESQPSRKRSVSHGSNHTQKPDEQRSEPSAGIPKVTSRCIDSKEPIERPEEKPKKEGFIRSSEGPKPEKVYKSKSETRWGPRPSSNRREEVNDRPVRRSGPIKKPVLRDMKEEREQRKEKEGEKAEKVTEKVVVKPEKTEKKDLPPPPPPPQPPAPIQPQSVPPPIQPEAEKFPSTETATLAQKPSQDTEKPLEPVSTVQVEPAVKTVNQQTMAAPVVKEEKQPEKVISKDLVIERPRPDSRPAVKKESTLPPRTYWKEARERDWFPDQGYRGRGRGEYYSRGRSYRGSYGGRGRGGRGHTRDYPQYRDNKPRAEHIPSGPLRQREESETRSESSDFEVVPKRRRQRGSETDTDSEIHESASDKDSLSKGKLPKREERPENKKPVKPHSSFKPDNHVRIDNRLLEKPYVRDDDKAKPGFLPKGEPTRRGRGGTFRRGGRDPGGRPSRPSTLRRPAYRDNQWNPRQSEVPKPEDGEPPRRHEQFIPIAADKRPPKFERKFDPARERPRRQRPTRPPRQDKPPRFRRLREREAASKSNEVVAVPTNGTVNNVAQEPVNTLGDISGNKTPDLSNQNSSDQANEEWETASESSDFNERRERDEKKNADLNAQTVVKVGENVLPPKREIAKRSFSSQRPVDRQNRRGNNGPPKSGRNFSGPRNERRSGPPSKSGKRGPFDDQPAGTTGVDLINGSSAHHQEGVPNGTGQKNSKDSTGKKREDPKPGPKKPKEKVDALSQFDLNNYASVVIIDDHPEVTVIEDPQSNLNDDGFTEVVSKKQQKRLQDEERRKKEEQVIQVWNKKNANEKGRSQTSKLPPRFAKKQATGIQQAQSSASVPPLASAPLPPSTLAPVSASASVSASVPASTSAAAITSSSAPASAPAPTPILASVSTPASVTILASASIPILASALASTSAPTPAPAASSPAAPVITAPTIPASAPTASVPLAPASASAPAPAPTPVSAPNPAPPAPAQTQAQTHKPVQNPLQTTSQSSKQPPPSIRLPSAQTPNGTDYVASGKSIQTPQSHGTLTAELWDNKVAPPAVLNDISKKLGPISPPQPPSVSAWNKPLTSFGSAPSSEGAKNGQESGLEIGTDTIQFGAPASNGNENEVVPVLSEKSADKIPEPKEQRQKQPRAGPIKAQKLPDLSPVENKEHKPGPIGKERSLKNRKVKDAQQVEPEGQEKPSPATVRSTDPVTTKETKAVSEMSTEIGTMISVSSAEYGTNAKESVTDYTTPSSSLPNTVATNNTKMEDTLVNNVPLPNTLPLPKRETIQQSSSLTSVPPTTFSLTFKMESARKAWENSPNVREKGSPVTSTAPPIATGVSSSASGPSTANYNSFSSASMPQIPVASVTPTASLSGAGTYTTSSLSTKSTTTSDPPNICKVKPQQLQTSSLPSASHFSQLSCMPSLIAQQQQNPQVYVSQSAAAQIPAFYMDTSHLFNTQHARLAPPSLAQQQGFQPGLSQPTSVQQIPIPIYAPLQGQHQAQLSLGAGPAVSQAQELFSSSLQPYRSQPAFMQSSLSQPSVVLSGTAIHNFPTVQHQELAKAQSGLAFQQTSNTQPIPILYEHQLGQASGLGGSQLIDTHLLQARANLTQASNLYSGQVQQPGQTNFYNTAQSPSALQQVTVPLPASQLSLPNFGSTGQPLIALPQTLQPPLQHTTPQAQAQSLSRPAQVSQPFRGLIPAGTQHSMIATTGKMSEMELKAFGSGIDIKPGTPPIAGRSTTPTSSPFRATSTSPNSQSSKMNSIVYQKQFQSAPATVRMTQPFPTQFAPQILSQPNLVPPLVRAPHTNTFPAPVQRPPMALASQMPPPLTTGLMSHARLPHVARGPCGSLSGVRGNQAQAALKAEQDMKAKQRAEVLQSTQRFFSEQQQSKQIGGGKAQKVDSDSSKPPETLTDPPGVCQEKVEEKPPPAPSIATKPVRTGPIKPQAIKTEETKS

SEQ ID NO: 285870 - protein, 373 aa, Artificial Sequence
  derived and/or modified sequence
MTTSASSHLNKGIKQVYMSLPQGEKVQAMYIWIDGTGEGLRCKTRTLDSEPKCVEELPEWNFDGSSTLQSEGSNSDMYLVPAAMFRDPFRKDPNKLVLCEVFKYNRRPAETNLRHTCKRIMDMVSNQHPWFGMEQEYTLMGTDGHPFGWPSNGFPGPQGPYYCGVGADRAYGRDIVEAHYRACLYAGVKIAGTNAEVMPAQWEFQIGPCEGISMGDHLWVARFILHRVCEDFGVIATFDPKPIPGNWNGAGCHTNFSTKAMREENGLKYIEEAIEKLSKRHQYHIRAYDPKGGLDNARRLTGFHETSNINDFSAGVANRSASIRIPRTVGQEKKGYFEDRRPSANCDPFSVTEALIRTCLLNETGDEPFQYKN

SEQ ID NO: 285871 - protein, 233 aa, Artificial Sequence
  derived and/or modified sequence
MTTSASSHLNKGIKQVYMSLPQGEKVQAMYIWIDGTGEGLRCKTRTLDSEPKCVEELPEWNFDGSSTLQSEGSNSDMYLVPAAMFRDPFRKDPNKLVLCEVFKYNRRPAETNLRHTCKRIMDMVSNQHPWFGMEQEYTLMGTDGHPFGWPSNGFQGPRVHITVVWEQTEPMAGTSWRPITGPACMLESRLRGLMPRSCLPSGNFRLDLVKESAWEIISGWPVSSCIVCVKTLE

SEQ ID NO: 285872 - DNA, 1122 bp, Artificial Sequence
  derived and/or modified sequence
atgactacgtccgcatcatcgcatctgaataagggtatcaagcaggtgtacatgagcctcccccagggagaaaaggttcaggcaatgtacatttggattgatgggaccggagaggggctaaggtgcaaaaccagaaccctggattcagaacctaagtgtgtggaagaactgccagagtggaatttcgacggcagctccacactgcagagcgaggggtcgaattctgacatgtaccttgttcctgcagctatgtttagggaccctttccggaaagatcccaataagctggtgctatgtgaggtgttcaaatataacaggcgaccagccgaaaccaacctccgccatacgtgtaagcggatcatggacatggttagtaatcagcatccctggttcggaatggaacaagagtatacattaatgggcacagacggacatccattcggatggcctagcaacggattccctggtccacaagggccctattactgcggtgtgggtgctgaccgggcctacggaagagatatcgtggaggctcattatcgggcttgcctttatgccggcgtcaagatcgctggaacaaatgcggaagtaatgccagcgcagtgggaattccaaattggaccatgtgaagggatttcgatgggggatcacctctgggtagctcgcttcattttacaccgggtctgcgaagacttcggagtcattgccacctttgacccaaagcctatccccggaaattggaacggagcgggatgccacacgaacttcagcaccaaggctatgagagaggaaaacgggctgaagtatattgaagaagccatcgaaaaactgagcaaaagacaccagtaccatatccgcgcctatgatccaaaaggggggctggacaatgcccgaagactcacagggtttcacgagacatccaacataaatgatttttctgccggggtggccaaccggtcggcaagcatcagaattccccggactgtcgggcaggagaaaaagggttatttcgaagatcgccgcccttccgccaattgtgaccctttctcagtgacggaagcactgatacggacgtgtctactgaatgaaaccggggacgagccattccagtacaaaaactag

SEQ ID NO: 285873 - DNA, 1122 bp, Artificial Sequence
  derived and/or modified sequence
atgacaacttccgcttcctcccatttgaataagggtataaagcaggtgtatatgtcactgccccagggcgagaaggttcaggcaatgtacatctggatcgatggtacaggcgaaggattgagatgtaagacacgcacacttgactctgagccaaaatgtgttgaagaactccctgaatggaatttcgacggctcgagcacactgcagtccgaggggagcaactcggacatgtacctagtccccgccgctatgtttcgggacccctttcgaaaggatcccaataaactggtactgtgcgaagtgtttaagtataacagaagacccgctgagaccaacctgcgtcacacgtgtaaaaggatcatggatatggtgagtaaccagcacccatggtttgggatggaacaggaatacacacttatgggcacagacggccacccatttgggtggccatccaacgggttcccgggacctcaggggccttattactgcggcgtcggagccgatagagcctatggacgagacatcgtcgaagcacactatcgcgcttgtttatacgcgggtgtaaaaatcgccgggaccaacgcagaggttatgcctgcacagtgggagttccagattggcccctgtgaaggcatcagcatgggcgatcacttatgggtggcacggtttatactccacagagtttgcgaggacttcggggtgatcgcaacgtttgatcctaaacccattcccgggaattggaatggagcaggttgccatactaactttagcaccaaggctatgcgggaagaaaacggactgaaatatatagaggaggcaatcgaaaagctgtccaaaagacaccagtaccatattcgtgcttatgatccaaagggaggcctggacaacgccagaagattgacggggtttcatgagacttctaatattaatgatttctccgccggggtggccaatcgctccgccagcattcgtatccccagaaccgtgggccaggaaaagaaaggctatttcgaggaccgccggccctccgccaactgcgatccattttctgttactgaggccctcataagaacctgcctgttaaatgagaccggggacgaaccattccagtacaagaactag

SEQ ID NO: 285874 - DNA, 1122 bp, Artificial Sequence
  derived and/or modified sequence
atgactacgtctgctagctctcaccttaacaagggcattaagcaagtctacatgagcctcccgcaaggcgaaaaggtgcaggccatgtacatctggatcgacggaacaggcgaaggcctcaggtgtaagacacgaacactcgactcagaaccgaagtgtgtggaggagctgcctgagtggaacttcgacggatcatccacgttgcaaagcgaaggcagcaactccgacatgtatttggttccggcagctatgtttcgcgaccctttccgcaaggacccaaataagttagtcctttgtgaggtgttcaagtacaaccggcggcccgctgaaaccaatctgcgacatacatgcaagaggatcatggacatggtttccaaccagcatccatggttcggtatggaacaagaatacaccttaatggggaccgacggacatcctttcggttggccgtctaacggctttccaggccctcagggtccttattactgtggagtcggtgccgatagagcctatggccgtgacattgtggaagcccattatcgcgcttgcctatatgcgggggttaaaattgctggaacaaatgccgaggtgatgcccgctcaatgggaatttcagatcgggccatgcgagggaatctcaatgggtgaccatctgtgggtggccagatttatactccatagggtttgtgaggactttggtgtgatcgcaacgttcgacccaaagcctatccccgggaattggaatggagctggctgccacacaaacttcagcacaaaggcgatgcgagaggagaacggtcttaagtacatagaagaagccattgagaagctgagcaaacggcatcaatatcatattagggcctacgaccccaagggaggacttgataacgcgcggagactgacgggcttccacgagacaagcaacattaatgactttagcgctggggtggccaaccggagtgcttcaatacgtatccctcgcacagtcggtcaggagaagaagggatatttcgaagaccgcagaccttctgcaaactgtgatcccttctcagtgaccgaggcccttattcggacttgtctgcttaatgaaaccggggacgaaccttttcaatacaagaattag

SEQ ID NO: 285875 - DNA, 1122 bp, Artificial Sequence
  derived and/or modified sequence
atgactacctctgcgtccagccacctcaataaagggattaagcaggtgtacatgagcctgccgcagggtgagaaggtgcaagctatgtatatatggatagacggcactggagagggactgcgctgtaagacccggacgctcgacagcgaacccaaatgcgtggaagaattgcctgaatggaacttcgacgggagctctacactgcaatccgaaggctccaactctgacatgtatcttgtccctgcagccatgtttcgggaccccttcaggaaggaccccaacaaactggttctctgtgaggtgttcaagtacaacaggcgaccggcagaaactaatctgaggcatacctgcaagagaatcatggacatggtaagtaaccagcatccctggttcgggatggaacaggagtataccctgatgggcactgatggacaccccttcgggtggccctcaaatgggttcccaggccctcaaggaccctactactgtggggtcggcgccgacagagcatacggacgcgacattgtcgaggcacactatagggcctgtctgtatgcaggagtgaagattgccggtaccaacgccgaggttatgcccgctcaatgggagtttcaaattggaccctgcgaaggcatttcgatgggagaccacctctgggttgcacggttcatactgcaccgcgtgtgcgaagacttcggcgttatcgccacctttgaccccaagccaatccccggaaattggaacggcgctggctgtcacactaatttctctacaaaggcaatgcgcgaggagaatggtctgaaatatatcgaagaggcgatcgaaaaattaagtaagaggcatcagtaccatatccgggcctacgaccccaagggcggcctcgataacgcaagacggctgaccggcttccacgaaacttctaacatcaacgacttttcggcaggtgtggcaaaccgctccgcttccattcgaattccccgcaccgtggggcaggaaaagaagggatacttcgaagacaggaggccaagtgccaattgcgatccgtttagcgttactgaggcacttattaggacctgtctgctcaatgagacgggtgacgaaccctttcagtataagaattag

SEQ ID NO: 285876 - DNA, 702 bp, Artificial Sequence
  derived and/or modified sequence
atgacaacaagcgcatcaagccatctaaacaaaggcattaagcaggtctacatgtcgttgcctcaaggcgagaaggttcaggctatgtacatttggattgacggtacgggggaaggtcttcggtgcaagacaaggaccctggacagcgagcccaaatgcgttgaggaactccctgagtggaattttgatgggtcgtccacactgcagtctgaggggagtaacagcgacatgtacctcgttcccgccgctatgtttcgcgatcctttccgcaaggacccgaataagctggtgctttgcgaggtgttcaaatataaccgcaggcccgcagaaaccaacctccgccacacatgtaagaggattatggatatggtttctaaccaacatccctggttcggcatggaacaggagtacacccttatgggtacagatggacatccctttggctggccctcaaatggctttcagggtcccagggtccacattacggtggtctgggagcagacggaacccatggcaggcacgtcttggagacctatcacaggccccgcatgcatgctggagagcagactgcgcggtttaatgcctcgctcttgtctgccatcaggcaacttcaggctcgacctggtcaaggagtcggcgtgggagatcatttcaggatggcccgttagttcctgcattgtttgtgttaagacacttgagtag

SEQ ID NO: 285877 - DNA, 4719 bp, Artificial Sequence
  derived and/or modified sequence
gtaaaactattccccgtgaaggcggcagggcagaggtccagggcgggctttgctgggagcctcgggaccccgggttgggggccgtggggcggcacctggcgagctggcgggtgggcggcgagccgaggcttcccggcctggcggcaactcgcccctctgccctcagccctcccggctccgctcccttcccccacgccgccctgcccctcccccacgcccctttctctttctttctttctttcccagttcgcttgcccccaccccagcggcgcccgccgggctcctcgcccaatggccgcggggcccgggaccgcatcagctgatcggcccgggctcctggccgctgggagccaatcagggcaccgggggcggccccgggccgcggataaagggtgcggggctgctggcggctctgcagagtcgagagtgggagaagagcggagcgtgtgagcagtactgcggcctcctctcctctcctaacctcgctctcgcggcctagctttacccgcccgcctgctcggcgaccagcggggatcctcccccagccgcaagtccacgaagaaagcaacgaatgaaaattatgaagacaacgagaagtcagactcctccgggtcgcgctccagctgcttcggcttcgtcgcctactctgtgaactccggggagagatctcgagtcaagattaagaccttaacccaccaacctgcctgttcggacaccccccgggccggccgctgtctgtccccttctccatcgccctctcccagaaagctccggtgcttggaccagctagagtctgagaaagaggagaggcgcgaacgccactccaaaaagagaagggttaaagagggcaaccctaacgatacgcttgactttctgtggctgggaacaccttccaccatgaccacctcagcaagttcccacttaaataaaggcatcaagcaggtgtacatgtccctgcctcagggtgagaaagtccaggccatgtatatctggatcgatggtactggagaaggactgcgctgcaagacccggaccctggacagtgagcccaagtgtgtggaagagttgcctgagtggaatttcgatggctctagtactttacagtctgagggttccaacagtgacatgtatctcgtgcctgctgccatgtttcgggaccccttccgtaaggaccctaacaagctggtgttatgtgaagttttcaagtacaatcgaaggcctgcagagaccaatttgaggcacacctgtaaacggataatggacatggtgagcaaccagcacccctggtttggcatggagcaggagtataccctcatggggacagatgggcacccctttggttggccttccaacggcttcccagggccccagggtccatattactgtggtgtgggagcagacagagcctatggcagggacatcgtggaggcccattaccgggcctgcttgtatgctggagtcaagattgcggggactaatgccgaggtcatgcctgcccagtgggaatttcagattggaccttgtgaaggaatcagcatgggagatcatctctgggtggcccgtttcatcttgcatcgtgtgtgtgaagactttggagtgatagcaacctttgatcctaagcccattcctgggaactggaatggtgcaggctgccataccaacttcagcaccaaggccatgcgggaggagaatggtctgaagtacatcgaggaggccattgagaaactaagcaagcggcaccagtaccacatccgtgcctatgatcccaagggaggcctggacaatgcccgacgtctaactggattccatgaaacctccaacatcaacgacttttctgctggtgtagccaatcgtagcgccagcatacgcattccccggactgttggccaggagaagaagggttactttgaagatcgtcgcccctctgccaactgcgaccccttttcggtgacagaagccctcatccgcacgtgtcttctcaatgaaaccggcgatgagcccttccagtacaaaaattaagtggactagacctccagctgttgagcccctcctagttcttcatcccactccaactcttccccctctcccagttgtcccgattgtaactcaaagggtggaatatcaaggtcgtttttttcattccatgtgcccagttaatcttgctttctttgtttggctgggatagaggggtcaagttattaatttcttcacacctaccctcctttttttccctatcactgaagctttttagtgcattagtggggaggagggtggggagacataaccactgcttccatttaatggggtgcacctgtccaataggcgtagctatccggacagagcacgtttgcagaagggggtctcttcttccaggtagctgaaaggggaagacctgacgtactctggttaggttaggacttgccctcgtggtggaaacttttcttaaaaagttataaccaacttttctattaaaagtgggaattaggagagaaggtaggggttgggaatcagagagaatggctttggtctcttgcttgtgggactagcctggcttgggactaaatgccctgctctgaacacgaagcttagtataaactgatggatatccctaccttgaaagaagaaaaggttcttactgcttggtccttgatttatcacacaaagcagaatagtatttttatatttaaatgtaaagacaaaaaactatatgtatggttttgtggattatgtgtgttttgctaaaggaaaaaaccatccaggtcacggggcaccaaatttgagacaaatagtcggattagaaataaagcatctcattttgagtagagagcaagggaagtggttcttagatggtgatctgggattaggccctcaagacccttttgggtttctgccctgcccaccctctggagaaggtgggcactggattagttaacagacaacacgttactagcagtcacttgatctccgtggctttggtttaaaagacacacttgtccacataggtttagagataagagttggctggtcaacttgagcatgttactgacagagggggtattggggttattttctggtaggaatagcatgtcactaaagcaggccttttgatattaaattttttaaaaagcaaaattatagaagtttagattttaatcaaatttgtagggtttctaggtaatttttacagaattgcttgtttgcttcaactgtctcctacctctgctcttggaggagatggggacagggctggagtcaaaacacttgtaattttgtatcttgatgtctttgttaagactgctgaagaattattttttttcttttataataaggaataaaccccacctttattccttcatttcatctaccattttctggttcttgtgttggctgtggcaggccagctgtggttttcttttgccatgacaacttctaattgccatgtacagtatgttcaaagtcaaataactcctcattgtaaacaaactgtgtaactgcccaaagcagcacttataaatcagcctaacataagatctctctgatgtgtttgtgattctttcaaatccctatgtgccattatatttctttatttcctaaaacaggcaaaataagctcaagtttatgtactctgagtttttaaaacactggagtgatgttgctgaccagccgtttcctgtacctctctaagttgggtatttgggacttaagggattaagtttttcacctagacttagttacacacaatcttggcatttcctagcctagaggtttgtagcagggtacaagccccactcctcccccttcctttgctcccctgagtttggttttggcttaccataacattgttttgaccattcctagcctaatacaatagcctaacataatgtaagattaactggctttacgatttctattctctgctctcagtgataagaaacaaatattagctaccctgctaccctggttgaagccttccaaggctggctatgccctaggcatgggctcatccttgggtgtatcttgccttgcaggaagaccagtggaccgattgtgattctcaaaagctctgtgttgtcacctgtgcccttgccccttgctcttatcttggtccgtgtatctgggagttcttccaccttatcttggccaattcctaccttcgttcattcctcatgaggttgggtaaaagctccctccggctcccatgatgctgtgcatatacctagcaaaaagcaattattggacacattggagtgcaatattattaatagcattaatactactaataatgtgggcaatagtgattgtttttaaaaggcagtatactcttaccagtgcgaggtagctggggcctgtgatagtttttagagataagttcttcaggcaactgtgtattttacactagtcaagtaatcctagatatccgtggtttttcttaagaaagttggctcgtaatatgatttaatattcaaagtagagtcatctacctattagcttgctggcgtggtcctagtttatgcctgtttcagcatgattgttgagtaccctgtttcatccttagcattttcttgattttgttgttaaatgatgtatacccttatttccattgaatctgtgcttccacccccccaactgaagttgtcttccctttgcttggccacccttacagcctcttggatggtgtatcctacagtgtaagcactaaactgaagaggcagtgacctg

SEQ ID NO: 285878 - DNA, 4364 bp, Artificial Sequence
  derived and/or modified sequence
gtaaaactattccccgtgaaggcggcagggcagaggtccagggcgggctttgctgggagcctcgggaccccgggttgggggccgtggggcggcacctggcgagctggcgggtgggcggcgagccgaggcttcccggcctggcggcaactcgcccctctgccctcagccctcccggctccgctcccttcccccacgccgccctgcccctcccccacgcccctttctctttctttctttctttcccagttcgcttgcccccaccccagcggcgcccgccgggctcctcgcccaatggccgcggggcccgggaccgcatcagctgatcggcccgggctcctggccgctgggagccaatcagggcaccgggggcggccccgggccgcggataaagggtgcggggctgctggcggctctgcagagtcgagagtgggagaagagcggagcgtgtgagcagtactgcggcctcctctcctctcctaacctcgctctcgcggcctagctttacccgcccgcctgctcggcgaccagaacaccttccaccatgaccacctcagcaagttcccacttaaataaaggcatcaagcaggtgtacatgtccctgcctcagggtgagaaagtccaggccatgtatatctggatcgatggtactggagaaggactgcgctgcaagacccggaccctggacagtgagcccaagtgtgtggaagagttgcctgagtggaatttcgatggctctagtactttacagtctgagggttccaacagtgacatgtatctcgtgcctgctgccatgtttcgggaccccttccgtaaggaccctaacaagctggtgttatgtgaagttttcaagtacaatcgaaggcctgcagagaccaatttgaggcacacctgtaaacggataatggacatggtgagcaaccagcacccctggtttggcatggagcaggagtataccctcatggggacagatgggcacccctttggttggccttccaacggcttcccagggccccagggtccatattactgtggtgtgggagcagacagagcctatggcagggacatcgtggaggcccattaccgggcctgcttgtatgctggagtcaagattgcggggactaatgccgaggtcatgcctgcccagtgggaatttcagattggaccttgtgaaggaatcagcatgggagatcatctctgggtggcccgtttcatcttgcatcgtgtgtgtgaagactttggagtgatagcaacctttgatcctaagcccattcctgggaactggaatggtgcaggctgccataccaacttcagcaccaaggccatgcgggaggagaatggtctgaagtacatcgaggaggccattgagaaactaagcaagcggcaccagtaccacatccgtgcctatgatcccaagggaggcctggacaatgcccgacgtctaactggattccatgaaacctccaacatcaacgacttttctgctggtgtagccaatcgtagcgccagcatacgcattccccggactgttggccaggagaagaagggttactttgaagatcgtcgcccctctgccaactgcgaccccttttcggtgacagaagccctcatccgcacgtgtcttctcaatgaaaccggcgatgagcccttccagtacaaaaattaagtggactagacctccagctgttgagcccctcctagttcttcatcccactccaactcttccccctctcccagttgtcccgattgtaactcaaagggtggaatatcaaggtcgtttttttcattccatgtgcccagttaatcttgctttctttgtttggctgggatagaggggtcaagttattaatttcttcacacctaccctcctttttttccctatcactgaagctttttagtgcattagtggggaggagggtggggagacataaccactgcttccatttaatggggtgcacctgtccaataggcgtagctatccggacagagcacgtttgcagaagggggtctcttcttccaggtagctgaaaggggaagacctgacgtactctggttaggttaggacttgccctcgtggtggaaacttttcttaaaaagttataaccaacttttctattaaaagtgggaattaggagagaaggtaggggttgggaatcagagagaatggctttggtctcttgcttgtgggactagcctggcttgggactaaatgccctgctctgaacacgaagcttagtataaactgatggatatccctaccttgaaagaagaaaaggttcttactgcttggtccttgatttatcacacaaagcagaatagtatttttatatttaaatgtaaagacaaaaaactatatgtatggttttgtggattatgtgtgttttgctaaaggaaaaaaccatccaggtcacggggcaccaaatttgagacaaatagtcggattagaaataaagcatctcattttgagtagagagcaagggaagtggttcttagatggtgatctgggattaggccctcaagacccttttgggtttctgccctgcccaccctctggagaaggtgggcactggattagttaacagacaacacgttactagcagtcacttgatctccgtggctttggtttaaaagacacacttgtccacataggtttagagataagagttggctggtcaacttgagcatgttactgacagagggggtattggggttattttctggtaggaatagcatgtcactaaagcaggccttttgatattaaattttttaaaaagcaaaattatagaagtttagattttaatcaaatttgtagggtttctaggtaatttttacagaattgcttgtttgcttcaactgtctcctacctctgctcttggaggagatggggacagggctggagtcaaaacacttgtaattttgtatcttgatgtctttgttaagactgctgaagaattattttttttcttttataataaggaataaaccccacctttattccttcatttcatctaccattttctggttcttgtgttggctgtggcaggccagctgtggttttcttttgccatgacaacttctaattgccatgtacagtatgttcaaagtcaaataactcctcattgtaaacaaactgtgtaactgcccaaagcagcacttataaatcagcctaacataagatctctctgatgtgtttgtgattctttcaaatccctatgtgccattatatttctttatttcctaaaacaggcaaaataagctcaagtttatgtactctgagtttttaaaacactggagtgatgttgctgaccagccgtttcctgtacctctctaagttgggtatttgggacttaagggattaagtttttcacctagacttagttacacacaatcttggcatttcctagcctagaggtttgtagcagggtacaagccccactcctcccccttcctttgctcccctgagtttggttttggcttaccataacattgttttgaccattcctagcctaatacaatagcctaacataatgtaagattaactggctttacgatttctattctctgctctcagtgataagaaacaaatattagctaccctgctaccctggttgaagccttccaaggctggctatgccctaggcatgggctcatccttgggtgtatcttgccttgcaggaagaccagtggaccgattgtgattctcaaaagctctgtgttgtcacctgtgcccttgccccttgctcttatcttggtccgtgtatctgggagttcttccaccttatcttggccaattcctaccttcgttcattcctcatgaggttgggtaaaagctccctccggctcccatgatgctgtgcatatacctagcaaaaagcaattattggacacattggagtgcaatattattaatagcattaatactactaataatgtgggcaatagtgattgtttttaaaaggcagtatactcttaccagtgcgaggtagctggggcctgtgatagtttttagagataagttcttcaggcaactgtgtattttacactagtcaagtaatcctagatatccgtggtttttcttaagaaagttggctcgtaatatgatttaatattcaaagtagagtcatctacctattagcttgctggcgtggtcctagtttatgcctgtttcagcatgattgttgagtaccctgtttcatccttagcattttcttgattttgttgttaaatgatgtatacccttatttccattgaatctgtgcttccacccccccaactgaagttgtcttccctttgcttggccacccttacagcctcttggatggtgtatcctacagtgtaagcactaaactgaagaggcagtgacctga

SEQ ID NO: 285879 - DNA, 3942 bp, Artificial Sequence
  derived and/or modified sequence
gcagagtcgagagtgggagaagagcggagcgtgtgagcagtactgcggcctcctctcctctcctaacctcgctctcgcggcctagctttacccgcccgcctgctcggcgaccaggtaagcccccggacggcccggtgtcacgcaagcgaggcgcgccgcccctgctaccccgcgaggcgcgccgcccagcctcttttttcggctgcctgcccctccagtcccagccctacgctgcggcctctccggcccatgcctgagatccggcatgagtgctcctcccgcgtgcttccgccgctggtggcttggacccgtcggggctggcgctggtggggcgcgcccttggccaggctctgggaagggcggggtgagttgttttgatcttcttttcactacttgcggccgaagcgccgcccctggaggccgttgggccggcctgcgccctggggctcgcagtggtttgtttgcgctgtggatggagtggcggtgcggtcccctgtggagcgcaaacaaggcgcttggttggcgcgggcgcctggctgccttcctcgtggtggggccttcggagcaatcgtcctggttctggcgatggttgagacgcctcgattgcggcgtgtaacggtgagcgttgtttgggcggccggctcccgcctcggggtcccgggggccttccaatgtgaccgaacaatggagagcccgggcctcggcgcagtcagtggagaagccggtccgggcggaggcagcagcagcgcgcagtccctacggcctgcgcccccaccctcccccggaccccccaacccctcggcggcagggtatggccacctccgtgaggccctgagattcggacgggggcccgaggggcagggcgcccactttagggacatttcagtgggaaggggctgctctcaaagtggataattataactccctcgggggcgggaagcggggatcctcccccagccgcaagtccacgaagaaagcaacgaatgaaaattatgaagacaacgagaagtcagactcctccgggtcgcgctccagctgcttcggcttcgtcgcctactctgtgaactccggggagagatctcgagtcaagattaagaccttaacccaccaacctgcctgttcggacaccccccgggccggccgctgtctgtccccttctccatcgccctctcccagaaagctccggtgcttggaccagctagagtctgagaaagaggagaggcgcgaacgccactccaaaaagagaagggttaaagagggcaaccctaacgatacgcttgactttctgtggctgggaacaccttccaccatgaccacctcagcaagttcccacttaaataaaggcatcaagcaggtgtacatgtccctgcctcagggtgagaaagtccaggccatgtatatctggatcgatggtactggagaaggactgcgctgcaagacccggaccctggacagtgagcccaagtgtgtggaagagttgcctgagtggaatttcgatggctctagtactttacagtctgagggttccaacagtgacatgtatctcgtgcctgctgccatgtttcgggaccccttccgtaaggaccctaacaagctggtgttatgtgaagttttcaagtacaatcgaaggcctgcagagaccaatttgaggcacacctgtaaacggataatggacatggtgagcaaccagcacccctggtttggcatggagcaggagtataccctcatggggacagatgggcacccctttggttggccttccaacggcttcccagggccccagggtccatattactgtggtgtgggagcagacagagcctatggcagggacatcgtggaggcccattaccgggcctgcttgtatgctggagtcaagattgcggggactaatgccgaggtcatgcctgcccagtgggaatttcagattggaccttgtgaaggaatcagcatgggagatcatctctgggtggcccgtttcatcttgcatcgtgtgtgtgaagactttggagtgatagcaacctttgatcctaagcccattcctgggaactggaatggtgcaggctgccataccaacttcagcaccaaggccatgcgggaggagaatggtctgaagtacatcgaggaggccattgagaaactaagcaagcggcaccagtaccacatccgtgcctatgatcccaagggaggcctggacaatgcccgacgtctaactggattccatgaaacctccaacatcaacgacttttctgctggtgtagccaatcgtagcgccagcatacgcattccccggactgttggccaggagaagaagggttactttgaagatcgtcgcccctctgccaactgcgaccccttttcggtgacagaagccctcatccgcacgtgtcttctcaatgaaaccggcgatgagcccttccagtacaaaaattaagtggactagacctccagctgttgagcccctcctagttcttcatcccactccaactcttccccctctcccagttgtcccgattgtaactcaaagggtggaatatcaaggtcgtttttttcattccatgtgcccagttaatcttgctttctttgtttggctgggatagaggggtcaagttattaatttcttcacacctaccctcctttttttccctatcactgaagctttttagtgcattagtggggaggagggtggggagacataaccactgcttccatttaatggggtgcacctgtccaataggcgtagctatccggacagagcacgtttgcagaagggggtctcttcttccaggtagctgaaaggggaagacctgacgtactctggttaggttaggacttgccctcgtggtggaaacttttcttaaaaagttataaccaacttttctattaaaagtgggaattaggagagaaggtaggggttgggaatcagagagaatggctttggtctcttgcttgtgggactagcctggcttgggactaaatgccctgctctgaacacgaagcttagtataaactgatggatatccctaccttgaaagaagaaaaggttcttactgcttggtccttgatttatcacacaaagcagaatagtatttttatatttaaatgtaaagacaaaaaactatatgtatggttttgtggattatgtgtgttttgctaaaggaaaaaaccatccaggtcacggggcaccaaatttgagacaaatagtcggattagaaataaagcatctcattttgagtagagagcaagggaagtggttcttagatggtgatctgggattaggccctcaagacccttttgggtttctgccctgcccaccctctggagaaggtgggcactggattagttaacagacaacacgttactagcagtcacttgatctccgtggctttggtttaaaagacacacttgtccacataggtttagagataagagttggctggtcaacttgagcatgttactgacagagggggtattggggttattttctggtaggaatagcatgtcactaaagcaggccttttgatattaaattttttaaaaagcaaaattatagaagtttagattttaatcaaatttgtagggtttctaggtaatttttacagaattgcttgtttgcttcaactgtctcctacctctgctcttggaggagatggggacagggctggagtcaaaacacttgtaattttgtatcttgatgtctttgttaagactgctgaagaattattttttttcttttataataaggaataaaccccacctttattccttcatttcatctaccattttctggttcttgtgttggctgtggcaggccagctgtggttttcttttgccatgacaacttctaattgccatgtacagtatgttcaaagtcaaataactcctcattgtaaacaaactgtgtaactgcccaaagcagcacttataaatcagcctaacataaga

SEQ ID NO: 285880 - DNA, 4065 bp, Artificial Sequence
  derived and/or modified sequence
actacttgcggccgaagcgccgcccctggaggccgttgggccggcctgcgccctggggctcgcagtggtttgtttgcgctgtggatggagtggcggtgcggtcccctgtggagcgcaaacaaggcgcttggttggcgcgggcgcctggctgccttcctcgtggtggggccttcggagcaatcgtcctggttctggcgatggttgagacgcctcgattgcggcgtgtaacgaacaccttccaccatgaccacctcagcaagttcccacttaaataaaggcatcaagcaggtgtacatgtccctgcctcagggtgagaaagtccaggccatgtatatctggatcgatggtactggagaaggactgcgctgcaagacccggaccctggacagtgagcccaagtgtgtggaagagttgcctgagtggaatttcgatggctctagtactttacagtctgagggttccaacagtgacatgtatctcgtgcctgctgccatgtttcgggaccccttccgtaaggaccctaacaagctggtgttatgtgaagttttcaagtacaatcgaaggcctgcagagaccaatttgaggcacacctgtaaacggataatggacatggtgagcaaccagcacccctggtttggcatggagcaggagtataccctcatggggacagatgggcacccctttggttggccttccaacggcttcccagggccccagggtccatattactgtggtgtgggagcagacagagcctatggcagggacatcgtggaggcccattaccgggcctgcttgtatgctggagtcaagattgcggggactaatgccgaggtcatgcctgcccagtgggaatttcagattggaccttgtgaaggaatcagcatgggagatcatctctgggtggcccgtttcatcttgcatcgtgtgtgtgaagactttggagtgatagcaacctttgatcctaagcccattcctgggaactggaatggtgcaggctgccataccaacttcagcaccaaggccatgcgggaggagaatggtctgaagtacatcgaggaggccattgagaaactaagcaagcggcaccagtaccacatccgtgcctatgatcccaagggaggcctggacaatgcccgacgtctaactggattccatgaaacctccaacatcaacgacttttctgctggtgtagccaatcgtagcgccagcatacgcattccccggactgttggccaggagaagaagggttactttgaagatcgtcgcccctctgccaactgcgaccccttttcggtgacagaagccctcatccgcacgtgtcttctcaatgaaaccggcgatgagcccttccagtacaaaaattaagtggactagacctccagctgttgagcccctcctagttcttcatcccactccaactcttccccctctcccagttgtcccgattgtaactcaaagggtggaatatcaaggtcgtttttttcattccatgtgcccagttaatcttgctttctttgtttggctgggatagaggggtcaagttattaatttcttcacacctaccctcctttttttccctatcactgaagctttttagtgcattagtggggaggagggtggggagacataaccactgcttccatttaatggggtgcacctgtccaataggcgtagctatccggacagagcacgtttgcagaagggggtctcttcttccaggtagctgaaaggggaagacctgacgtactctggttaggttaggacttgccctcgtggtggaaacttttcttaaaaagttataaccaacttttctattaaaagtgggaattaggagagaaggtaggggttgggaatcagagagaatggctttggtctcttgcttgtgggactagcctggcttgggactaaatgccctgctctgaacacgaagcttagtataaactgatggatatccctaccttgaaagaagaaaaggttcttactgcttggtccttgatttatcacacaaagcagaatagtatttttatatttaaatgtaaagacaaaaaactatatgtatggttttgtggattatgtgtgttttgctaaaggaaaaaaccatccaggtcacggggcaccaaatttgagacaaatagtcggattagaaataaagcatctcattttgagtagagagcaagggaagtggttcttagatggtgatctgggattaggccctcaagacccttttgggtttctgccctgcccaccctctggagaaggtgggcactggattagttaacagacaacacgttactagcagtcacttgatctccgtggctttggtttaaaagacacacttgtccacataggtttagagataagagttggctggtcaacttgagcatgttactgacagagggggtattggggttattttctggtaggaatagcatgtcactaaagcaggccttttgatattaaattttttaaaaagcaaaattatagaagtttagattttaatcaaatttgtagggtttctaggtaatttttacagaattgcttgtttgcttcaactgtctcctacctctgctcttggaggagatggggacagggctggagtcaaaacacttgtaattttgtatcttgatgtctttgttaagactgctgaagaattattttttttcttttataataaggaataaaccccacctttattccttcatttcatctaccattttctggttcttgtgttggctgtggcaggccagctgtggttttcttttgccatgacaacttctaattgccatgtacagtatgttcaaagtcaaataactcctcattgtaaacaaactgtgtaactgcccaaagcagcacttataaatcagcctaacataagatctctctgatgtgtttgtgattctttcaaatccctatgtgccattatatttctttatttcctaaaacaggcaaaataagctcaagtttatgtactctgagtttttaaaacactggagtgatgttgctgaccagccgtttcctgtacctctctaagttgggtatttgggacttaagggattaagtttttcacctagacttagttacacacaatcttggcatttcctagcctagaggtttgtagcagggtacaagccccactcctcccccttcctttgctcccctgagtttggttttggcttaccataacattgttttgaccattcctagcctaatacaatagcctaacataatgtaagattaactggctttacgatttctattctctgctctcagtgataagaaacaaatattagctaccctgctaccctggttgaagccttccaaggctggctatgccctaggcatgggctcatccttgggtgtatcttgccttgcaggaagaccagtggaccgattgtgattctcaaaagctctgtgttgtcacctgtgcccttgccccttgctcttatcttggtccgtgtatctgggagttcttccaccttatcttggccaattcctaccttcgttcattcctcatgaggttgggtaaaagctccctccggctcccatgatgctgtgcatatacctagcaaaaagcaattattggacacattggagtgcaatattattaatagcattaatactactaataatgtgggcaatagtgattgtttttaaaaggcagtatactcttaccagtgcgaggtagctggggcctgtgatagtttttagagataagttcttcaggcaactgtgtattttacactagtcaagtaatcctagatatccgtggtttttcttaagaaagttggctcgtaatatgatttaatattcaaagtagagtcatctacctattagcttgctggcgtggtcctagtttatgcctgtttcagcatgattgttgagtaccctgtttcatccttagcattttcttgattttgttgttaaatgatgtatacccttatttccattgaatctgtgcttccacccccccaactgaagttgtcttccctttgcttggccacccttacagcctcttggatggtgtatcctacagtgtaagcactaaactgaagaggcagtgacctg

SEQ ID NO: 285881 - DNA, 1244 bp, Artificial Sequence
  derived and/or modified sequence
aagagggcaaccctaacgatacgcttgactttctgtggctgggaacaccttccaccatgaccacctcagcaagttcccacttaaataaaggcatcaagcaggtgtacatgtccctgcctcagggtgagaaagtccaggccatgtatatctggatcgatggtactggagaaggactgcgctgcaagacccggaccctggacagtgagcccaagtgtgtggaagagttgcctgagtggaatttcgatggctctagtactttacagtctgagggttccaacagtgacatgtatctcgtgcctgctgccatgtttcgggaccccttccgtaaggaccctaacaagctggtgttatgtgaagttttcaagtacaatcgaaggcctgcagagaccaatttgaggcacacctgtaaacggataatggacatggtgagcaaccagcacccctggtttggcatggagcaggagtataccctcatggggacagatgggcacccctttggttggccttccaacggcttccagggccccagggtccatattactgtggtgtgggagcagacagagcctatggcagggacatcgtggaggcccattaccgggcctgcttgtatgctggagtcaagattgcggggactaatgccgaggtcatgcctgcccagtgggaatttcagattggaccttgtgaaggaatcagcatgggagatcatctctgggtggcccgtttcatcttgcatcgtgtgtgtgaagactttggagtgatagcaacctttgatcctaagcccattcctgggaactggaatggtgcaggctgccataccaacttcagcaccaaggccatgcgggaggagaatggtctgaagtacatcgaggaggccattgagaaactaagcaagcggcaccagtaccacatccgtgcctatgatcccaagggaggcctggacaatgcccgacgtctaactggattccatgaaacctccaacatcaacgacttttctgctggtgtagccaatcgtagcgccagcatacgcattccccggactgttggccaggagaagaagggttactttgaagatcgtcgcccctctgccaactgcgaccccttttcggtgacagaagccctcatccgcacgtgtcttctcaatgaaaccggcgatgagcccttccagtacaaaaattaagtggactagacctccagctgttgagcccctcctagttcttcatcccactccaactcttccccctctc

SEQ ID NO: 285882 - DNA, 1122 bp, Artificial Sequence
  derived and/or modified sequence
atgaccaccagcgccagcagccacctgaacaagggcatcaagcaggtgtacatgagcctgccccagggcgagaaggtgcaggccatgtacatctggattgatggcaccggggagggcctgcgctgcaagaccaggaccctggacagcgagcccaagtgtgtggaggagctgcctgagtggaactttgatggcagcagcaccctgcagagcgagggcagcaacagcgacatgtacctggtgcctgctgccatgttccgggaccccttcaggaaggaccccaacaagctggtgctgtgtgaggtgttcaagtacaacagaagacctgctgagaccaacctgcggcacacctgcaagaggatcatggacatggtgagcaaccagcacccctggtttggcatggagcaggagtacaccctgatgggcacagatggccaccccttcggctggcccagcaatggcttccctggcccccagggcccctactactgcggcgtgggcgctgaccgggcctacggccgggacatcgtggaggcccactaccgggcctgcctgtatgctggggtgaagattgctggcaccaatgctgaggtgatgcctgcccagtgggagttccagatcggcccctgtgagggcatctccatgggagaccacctgtgggtggcccgcttcatcctgcaccgggtgtgtgaggactttggagtgattgccacctttgaccccaagcccatccctggcaactggaatggagctggctgccacaccaacttcagcaccaaggccatgagggaggagaatggcctgaagtacatcgaggaggccatcgagaagctgagcaagaggcaccagtaccacatccgggcctatgaccccaagggcggcctggacaatgcccggcggctgaccggcttccacgagaccagcaacatcaatgacttctctgctggggtggccaacagaagtgccagcatccgcatccccaggacagtgggccaggagaagaagggctactttgaggaccggcggcccagcgccaactgtgaccccttctctgtgacagaggccctgatccgcacctgcctgctgaatgaaacaggagatgagcccttccagtacaagaactag

SEQ ID NO: 285883 - DNA, 702 bp, Artificial Sequence
  derived and/or modified sequence
atgaccaccagcgccagcagccacctgaacaagggcatcaagcaggtgtacatgagcctgccccagggcgagaaggtgcaggccatgtacatctggattgatggcaccggggagggcctgcgctgcaagaccaggaccctggacagcgagcccaagtgtgtggaggagctgcctgagtggaactttgatggcagcagcaccctgcagagcgagggcagcaacagcgacatgtacctggtgcctgctgccatgttccgggaccccttcaggaaggaccccaacaagctggtgctgtgtgaggtgttcaagtacaacagaagacctgctgagaccaacctgcggcacacctgcaagaggatcatggacatggtgagcaaccagcacccctggtttggcatggagcaggagtacaccctgatgggcacagatggccaccccttcggctggcccagcaatggcttccagggcccccgggtgcacatcaccgtggtgtgggagcagacagagcccatggccggcacctcctggaggcccatcaccggccctgcctgcatgctggagagccggctgcggggcctgatgcccaggagctgcctgcccagcggcaacttccggctggacctggtgaaggagagcgcctgggagatcatcagcggctggcctgtgagcagctgcatcgtgtgtgtgaagaccctggagtag

SEQ ID NO: 285884 - DNA, 1122 bp, Artificial Sequence
  derived and/or modified sequence
atgaccaccagcgccagcagccacctgaacaagggcatcaagcaggtttatatgtccctgccccagggcgagaaagtgcaggctatgtacatttggattgacggcactggggaaggcctacgatgtaagaccaggactcttgactctgagcccaagtgtgtcgaagaactgccagagtggaatttcgatggctcctcaacattgcagtctgagggctctaactccgacatgtacttagtgccagccgcaatgttcagagatccgtttcgtaaggatcccaataagctggtcctttgcgaggtgtttaaatacaacagaagacccgctgaaacaaatcttcggcacacatgtaaaagaataatggacatggtcagcaaccagcatccttggtttggcatggaacaggaatatactttaatgggtacggacggacacccctttggatggccttctaatggattccccgggccccaaggaccctactactgcggggtcggggccgacagggcttacggtagggatattgttgaagctcactaccgtgcctgtctctacgccggtgtgaaaattgcagggactaacgccgaggtgatgccagcacaatgggaattccagattggaccttgcgaggggatttccatgggcgatcatctgtgggttgcccggttcattttgcaccgcgtctgtgaggattttggcgtgatcgctacttttgatccaaagcctattccggggaattggaatggagccggctgccacacgaacttttctactaaggctatgcgcgaggaaaacggtctcaaatacatagaagaggcgattgagaagctctcgaaacggcaccagtatcacatccgcgcctacgaccctaaaggggggcttgacaatgcccgaaggctgactggcttccatgagacgtcaaatattaatgacttctccgccggcgtagccaatagaagtgccagcatcagaatccccagaacggttgggcaggagaagaaaggatactttgaggaccgtcggcctagtgcgaactgcgaccccttcagtgtaaccgaagcgttgataagaacctgtctgttgaatgaaaccggcgatgagccatttcagtacaaaaattag

SEQ ID NO: 285885 - DNA, 1122 bp, Artificial Sequence
  derived and/or modified sequence
atgaccaccagcgccagcagccacctgaacaagggcatcaagcaggtttacatgtcactgcctcagggagaaaaagttcaagccatgtacatttggatcgacggaactggtgaaggattgcggtgtaaaactcgaactctggatagcgagccaaagtgtgtggaagagttacccgagtggaatttcgatggcagctccacactccagtcagagggatctaacagcgatatgtatcttgtccctgcagccatgtttcgcgatcccttccgtaaagatcctaataagctggttctgtgtgaagtgtttaaatacaaccggaggccagcggaaaccaacttgcgccacacatgtaagaggattatggatatggtgagcaaccagcacccttggtttggaatggagcaggagtacacgctgatgggtacagacggacatccatttggttggccaagtaatggcttccccggccctcagggcccctactactgtggcgttggtgcagacagagcatatggccgagacattgtagaggcacattaccgggcctgcttgtacgctggggtgaagattgccgggaccaacgcagaggttatgcccgcccagtgggagtttcagatcggtccctgcgaagggattagtatgggcgatcacttatgggtggcacgcttcattctgcaccgcgtatgtgaggactttggtgtaatcgctacgtttgacccaaaacctattcccggcaattggaatggtgcaggttgccacacaaacttttctacgaaggctatgcgtgaagagaacgggcttaaatatatagaggaagcgatcgagaagctgtcaaagcggcatcagtaccatatccgagcttacgaccccaagggcggcttagataatgcgcggcgcttgacaggattccatgagacctcgaacataaacgatttttctgccggagtcgctaatagatctgcttccatccgtattcctagaactgtcggtcaggaaaaaaagggctatttcgaggatcgtcgaccctccgcaaattgcgatcccttcagcgtgaccgaagctttgattagaacttgtttgcttaacgagacgggcgacgaaccattccagtacaagaattag

SEQ ID NO: 285886 - DNA, 1122 bp, Artificial Sequence
  derived and/or modified sequence
atgaccaccagcgccagcagccacctgaacaagggcatcaagcaggtgtacatgtcgttgccccagggagaaaaggtacaagccatgtatatatggattgatgggacaggcgagggccttcgctgcaaaacaaggacactggacagcgagccaaaatgcgtggaagaattgccggagtggaatttcgatgggagctctaccctgcagtccgagggatccaactctgatatgtacttagttcccgccgccatgtttcgggatccgttccggaaagatcccaataaactggtcctgtgtgaggtgttcaagtataatcgtaggcccgcggaaaccaacctccgacatacctgcaagcgcattatggatatggtgagtaatcaacatccctggttcggaatggaacaagagtacaccttgatgggtactgatggtcaccctttcggatggccaagcaatggtttcccaggccctcagggtccctattactgtggcgttggggcagatcgggcgtacggtcgtgatattgttgaggcacattatagagcatgcctctacgctggtgtcaaaatcgctggtacaaacgcagaggtaatgccagctcagtgggaattccagattggcccatgtgagggaatatctatgggagaccatctttgggtcgccagatttatccttcaccgggtttgcgaggactttggcgtcattgccaccttcgatccgaagccaatccccggaaactggaatggggctggctgtcatacgaattttagcacaaaagcaatgagggaagagaacgggctgaagtacatcgaagaggccatagagaaattaagcaagagacaccagtatcacattagagcctatgatcccaaggggggactcgataacgctaggcgcctcactggcttccacgagacttctaatattaacgacttttcagctggggtcgcgaaccgcagcgcctccattcgtattccaagaacggtcggacaagaaaagaaaggatattttgaggaccgaaggccttcagctaattgcgatcctttttctgtaacagaggccctgatccgcacctgtcttttgaacgagacaggcgacgagcctttccagtacaagaattag

SEQ ID NO: 285887 - DNA, 1122 bp, Artificial Sequence
  derived and/or modified sequence
atgaccaccagcgccagcagccacctgaacaagggcatcaagcaggtctatatgtctctccctcagggcgaaaaagtacaggcaatgtacatttggatagacggcactggagaaggactgaggtgcaagacccgtacactcgacagtgaacccaaatgtgtggaagagctgccggaatggaatttcgatgggtcttccaccctgcaatcagagggctcaaatagcgacatgtatctggttccggccgccatgttcagagatcctttcagaaaagatcccaacaaactggttctttgtgaagtgtttaagtacaatcggcggccagccgagaccaatctgaggcatacgtgcaaaagaatcatggatatggtgtccaaccagcatccctggtttggcatggaacaggagtacactcttatgggtacagacggacacccctttgggtggccgtcaaatggtttcccgggaccccagggaccttactattgcggggtgggagcagaccgcgcttacggtagggatatagtagaggctcactatcgagcttgtttgtatgccggagtgaagatcgccgggaccaatgccgaggttatgccggcgcagtgggaattccagattggtccgtgcgaggggatttctatgggcgaccacctctgggtggcacgattcatcctccacagggtgtgtgaggatttcggggttatcgccaccttcgatcctaaaccaatcccgggaaactggaatggcgccggttgtcacacgaatttcagtaccaaagcgatgcgagaagaaaatggtttgaagtacatcgaggaagctatcgaaaagctctcgaagcggcatcagtatcacatccgagcttacgaccctaaaggaggcctcgataatgctcggagactcacaggtttccacgaaacctccaacataaacgactttagtgccggggtggctaatcggtctgcttccatccggattccaagaaccgtgggccaggagaagaagggctatttcgaggacaggcggccctccgcaaactgcgaccccttctccgtcaccgaggccttgatcaggacttgccttttgaacgaaacaggcgatgagccctttcagtacaagaactag

SEQ ID NO: 285888 - DNA, 702 bp, Artificial Sequence
  derived and/or modified sequence
atgaccaccagcgccagcagccacctgaacaagggcatcaagcaggtttatatgtcgctgccacagggggagaaagttcaggctatgtatatttggatcgacgggaccggcgaaggcttacgttgtaagacacgcacactggactccgagccaaagtgcgtggaagagttacctgagtggaacttcgatggatcatcaactctgcagagtgagggaagcaacagtgatatgtacctcgtgcccgctgccatgttcagggatcctttcaggaaggatcccaacaagctggtgctctgtgaggtgttcaagtataacagaagaccggcagagacaaacttgaggcatacctgtaagagaatcatggatatggtctctaaccaacatccttggtttggtatggagcaggaatacaccttgatgggcaccgatggacacccttttggttggccatctaacggtttccagggaccccgagtgcatatcactgtggtgtgggaacagacagagccaatggctggtacctcctggaggcctatcacgggcccagcatgcatgcttgaatcacggctgagaggactaatgccgagatcatgccttccatcaggaaatttcagacttgacctcgtcaaagagtccgcctgggaaataatctcaggctggcctgtctctagctgtattgtctgcgtgaagacgctcgaatag

SEQ ID NO: 285889 - DNA, 1122 bp, Artificial Sequence
  derived and/or modified sequence
atgacaacctccgcatcaagtcacctaaacaagggaataaaacaagtgtacatgtccctgccgcaaggtgaaaaggtgcaggccatgtacatctggattgatggaacgggggaaggacttaggtgcaaaactagaacactggatagcgaaccaaagtgcgtagaagaactcccggagtggaatttcgacggctcctcaacactccaatctgaggggtcaaatagcgacatgtacttagttcccgcagccatgttcagggatccttttcgtaaagatcccaacaagctggtgctgtgtgaggttttcaaatacaatcggcgtccagccgagaccaatctcagacacacatgcaaacgaatcatggatatggtgtccaatcagcatccatggtttggaatggagcaagagtacaccttaatgggcaccgatggtcacccctttggctggccctccaacggtttcccgggtccacaggggccttactattgtggcgtcggagctgatagagcatatgggagggatatagtggaggcccactatcgggcatgcctgtatgccggagttaagatcgccggaacaaatgccgaagtcatgccggcacagtgggagttccagatcgggccatgcgagggaatcagcatgggcgaccacctgtgggtcgcgaggtttatcctgcatagagtctgtgaagatttcggggtaatcgcgacatttgatcctaaacccattcctggcaattggaatggcgcaggctgccacactaacttctccaccaaggcgatgagggaggaaaacgggctgaagtacattgaggaagcaatcgaaaaactgtctaaaagacaccagtaccacattcgcgcatacgatcccaaagggggtctcgataatgccaggaggcttactggcttccacgaaacttcaaatattaacgacttctccgccggagtggccaaccggtcagcctcaatcaggataccgagaaccgtcggacaggagaaaaagggctatttcgaggacagaaggcctagcgccaactgtgatcccttctcagttacagaggccttgatacggacttgtttgctcaacgaaactggcgatgagccatttcagtataagaactag

SEQ ID NO: 285890 - DNA, 1122 bp, Artificial Sequence
  derived and/or modified sequence
atgaccacgtcagcgagttcccacttaaataaaggcatcaaacaggtgtatatgagcttgccacagggcgaaaaagttcaagctatgtatatatggatcgacggcaccggcgaaggcctccggtgcaagacccgaacactcgacagcgagcccaaatgcgtggaggagctgcccgaatggaactttgacggatcgtccaccctgcagagcgagggttctaattcggacatgtacctggtgcccgctgctatgtttagagatcctttccggaaggatccgaataaactcgtgctgtgcgaagtgtttaaatacaatcgcaggcccgctgaaacgaaccttaggcacacatgcaagcgcataatggacatggtgtctaatcagcatccctggttcggcatggaacaggagtatacgctaatgggtacagatggacacccattcgggtggccttccaacggattccctggaccccaggggccatactactgcggtgtcggggcagatagggcttacggcagagacattgtggaagcacattacagggcgtgtttatacgccggagttaagatcgccggtacaaacgctgaggtaatgcctgcccagtgggaattccagatcggcccatgtgaagggatcagcatgggcgaccatctgtgggtggccaggtttatcctccacagggtgtgtgaggatttcggggtgattgcaacgttcgatcccaagcccatcccgggaaattggaacggcgcagggtgtcatacaaatttctcaactaaggccatgcgcgaagaaaatggcctgaagtacatcgaggaagcgattgaaaagttatctaagagacaccagtatcacatacgcgcatacgatcctaaaggaggcctagacaatgcaagacgcctcaccggcttccacgagacatctaatataaatgacttcagcgctggcgtcgcaaacaggagcgcgagcatacgcataccaagaactgtcggtcaggagaagaaaggatacttcgaagaccggagaccatccgctaattgtgacccctttagcgttaccgaagcactcattaggacctgtctactaaatgagaccggcgatgagccatttcagtataagaattag

SEQ ID NO: 285891 - DNA, 1122 bp, Artificial Sequence
  derived and/or modified sequence
atgaccacttctgccagctcccatctgaacaagggcataaaacaagtctacatgagtttaccccagggagagaaggtgcaagccatgtacatctggatcgacggcaccggggagggactgcgatgcaagacacggacactggacagcgaaccaaaatgcgtggaggaattgcctgagtggaattttgatgggagtagtaccttgcagagtgagggaagcaattcggacatgtatctagtccctgcagcgatgtttagggatcctttcaggaaggatccaaacaaactggtcctatgtgaggtttttaagtacaatcggcgtcccgcagaaaccaatctgagacacacgtgtaagaggattatggacatggtgagcaatcaacacccctggttcggaatggagcaagaatacactctcatggggacagacggacacccattcggctggccttcaaatgggtttcctggccctcagggtccttactactgcggagttggggcagatcgtgcctacggacgcgatattgtggaggcgcactaccgcgcttgcctatacgcgggagtaaagatcgccggaaccaacgccgaggtgatgcctgcgcagtgggagtttcagattggcccatgtgaagggatttctatgggagaccatctgtgggtggcccgtttcatccttcaccgtgtgtgcgaagattttggagttatcgccacctttgatcccaagccaataccgggtaactggaacggcgcagggtgtcataccaacttcagcaccaaggccatgcgagaagagaacggtctgaaatatatagaggaagccattgagaaactctcaaagcgccaccagtaccacattcgcgcatatgaccctaaaggaggactcgataacgccaggcgtttgaccggtttccatgaaacttccaatatcaacgatttctcagctggcgttgctaatagatcagccagcatccgtattccaaggaccgtgggccaagaaaaaaaagggtacttcgaggatagaagacctagtgccaactgtgacccattttccgttaccgaggctctgattcggacatgtctgctcaatgagaccggtgatgaacccttccaatacaagaactag

SEQ ID NO: 285892 - DNA, 1122 bp, Artificial Sequence
  derived and/or modified sequence
atgacgacctctgctagtagccatctgaacaaaggaatcaagcaagtgtacatgtccttgcctcagggtgagaaagtccaagcaatgtacatctggatcgatgggaccggcgagggacttaggtgtaagacaagaacattggacagcgagcccaagtgcgtggaagaattgcccgaatggaattttgatggatctagcaccctgcagtcagaggggagtaacagtgatatgtacctggttcctgccgctatgtttcgggatccgtttcgtaaggatcccaacaagttagtcttatgcgaggttttcaagtacaaccgacgccctgccgaaactaacctccggcacacatgtaaaaggatcatggacatggttagtaatcagcacccatggttcggaatggaacaggagtacactctaatgggcaccgacgggcatccattcggttggccatctaacggtttccctggacctcagggaccttactactgtggtgtgggcgctgatcgtgcatacggcagggatatcgtggaagctcactatcgtgcatgcttgtatgccggagtgaagatcgctgggactaacgccgaggtcatgcctgctcaatgggagtttcaaatcggcccttgtgagggtatcagcatgggcgatcatctttgggttgcgagatttatcctccaccgcgtgtgtgaggactttggcgttatagcaacttttgaccctaagcctattccaggtaactggaacggggctggctgtcacacaaacttcagcaccaaggccatgcgggaggagaatggcctcaagtacatagaggaggcaattgaaaagctgtctaaacgacaccagtaccacattagagcctacgatcccaaggggggattggacaatgctcgaaggctgaccggctttcacgagactagtaacatcaatgattttagcgcaggcgtggccaatcgctcagccagcattcggattccacggacggttggccaggaaaagaagggatacttcgaggataggcgaccctccgccaattgcgaccctttctccgttacggaagccctgatccgcacctgcttacttaacgaaacaggcgatgagcccttccaatacaagaattag

SEQ ID NO: 285893 - DNA, 702 bp, Artificial Sequence
  derived and/or modified sequence
atgacaacctccgcaagttcccatctcaacaaagggatcaaacaagtatacatgtccttaccacagggcgaaaaggtgcaggccatgtacatctggatagatgggactggggaaggcttacgctgcaagactaggactcttgattcagagccaaagtgcgttgaagagctgcctgagtggaactttgacggatcaagcacactacagtctgagggcagtaattcagatatgtatctcgtgccggctgctatgttccgtgatcctttcagaaaggaccctaataaactggtgctctgtgaggtcttcaagtataacagacgacctgcggaaacaaacctgagacacacgtgtaagagaataatggacatggtaagtaatcagcatccatggttcggaatggagcaggagtatacactcatgggcaccgatggacatccctttggctggcccagtaacggtttccagggcccaagagtgcatatcaccgtcgtttgggaacagacagagccaatggccggaaccagctggcgaccaattactggacccgcttgcatgctagagagtagactcagagggctgatgccccgttcctgtctcccatctgggaactttcggctcgacctggtcaaggagtccgcatgggagatcatatcagggtggccggtaagctcttgtatcgtctgcgtcaagactctcgagtag

SEQ ID NO: 285894 - DNA, 1122 bp, Artificial Sequence
  derived and/or modified sequence
atgaccaccagcgccagcagccacctgaacaagggcatcaagcaggtgtacatgagcctgccccagggcgagaaggtgcaggccatgtacatctggatcgacggcaccggcgagggcctgagatgcaagaccagaaccctggacagcgagcccaagtgcgtggaggagctgcccgagtggaacttcgacggcagcagcaccctgcagagcgagggcagcaacagcgacatgtacctggtgcccgccgccatgttcagagaccccttcagaaaggaccccaacaagctggtgctgtgcgaggtgttcaagtacaacagaagacccgccgagaccaacctgagacacacctgcaagagaatcatggacatggtgagcaaccagcacccctggttcggcatggagcaggagtacaccctgatgggcaccgacggccaccccttcggctggcccagcaacggcttccccggcccccagggcccctactactgcggcgtgggcgccgacagagcctacggcagagacatcgtggaggcccactacagagcctgcctgtacgccggcgtgaagatcgccggcaccaacgccgaggtgatgcccgcccagtgggagttccagatcggcccctgcgagggcatcagcatgggcgaccacctgtgggtggccagattcatcctgcacagagtgtgcgaggacttcggcgtgatcgccaccttcgaccccaagcccatccccggcaactggaacggcgccggctgccacaccaacttcagcaccaaggccatgagagaggagaacggcctgaagtacatcgaggaggccatcgagaagctgagcaagagacaccagtaccacatcagagcctacgaccccaagggcggcctggacaacgccagaagactgaccggcttccacgagaccagcaacatcaacgacttcagcgccggcgtggccaacagaagcgccagcatcagaatccccagaaccgtgggccaggagaagaagggctacttcgaggacagaagacccagcgccaactgcgaccccttcagcgtgaccgaggccctgatcagaacctgcctgctgaacgagaccggcgacgagcccttccagtacaagaactag

SEQ ID NO: 285895 - DNA, 702 bp, Artificial Sequence
  derived and/or modified sequence
atgaccaccagcgccagcagccacctgaacaagggcatcaagcaggtgtacatgagcctgccccagggcgagaaggtgcaggccatgtacatctggatcgacggcaccggcgagggcctgagatgcaagaccagaaccctggacagcgagcccaagtgcgtggaggagctgcccgagtggaacttcgacggcagcagcaccctgcagagcgagggcagcaacagcgacatgtacctggtgcccgccgccatgttcagagaccccttcagaaaggaccccaacaagctggtgctgtgcgaggtgttcaagtacaacagaagacccgccgagaccaacctgagacacacctgcaagagaatcatggacatggtgagcaaccagcacccctggttcggcatggagcaggagtacaccctgatgggcaccgacggccaccccttcggctggcccagcaacggcttccagggccccagagtgcacatcaccgtggtgtgggagcagaccgagcccatggccggcaccagctggagacccatcaccggccccgcctgcatgctggagagcagactgagaggcctgatgcccagaagctgcctgcccagcggcaacttcagactggacctggtgaaggagagcgcctgggagatcatcagcggctggcccgtgagcagctgcatcgtgtgcgtgaagaccctggagtag

SEQ ID NO: 285896 - DNA, 708 bp, Artificial Sequence
  derived and/or modified sequence
atggtgagaggccagctgtacaagcacttcgacctggagagaaagaacgccaagcaggccgaggccagactggaccagagactgcagagactgaaggtgatctgcctgtaccacgtgaagctgctgacctgggagcagagacagctgcagaaggagctgcagagactgcagcaggagaccatgaagaagaagttcagcagctacctgggcaacggcttccagaagagacccgaggacgtgctggtgttcagcccccagggcagacagaagcacagagccccccaggccaagaagatgagagccctggccaccagaatggcccaggacacctgcaagagcaagagccaggtgccccccagccacgacgccggcctgaaggaccccatgaagagcaagaagcagcccctgagccagaacaacagaaccgcctgcttcatcaaggagcagccccaggcccaggagaaggacagcgtgaaccccagcaaggacgtggaccccagcaagggcatcagcgtgccctgccagaaccaggaggtgagcaccaacaccatcgagcagggccccatcagcagcgcccagcccctggccttcaacggcgagaccatcctgtacagcgagagaaacaccagaaacctgctgccccccaccctgagcagcatgaagcagagcaacagaggcagacaggccatcagcgacagaaccgactag

SEQ ID NO: 285897 - DNA, 708 bp, Artificial Sequence
  derived and/or modified sequence
atggtccgagggcagctgtataagcacttcgacttggaacgcaagaacgcgaagcaggcggaggctaggctggaccagaggcttcagagactcaaagtgatatgcctctatcatgtaaagctgctgacttgggaacaacgacagcttcagaaagagctacagaggcttcagcaggaaactatgaagaagaagttttccagttatctgggcaacggctttcaaaagaggccagaggatgtgctagtgttctctccacagggaagacaaaaacatcgggcccctcaggccaagaagatgcgcgccctggccactcgcatggcacaggatacatgcaagagcaagagccaggtacccccgagtcatgatgcaggactcaaagaccccatgaaaagtaaaaagcagcctttgtcccaaaacaatcgcacggcttgttttattaaagagcagccgcaagctcaggagaaagatagcgtgaatcccagtaaggatgtggatcctagtaagggaatctcagtgccttgtcagaatcaggaggttagtaccaacaccattgaacaagggcccatctcttccgcgcagcctctcgcctttaacggcgaaacaattctgtatagtgagcggaatacgcggaatctgctgccaccaaccctctcctcaatgaagcagtcaaacaggggacgccaggccatctctgatcgcacggattag

SEQ ID NO: 285898 - DNA, 708 bp, Artificial Sequence
  derived and/or modified sequence
atggtgcggggccagctgtacaagcactttgacctggagaggaagaatgccaagcaggccgaggcccggctggaccagaggctgcagaggctgaaggtgatctgcctgtaccacgtgaagctgctgacctgggagcagaggcagctgcagaaggagctgcagaggctgcagcaggagaccatgaagaagaagttcagcagctacctgggcaatggcttccagaagaggccagaagatgtgctggtgttcagcccccagggccggcagaagcaccgggccccccaggccaagaagatgagggccctggccaccaggatggcccaggacacctgcaagagcaagagccaggtgccccccagccatgatgctggcctgaaggaccccatgaagagcaagaagcagcccctgagccagaacaacagaacagcctgcttcatcaaggagcagccccaggcccaggagaaggacagcgtgaaccccagcaaggatgtggaccccagcaagggcatctctgtgccctgccagaaccaggaggtgtccaccaacaccatcgagcagggccccatcagcagcgcccagcccctggccttcaacggggagaccatcctgtacagcgagaggaacaccaggaacctgctgccccccaccctgagctccatgaagcagagcaacagaggccggcaggccatcagtgacagaacagactag

SEQ ID NO: 285899 - DNA, 708 bp, Artificial Sequence
  derived and/or modified sequence
atggtgcggggccagctgtacaagcacttcgacctggagcggaagaacgccaaacaagctgaagccaggttggaccagcgcctccagcgacttaaggtgatctgtctgtaccacgtgaagctgttaacgtgggaacaacggcagttgcagaaagagctgcagcgcttacagcaggaaaccatgaaaaaaaaatttagctcttacttgggcaatggcttccagaaaagaccagaagacgtacttgtattctctcctcagggcagacagaaacaccgggctccccaggcaaagaaaatgagggcccttgccactcgcatggctcaggacacgtgcaagagtaaaagtcaggtgcctcctagtcatgatgcagggctaaaggaccccatgaagtcaaaaaagcaacccctgagtcaaaataaccgcacggcatgttttataaaagaacagccccaggcgcaagagaaggactcggtgaacccttcaaaggacgtcgatccgtctaaaggcatttcggttccttgtcagaaccaagaagtgtccaccaatacaatcgagcaaggccccatcagcagcgcccaaccgcttgcgtttaatggcgagaccatcctctatagcgaacggaacactagaaaccttctgcctccaacgctgtccagtatgaagcagtcaaatcggggcaggcaagcgatctcagatcggactgattag

SEQ ID NO: 285900 - DNA, 708 bp, Artificial Sequence
  derived and/or modified sequence
atggtcaggggtcaactctacaaacactttgacctggagcggaaaaatgccaagcaggcggaggcccgactggaccaacgattacagagactgaaggtgatatgtctgtatcatgtaaaactcttgacctgggaacagagacagctacagaaagaactccagcgtctgcagcaggagacaatgaaaaagaagttttctagctacctgggaaatggatttcaaaagcggcctgaggacgtgctcgtattctctcctcaagggaggcaaaaacaccgcgcaccacaggccaagaagatgcgggctttggcaacaaggatggcccaggacacttgcaaatccaagtcccaagttcccccttcccatgatgccggtctgaaggatcctatgaagtcgaagaaacagcccctttcccagaacaaccgaaccgcttgctttattaaggaacagccccaggcacaagaaaaagattcagtgaaccccagcaaggacgtcgacccatcaaaaggaatttccgtgccgtgtcagaaccaggaggtttcaaccaatacgatcgaacagggacctatatctagcgcccaaccactcgcctttaatggagaaacaatactgtatagcgagcgcaatactaggaacctcctcccacctacactgagtagcatgaagcagagcaaccgcggaaggcaggctattagcgataggaccgactag

SEQ ID NO: 285901 - protein, 673 aa, Artificial Sequence
  derived and/or modified sequence
MGKKYKNIVLLKGLEVINDYHFRMVKSLLSNDLKLNLKMREEYDKIQIADLMEEKFRGDAGLGKLIKIFEDIPTLEDLAETLKKEKLKVKGPALSRKRKKEVDATSPAPSTSSTVKTEGAEATPGAQKRKKSTKEKAGPKGSKVSEEQTQPPSPAGAGMSTAMGRSPSPKTSLSAPPNSSSTENPKTVAKCQVTPRRNVLQKRPVIVKVLSTTKPFEYETPEMEKKIMFHATVATQTQFFHVKVLNTSLKEKFNGKKIIIISDYLEYDSLLEVNEESTVSEAGPNQTFEVPNKIINRAKETLKIDILHKQASGNIVYGVFMLHKKTVNQKTTIYEIQDDRGKMDVVGTGQCHNIPCEEGDKLQLFCFRLRKKNQMSKLISEMHSFIQIKKKTNPRNNDPKSMKLPQEQRQLPYPSEASTTFPESHLRTPQMPPTTPSSSFFTKLKPRLKTEPEEVSIEDSAQSDLKEVMVLNATESFVYEPKEQKKMFHATVATENEVFRVKVFNIDLKEKFTPKKIIAIANYVCRNGFLEVYPFTLVADVNADRNMEIPKGLIRSASVTPKINQLCSQTKGSFVNGVFEVHKKNVRGEFTYYEIQDNTGKMEVVVHGRLTTINCEEGDKLKLTCFELAPKSGNTGELRSVIHSHIKVIKTRKNKKDILNPDSSMETSPDFFF

SEQ ID NO: 285902 - protein, 414 aa, Artificial Sequence
  derived and/or modified sequence
MGKKYKNIVLLKGLEVINDYHFRMVKSLLSNDLKLNLKMREEYDKIQIADLMEEKFRGDAGLGKLIKIFEDIPTLEDLAETLKKEKLKVKGPALSRKRKKEVDATSPAPSTSSTVKTEGAEATPGAQKRKKSTKEKAGPKGSKVSEEQTQPPSPAGAGMSTAMGRSPSPKTSLSAPPNSSSTENPKTVAKCQVTPRRNVLQKRPVIVKVLSTTKPFEYETPEMEKKIMFHATVATQTQFFHVKVLNTSLKEKFTPKKIIAIANYVCRNGFLEVYPFTLVADVNADRNMEIPKGLIRSASVTPKINQLCSQTKGSFVNGVFEVHKKNVRGEFTYYEIQDNTGKMEVVVHGRLTTINCEEGDKLKLTCFELAPKSGNTGELRSVIHSHIKVIKTRKNKKDILNPDSSMETSPDFFF

SEQ ID NO: 285903 - protein, 180 aa, Artificial Sequence
  derived and/or modified sequence
MGKKYKNIVLLKGLEVINDYHFRMVKSLLSNDLKLNLKMREEYDKIQIADLMEEKFRGDAGLGKLIKIFEDIPTLEDLAETLKKEKLKVKGPALSRKRKKEVDATSPAPSTSSTVKTEGAEATPGAQKRKKSTKEKAGPKGSKVSEEQTQPPSPAGAGMSTAMGRSPSPKTSLSAPPNSS

SEQ ID NO: 285904 - protein, 494 aa, Artificial Sequence
  derived and/or modified sequence
  misc_feature (1)..(1): Xaa can be any naturally occurring amino acid
XSTENPKTVAKCQVTPRRNVLQKRPVIVKVLSTTKPFEYETPEMEKKIMFHATVATQTQFFHVKVLNTSLKEKFNGKKIIIISDYLEYDSLLEVNEESTVSEAGPNQTFEVPNKIINRAKETLKIDILHKQASGNIVYGVFMLHKKTVNQKTTIYEIQDDRGKMDVVGTGQCHNIPCEEGDKLQLFCFRLRKKNQMSKLISEMHSFIQIKKKTNPRNNDPKSMKLPQEQRQLPYPSEASTTFPESHLRTPQMPPTTPSSSFFTKLKPRLKTEPEEVSIEDSAQSDLKEVMVLNATESFVYEPKEQKKMFHATVATENEVFRVKVFNIDLKEKFTPKKIIAIANYVCRNGFLEVYPFTLVADVNADRNMEIPKGLIRSASVTPKINQLCSQTKGSFVNGVFEVHKKNVRGEFTYYEIQDNTGKMEVVVHGRLTTINCEEGDKLKLTCFELAPKSGNTGELRSVIHSHIKVIKTRKNKKDILNPDSSMETSPDFFF

SEQ ID NO: 285905 - DNA, 2022 bp, Artificial Sequence
  derived and/or modified sequence
atgggaaaaaagtacaagaacatcgtcctgctaaaagggctggaggttatcaacgattaccactttagaatggtgaaatctttactttcgaacgacctgaagttaaatctaaagatgagggaggagtacgacaaaatacagattgccgatctgatggaggaaaaattccgaggcgatgccgggctgggaaaattgatcaagatttttgaggacatccccacccttgaggatcttgcagaaacattaaagaaggaaaaactaaaagtgaaaggtcctgcccttagtcggaagcggaagaaagaggtcgacgccacaagccccgctccatcgacgtcttccacagtgaaaacagagggggccgaggctactcctggcgctcaaaaacgtaaaaaatccacaaaggaaaaagccggtcctaaggggtccaaggtgagcgaggagcagacacagcctccaagcccggctggggcgggaatgagtaccgctatgggccgcagcccttcacccaaaacttctttgtccgccccacccaattcctcttcgacggagaatcctaaaaccgtagcaaagtgtcaggttactccaaggaggaatgtgctgcagaaacgcccggtcatcgttaaggtgctgagcactaccaaaccatttgagtacgagacacctgagatggagaagaagataatgttccacgccacagttgccactcagacacagttctttcacgtcaaagtgctaaatacaagccttaaggagaagtttaatggcaagaagatcatcattatctccgactatctggaatatgactccctgctcgaggtcaatgaagagagtaccgtttctgaggctggacccaaccagacttttgaagtgcccaataaaattatcaatagggcgaaagaaacattaaagatcgatatccttcacaaacaggcctctggaaatattgtgtacggagtgtttatgctgcacaagaagactgttaaccagaaaaccactatttacgagatccaggatgaccgggggaagatggatgtcgtgggaacaggccagtgtcacaacattccttgtgaggaaggagataagctgcagctgttctgctttaggcttcgcaaaaaaaaccagatgtccaagctgatttccgaaatgcacagctttattcaaataaaaaagaagaccaacccaaggaacaatgacccaaagagcatgaagttgccacaggagcagcgacagctcccttaccctagcgaagcctccacaactttccctgagagccacctgagaactccacagatgcccccgaccacacccagctctagtttcttcacgaagttgaaaccccgactaaaaactgaaccagaagaagtgagtatcgaagatagtgctcagtcagacctgaaggaggtgatggtcctgaatgccaccgagagctttgtttatgagccaaaagaacagaaaaaaatgtttcatgccaccgtggctaccgaaaacgaagtttttcgggttaaagtgtttaacattgacctaaaagaaaagtttactccaaaaaagatcattgcaattgccaactacgtgtgcagaaatgggtttctcgaggtatatccgttcaccctggttgcagacgtcaatgccgaccggaatatggaaattcctaaagggctgattcggagcgcatccgtaacacctaaaattaatcaactctgtagtcaaaccaagggttcttttgtcaacggtgtgttcgaggttcataagaaaaacgtgaggggagaattcacgtactacgagatccaagacaataccgggaagatggaagtagtggtgcatgggaggttgacgacaataaactgcgaggaaggcgacaaacttaagcttacatgctttgagctcgccccgaaatctggaaataccggtgagctgaggtccgtgatacattctcacataaaggtgattaagacccgtaaaaacaaaaaggacatcctcaatcctgactcctcaatggaaacctccccagatttctttttttag

SEQ ID NO: 285906 - DNA, 1245 bp, Artificial Sequence
  derived and/or modified sequence
atggggaagaaatacaagaacatcgtcctattaaagggcttggaagtcattaacgactatcacttcaggatggtgaaaagcctgctgtctaatgacttgaagctgaacctaaaaatgcgggaggaatacgacaagattcagattgcagatctgatggaggagaaattccgcggcgacgccggcctggggaaactcataaaaattttcgaggacattccgactctggaggacctggctgagactttgaaaaaggagaaactgaaggtcaaaggccctgccctgagcagaaaaaggaaaaaggaagttgacgctacatctccagccccttcgactagttcaaccgtgaagactgagggagccgaggccactccgggagcgcagaagagaaagaagagcaccaaggagaaagccgggccaaagggaagtaaagtgtcagaagaacagactcagcccccgagccctgcaggagctggtatgtctaccgccatggggaggtcacccagccctaaaacaagcttgagcgccccccctaactcaagttctaccgaaaatccaaagacggtggcaaagtgccaggtgactccacgtaggaacgtgctacagaagcgaccggtgatcgtaaaggtgctcagcacgacaaagccattcgaatatgaaacccctgagatggagaagaagatcatgttccatgcaaccgtggccacccagacccagtttttccacgtgaaggtcctgaacaccagtctgaaggagaaattcacacccaagaagatcatcgcgattgctaattacgtgtgcaggaatggctttctggaggtgtaccccttcaccctggttgccgacgtgaacgcggacagaaatatggagatccctaagggcctgattagatctgcgtcagtgactcctaagattaaccagctatgcagtcagaccaaaggatccttcgtcaacggggtgttcgaagtgcacaagaagaatgtacggggagagtttacttattacgagattcaagataacaccgggaagatggaggtggtagtccacgggcgcctgacaactatcaattgtgaggagggggacaagctgaagctcacttgcttcgaactcgcaccaaagagcggaaacaccggggaactccgatccgtgatccattcacatataaaggtgatcaaaaccagaaaaaataagaaagatatcttaaatcccgattctagtatggagacaagcccagatttcttcttttag

SEQ ID NO: 285907 - DNA, 384 bp, Artificial Sequence
  derived and/or modified sequence
atggggaaaaagtataagaatattgtactgttgaaaggtctggaggtaattaatgattaccattttagaatggttaagagtctcctatctaatgatctgaagctcaacctaaagatgagggaagagtatgataaaattcagatcgccgacctgatggaagaaaaatttaggggagacgctgggctcggtaaattaatcaaaattttcgaagatattcctacactggaggatctcgctgagacactcaaaaaagagaaacttaaagttaagggacccgccctgagccgtaagcgcaagaaggaggtcgatgccacatcccctgcacccagcaccagttctacagtcaagactgagggggctgaggccacacctggtgcacagtag

SEQ ID NO: 285908 - DNA, 543 bp, Artificial Sequence
  derived and/or modified sequence
atgggcaagaagtacaagaacattgtcctcctgaagggtctggaggtcataaacgactatcattttcgaatggtcaagtctcttctgtcaaacgacctcaaactcaatttaaaaatgcgcgaagagtacgataagattcagattgcagacttaatggaagagaaatttcgcggcgatgcaggtctggggaaactgataaagatatttgaggatatacccactctggaagacttggccgagacccttaaaaaagagaaattgaaggtgaagggccccgccctttccaggaagcgcaaaaaagaggtcgacgcaacgtcaccggcaccttctacctcctctacagttaaaaccgagggggccgaagctacccccggcgcccagaaacggaagaaaagcacgaaagagaaagctggtcccaagggctcaaaagtaagcgaagaacaaacccagcccccgtcacctgccggggctggcatgtctacagccatggggaggtctcccagcccaaagaccagcctgtccgctcctcctaatagtagctag

SEQ ID NO: 285909 - DNA, 1485 bp, Artificial Sequence
  derived and/or modified sequence
taatccacggagaaccctaaaacagtggcaaaatgtcaagtgacccctagaagaaatgtgttacaaaaaaggccagtgatcgtaaaagttctgtcaacaaccaaaccgtttgagtatgagacccctgagatggaaaaaaaaattatgtttcatgctactgtggcaacacagacccagttctttcatgttaaggttcttaacactagcttgaaggaaaaatttaatggcaaaaagatcatcatcatttccgactacctcgagtacgatagtctcctcgaggttaacgaggagtccacagtcagcgaagcgggaccaaaccagacgttcgaggttccaaacaaaatcatcaaccgggcgaaggaaacactaaaaatcgatattctgcacaagcaggccagcggcaatatcgtgtacggcgtgttcatgcttcataagaagaccgttaaccagaaaacgaccatttacgaaattcaagatgatagaggtaaaatggatgttgtgggcactggccaatgtcacaacattccatgcgaggaaggcgacaagctgcaactattttgcttccgcctgaggaaaaagaaccagatgtcaaaactgataagtgagatgcacagtttcattcagattaagaaaaaaacaaaccccagaaacaatgatccaaagtccatgaaacttcctcaggagcagcgtcagctgccatacccctctgaagccagcacgacatttccggagtcacacctgcgaaccccgcagatgccacctacaaccccctcctccagcttttttacaaagctgaagcctcgcctgaaaactgagccagaagaggtgtcaatcgaagacagtgcacagagcgacctgaaggaggtcatggtcctgaacgccactgaaagcttcgtatatgagcctaaagaacagaaaaaaatgttccatgctactgtggccacagagaatgaggtcttcagagtgaaggttttcaacatcgaccttaaggagaagttcacaccaaaaaaaattatcgccattgcaaactacgtctgcaggaacggattcctggaggtttatcctttcacactggtggccgacgtgaatgccgataggaacatggaaatccctaaggggcttatccggtcagccagtgtgacacccaaaatcaaccagctctgtagccaaaccaaggggagttttgttaacggggtcttcgaggtgcacaagaagaatgttcggggggaatttacttattacgaaatccaagacaataccggaaagatggaggtcgtggttcatgggcggctcaccaccatcaattgtgaagaaggggataaactcaaactgacatgctttgaacttgcccccaagtcagggaataccggagagctgagatctgtgatccattcccatatcaaggttatcaaaaccagaaaaaataaaaaagacatactgaacccggatagcagcatggagacttcccctgacttcttcttctag

SEQ ID NO: 285910 - DNA, 2564 bp, Artificial Sequence
  derived and/or modified sequence
attgtttcctactccattttctctggggcaatagcagaataggagcaagccagcactagtcagctaactaagtgactcaaccaaggccttttttccttgttatctttgcagatacttcattttcttagcgtttctggagattacaacatcctgcggttccgtttctgggaactttactgatttatctcccccctcacacaaataagcattgattcctgcatttctgaagatctcaagatctggactactgttgaaaaaatttccagtgaggctcacttatgtctgtaaagatgggaaaaaaatacaagaacattgttctactaaaaggattagaggtcatcaatgattatcattttagaatggttaagtccttactgagcaacgatttaaaacttaatttaaaaatgagagaagagtatgacaaaattcagattgctgacttgatggaagaaaagttccgaggtgatgctggtttgggcaaactaataaaaattttcgaagatataccaacgcttgaagacctggctgaaactcttaaaaaagaaaagttaaaagtaaaaggaccagccctatcaagaaagaggaagaaggaagtggatgctacttcacctgcaccctccacaagcagcactgtcaaaactgaaggagcagaggcaactcctggagctcagaaaagaaaaaaatcaaccaaagaaaaggctggacccaaagggagtaaggtgtccgaggaacagactcagcctccctctcctgcaggagccggcatgtccacagccatgggccgttccccatctcccaagacctcattgtcagctccacccaacagttcttcaactgagaacccgaaaacagtggccaaatgtcaggtaactcccagaagaaatgttctccaaaaacgcccagtgatagtgaaggtactgagtacaacaaagccatttgaatatgagaccccagaaatggagaaaaaaataatgtttcatgctacagtggctacacagacacagttcttccatgtgaaggttttaaacaccagcttgaaggagaaattcaatggaaagaaaatcatcatcatatcagattatttggaatatgatagtctcctagaggtcaatgaagaatctactgtatctgaagctggtcctaaccaaacgtttgaggttccaaataaaatcatcaacagagcaaaggaaactctgaagattgatattcttcacaaacaagcttcaggaaatattgtatatggggtatttatgctacataagaaaacagtaaatcagaagaccacaatctacgaaattcaggatgatagaggaaaaatggatgtagtggggacaggacaatgtcacaatatcccctgtgaagaaggagataagctccaacttttctgctttcgacttagaaaaaagaaccagatgtcaaaactgatttcagaaatgcatagttttatccagataaagaaaaaaacaaacccgagaaacaatgaccccaagagcatgaagctaccccaggaacagcgtcagcttccatatccttcagaggccagcacaaccttccctgagagccatcttcggactcctcagatgccaccaacaactccatccagcagtttcttcaccaagttgaaaccaagactgaagactgaacctgaagaagtttccatagaagacagtgcccagagtgacctcaaagaagtgatggtgctgaacgcaacagaatcatttgtatatgagcccaaagagcagaagaaaatgtttcatgccacagtggcaactgagaatgaagtcttccgagtgaaggtttttaatattgacctaaaggagaagttcaccccaaagaagatcattgccatagcaaattatgtttgccgcaatgggttcctggaggtatatcctttcacacttgtggctgatgtgaatgctgaccgaaacatggagatcccaaaaggattgattagaagtgccagcgtaactcctaaaatcaatcagctttgctcacaaactaaaggaagttttgtgaatggggtgtttgaggtacataagaaaaatgtaaggggtgaattcacttattatgaaatacaagataatacagggaagatggaagtggtggtgcatggacgactgaccacaatcaactgtgaggaaggagataaactgaaactcacctgctttgaattggcaccgaaaagtgggaataccggggagttgagatctgtaattcatagtcacatcaaggtcatcaagaccaggaaaaacaagaaagacatactcaatcctgattcaagtatggaaacttcaccagactttttcttctaaaatctggatgtcattgacgataatgtttatggagataaggtctaagtgcctaaaaaaatgtacatatacctggttgaaatacaacactatacatacacaccaccatatatactagctgttaatcctatggaatggggtattgggagtgcttttttaatttttcatagtttttttttaataaaatggcatattttgcatctacaacttctataatttgaaaaaataaataaacattatcttttttgtgaaagg

SEQ ID NO: 285911 - DNA, 2099 bp, Artificial Sequence
  derived and/or modified sequence
tcatcaacatgcattcccagaaatgccatgaaaggaaagaccaagtcttgactgagaaacggaccgggcagatgagggactcccacatatacctgtttcctgctcttcccgaagacattttgccacaagcatataattcagcttctgaaaaatacggtcttcctcactgcagacaccatgccagcgttttaaatcaagttggctactcgtgctgtttagagtatgcagtttgcctgtggcaatattaaactcatctggaagaaagcacttaaacctatccagttcctcatcggtgatgttatccaggctggttagcaagagtatctccttatatttactctccatctcacgacttttcagcttataagggatccaaactatgtaagattataccaccaaaagtgattcaacattcaaaatgaagcaagatacttcattttcttagcgtttctggagattacaacatcctgcggttccgtttctgggaactttactgatttatctcccccctcacacaaataagcattgattcctgcatttctgaagatctcaagatctggactactgttgaaaaaatttccagtgaggctcacttatgtctgtaaagatgggaaaaaaatacaagaacattgttctactaaaaggattagaggtcatcaatgattatcattttagaatggttaagtccttactgagcaacgatttaaaacttaatttaaaaatgagagaagagtatgacaaaattcagattgctgacttgatggaagaaaagttccgaggtgatgctggtttgggcaaactaataaaaattttcgaagatataccaacgcttgaagacctggctgaaactcttaaaaaagaaaagttaaaagtaaaaggaccagccctatcaagaaagaggaagaaggaagtggatgctacttcacctgcaccctccacaagcagcactgtcaaaactgaaggagcagaggcaactcctggagctcagaaaagaaaaaaatcaaccaaagaaaaggctggacccaaagggagtaaggtgtccgaggaacagactcagcctccctctcctgcaggagccggcatgtccacagccatgggccgttccccatctcccaagacctcattgtcagctccacccaacagttcttcaactgagaacccgaaaacagtggccaaatgtcaggtaactcccagaagaaatgttctccaaaaacgcccagtgatagtgaaggtactgagtacaacaaagccatttgaatatgagaccccagaaatggagaaaaaaataatgtttcatgctacagtggctacacagacacagttcttccatgtgaaggttttaaacaccagcttgaaggagaagttcaccccaaagaagatcattgccatagcaaattatgtttgccgcaatgggttcctggaggtatatcctttcacacttgtggctgatgtgaatgctgaccgaaacatggagatcccaaaaggattgattagaagtgccagcgtaactcctaaaatcaatcagctttgctcacaaactaaaggaagttttgtgaatggggtgtttgaggtacataagaaaaatgtaaggggtgaattcacttattatgaaatacaagataatacagggaagatggaagtggtggtgcatggacgactgaccacaatcaactgtgaggaaggagataaactgaaactcacctgctttgaattggcaccgaaaagtgggaataccggggagttgagatctgtaattcatagtcacatcaaggtcatcaagaccaggaaaaacaagaaagacatactcaatcctgattcaagtatggaaacttcaccagactttttcttctaaaatctggatgtcattgacgataatgtttatggagataaggtctaagtgcctaaaaaaatgtacatatacctggttgaaatacaacactatacatacacaccaccatatatactagctgttaatcctatggaatggggtattgggagtgcttttttaatttttcatagtttttttttaataaaatggcatattttgcatctacaacttctataatttgaaaaaataaataaacattatcttttttgtg

SEQ ID NO: 285912 - DNA, 630 bp, Artificial Sequence
  derived and/or modified sequence
agactactcaggcgtgcactgcgaggtggagatctgacttctcttgttcccgcttaagactgcctcctgtatacttcattttcttagcgtttctggagattacaacatcctgcggttccgtttctgggaactttactgatttatctcccccctcacacaaataagcattgattcctgcatttctgaagatctcaagatctggactactgttgaaaaaatttccagtgaggctcacttatgtctgtaaagatgggaaaaaaatacaagaacattgttctactaaaaggattagaggtcatcaatgattatcattttagaatggttaagtccttactgagcaacgatttaaaacttaatttaaaaatgagagaagagtatgacaaaattcagattgctgacttgatggaagaaaagttccgaggtgatgctggtttgggcaaactaataaaaattttcgaagatataccaacgcttgaagacctggctgaaactcttaaaaaagaaaagttaaaagtaaaaggaccagccctatcaagaaagaggaagaaggaagtggatgctacttcacctgcaccctccacaagcagcactgtcaaaactgaaggagcagaggcaactcctggagctcag

SEQ ID NO: 285913 - DNA, 835 bp, Artificial Sequence
  derived and/or modified sequence
gcattttccaggattttcaagtcttcgatgctgtcatgttgagagtccactatccacgtttgtttatccaggaataatgcagaaaatctgagcattcgtgaatctaatcattgagatacttcattttcttagcgtttctggagattacaacatcctgcggttccgtttctgggaactttactgatttatctcccccctcacacaaataagcattgattcctgcatttctgaagatctcaagatctggactactgttgaaaaaatttccagtgaggctcacttatgtctgtaaagatgggaaaaaaatacaagaacattgttctactaaaaggattagaggtcatcaatgattatcattttagaatggttaagtccttactgagcaacgatttaaaacttaatttaaaaatgagagaagagtatgacaaaattcagattgctgacttgatggaagaaaagttccgaggtgatgctggtttgggcaaactaataaaaattttcgaagatataccaacgcttgaagacctggctgaaactcttaaaaaagaaaagttaaaagtaaaaggaccagccctatcaagaaagaggaagaaggaagtggatgctacttcacctgcaccctccacaagcagcactgtcaaaactgaaggagcagaggcaactcctggagctcagaaaagaaaaaaatcaaccaaagaaaaggctggacccaaagggagtaaggtgtccgaggaacagactcagcctccctctcctgcaggagccggcatgtccacagccatgggccgttccccatctcccaagacctcattgtcagctccacccaacagttctt

SEQ ID NO: 285914 - DNA, 1711 bp, Artificial Sequence
  derived and/or modified sequence
cttcaactgagaacccgaaaacagtggccaaatgtcaggtaactcccagaagaaatgttctccaaaaacgcccagtgatagtgaaggtactgagtacaacaaagccatttgaatatgagaccccagaaatggagaaaaaaataatgtttcatgctacagtggctacacagacacagttcttccatgtgaaggttttaaacaccagcttgaaggagaaattcaatggaaagaaaatcatcatcatatcagattatttggaatatgatagtctcctagaggtcaatgaagaatctactgtatctgaagctggtcctaaccaaacgtttgaggttccaaataaaatcatcaacagagcaaaggaaactctgaagattgatattcttcacaaacaagcttcaggaaatattgtatatggggtatttatgctacataagaaaacagtaaatcagaagaccacaatctacgaaattcaggatgatagaggaaaaatggatgtagtggggacaggacaatgtcacaatatcccctgtgaagaaggagataagctccaacttttctgctttcgacttagaaaaaagaaccagatgtcaaaactgatttcagaaatgcatagttttatccagataaagaaaaaaacaaacccgagaaacaatgaccccaagagcatgaagctaccccaggaacagcgtcagcttccatatccttcagaggccagcacaaccttccctgagagccatcttcggactcctcagatgccaccaacaactccatccagcagtttcttcaccaagttgaaaccaagactgaagactgaacctgaagaagtttccatagaagacagtgcccagagtgacctcaaagaagtgatggtgctgaacgcaacagaatcatttgtatatgagcccaaagagcagaagaaaatgtttcatgccacagtggcaactgagaatgaagtcttccgagtgaaggtttttaatattgacctaaaggagaagttcaccccaaagaagatcattgccatagcaaattatgtttgccgcaatgggttcctggaggtatatcctttcacacttgtggctgatgtgaatgctgaccgaaacatggagatcccaaaaggattgattagaagtgccagcgtaactcctaaaatcaatcagctttgctcacaaactaaaggaagttttgtgaatggggtgtttgaggtacataagaaaaatgtaaggggtgaattcacttattatgaaatacaagataatacagggaagatggaagtggtggtgcatggacgactgaccacaatcaactgtgaggaaggagataaactgaaactcacctgctttgaattggcaccgaaaagtgggaataccggggagttgagatctgtaattcatagtcacatcaaggtcatcaagaccaggaaaaacaagaaagacatactcaatcctgattcaagtatggaaacttcaccagactttttcttctaaaatctggatgtcattgacgataatgtttatggagataaggtctaagtgcctaaaaaaatgtacatatacctggttgaaatacaacactatacatacacaccaccatatatactagctgttaatcctatggaatggggtattgggagtgcttttttaatttttcatagtttttttttaataaaatggcatattttgcatctacaacttctataatttgaaaaaataaa

SEQ ID NO: 285915 - DNA, 2022 bp, Artificial Sequence
  derived and/or modified sequence
atgggcaagaagtacaagaacatcgtgctgctgaagggcctggaggtgatcaatgactaccacttcaggatggtgaagagcctgctgagcaatgacctgaagctgaacctgaagatgagggaggagtatgacaagatccagattgctgacctgatggaggagaagttcagaggagatgctggcctgggcaagctgatcaagatctttgaggacatccccaccctggaggacctggccgagaccctgaagaaggagaagctgaaggtgaagggccctgccctgagcaggaagaggaagaaggaggtggatgccaccagccctgcccccagcaccagcagcacagtgaagacagaaggagctgaggccacccctggggcccagaagaggaagaagagcaccaaggagaaggccggccccaagggcagcaaggtgtctgaggagcagacccagccccccagccctgctggagctggcatgagcacagccatgggccgcagccccagccccaagaccagcctgagcgccccacccaacagcagcagcacagagaaccccaagacagtggccaagtgccaggtgacccccaggagaaatgtgctgcagaagaggcctgtgattgtgaaggtgctgagcaccaccaagccctttgaatatgagaccccagagatggagaagaagatcatgttccacgccaccgtggccacccagacccagttcttccacgtgaaggtgctgaacaccagcctgaaggagaagttcaacgggaagaagatcatcatcatcagtgactacctggagtatgacagcctgctggaggtgaatgaggagagcacagtgtctgaggccggccccaaccagacctttgaggtgcccaacaagatcatcaacagagccaaggagaccctgaagattgacatcctgcacaagcaggccagcggcaacatcgtgtatggagtcttcatgctgcacaagaagacagtgaaccagaagaccaccatctatgagatccaggatgaccggggcaagatggatgtggtgggcaccggccagtgccacaacatcccctgtgaggagggggacaagctgcagctgttctgcttccggctgaggaagaagaaccagatgagcaagctgatcagcgagatgcacagcttcatccagatcaagaagaagaccaaccccagaaataatgaccccaagtccatgaagctgccccaggagcagaggcagctgccctaccccagcgaggccagcaccaccttccctgagagccacctgcggaccccccagatgccacccaccacccccagcagcagcttcttcaccaagctgaagccccggctgaagacagagcctgaggaggtgtccattgaggacagcgcccagagcgacctgaaggaggtgatggtgctgaatgccacagagagctttgtgtatgagcccaaggagcagaagaagatgtttcatgccaccgtggccacagaaaatgaggtgttccgggtgaaggtgttcaacatcgacctgaaggagaagttcacccccaagaagatcatcgccatcgccaactacgtgtgcagaaatggcttcctggaggtgtaccccttcaccctggtggctgatgtgaatgctgacaggaacatggagatccccaagggcctcatccgcagcgcctctgtgacccccaagatcaaccagctgtgcagccagaccaagggcagctttgtgaatggagtgtttgaggtgcacaagaagaatgtgcggggggagttcacctactatgagatccaggacaacacaggcaagatggaggtggtggtgcacggccgcctgaccaccatcaactgtgaggagggggacaagctgaagctgacctgctttgagctggcccccaagagcggcaacacaggagagctgcggagcgtcatccacagccacatcaaggtgatcaagaccaggaagaacaagaaggacatcctgaacccagacagctccatggagaccagcccagacttcttcttctag

SEQ ID NO: 285916 - DNA, 1245 bp, Artificial Sequence
  derived and/or modified sequence
atgggcaagaagtacaagaacatcgtgctgctgaagggcctggaggtgatcaatgactaccacttcaggatggtgaagagcctgctgagcaatgacctgaagctgaacctgaagatgagggaggagtatgacaagatccagattgctgacctgatggaggagaagttcagaggagatgctggcctgggcaagctgatcaagatctttgaggacatccccaccctggaggacctggccgagaccctgaagaaggagaagctgaaggtgaagggccctgccctgagcaggaagaggaagaaggaggtggatgccaccagccctgcccccagcaccagcagcacagtgaagacagaaggagctgaggccacccctggggcccagaagaggaagaagagcaccaaggagaaggccggccccaagggcagcaaggtgtctgaggagcagacccagccccccagccctgctggagctggcatgagcacagccatgggccgcagccccagccccaagaccagcctgagcgccccacccaacagcagcagcacagagaaccccaagacagtggccaagtgccaggtgacccccaggagaaatgtgctgcagaagaggcctgtgattgtgaaggtgctgagcaccaccaagccctttgaatatgagaccccagagatggagaagaagatcatgttccacgccaccgtggccacccagacccagttcttccacgtgaaggtgctgaacaccagcctgaaggagaagttcacccccaagaagatcatcgccatcgccaactacgtgtgcagaaatggcttcctggaggtgtaccccttcaccctggtggctgatgtgaatgctgacaggaacatggagatccccaagggcctcatccgcagcgcctctgtgacccccaagatcaaccagctgtgcagccagaccaagggcagctttgtgaatggagtgtttgaggtgcacaagaagaatgtgcggggggagttcacctactatgagatccaggacaacacaggcaagatggaggtggtggtgcacggccgcctgaccaccatcaactgtgaggagggggacaagctgaagctgacctgctttgagctggcccccaagagcggcaacacaggagagctgcggagcgtcatccacagccacatcaaggtgatcaagaccaggaagaacaagaaggacatcctgaacccagacagctccatggagaccagcccagacttcttcttctag

SEQ ID NO: 285917 - DNA, 384 bp, Artificial Sequence
  derived and/or modified sequence
atgggcaagaagtacaagaacatcgtgctgctgaagggcctggaggtgatcaatgactaccacttcaggatggtgaagagcctgctgagcaatgacctgaagctgaacctgaagatgagggaggagtatgacaagatccagattgctgacctgatggaggagaagttcagaggagatgctggcctgggcaagctgatcaagatctttgaggacatccccaccctggaggacctggccgagaccctgaagaaggagaagctgaaggtgaagggccctgccctgagcaggaagaggaagaaggaggtggatgccaccagccctgcccccagcaccagcagcacagtgaagacagaaggagctgaggccacccctggggcccagtag

SEQ ID NO: 285918 - DNA, 543 bp, Artificial Sequence
  derived and/or modified sequence
atgggcaagaagtacaagaacatcgtgctgctgaagggcctggaggtgatcaatgactaccacttcaggatggtgaagagcctgctgagcaatgacctgaagctgaacctgaagatgagggaggagtatgacaagatccagattgctgacctgatggaggagaagttcagaggagatgctggcctgggcaagctgatcaagatctttgaggacatccccaccctggaggacctggccgagaccctgaagaaggagaagctgaaggtgaagggccctgccctgagcaggaagaggaagaaggaggtggatgccaccagccctgcccccagcaccagcagcacagtgaagacagaaggagctgaggccacccctggggcccagaagaggaagaagagcaccaaggagaaggccggccccaagggcagcaaggtgtctgaggagcagacccagccccccagccctgctggagctggcatgagcacagccatgggccgcagccccagccccaagaccagcctgagcgccccacccaacagcagctag

SEQ ID NO: 285919 - DNA, 1485 bp, Artificial Sequence
  derived and/or modified sequence
tgaagcacagagaaccccaagacagtggccaagtgccaggtgaccccaagaagaaatgtgctgcagaagaggcctgtgattgtgaaggtgctgagcaccaccaagccctttgaatatgagaccccagagatggagaagaagatcatgtttcatgccaccgtggccacccagacccagttcttccacgtgaaggtgctgaacaccagcctgaaggagaagttcaacgggaagaagatcatcatcatcagtgactacctggagtatgacagcctgctggaggtgaatgaggagagcacagtgtctgaggccggccccaaccagacctttgaggtgcccaacaagatcatcaacagagccaaggagaccctgaagattgacatcctgcacaagcaggccagcggcaacatcgtgtatggagtcttcatgctgcacaagaagacagtgaaccagaagaccaccatctatgagatccaggatgaccggggcaagatggatgtggtgggcaccggccagtgccacaacatcccctgtgaggagggggacaagctgcagctgttctgcttccggctgaggaagaagaaccagatgagcaagctgatcagcgagatgcacagcttcatccagatcaagaagaagaccaaccccaggaacaatgaccccaagtccatgaagctgccccaggagcagaggcagctgccctaccccagcgaggccagcaccaccttccctgagagccacctgcggaccccccagatgccacccaccacccccagcagcagcttcttcaccaagctgaagccccggctgaagacagagcctgaggaggtgtccattgaagattctgcccagagcgacctgaaggaggtgatggtgctgaatgccacagagagctttgtgtatgagcccaaggagcagaagaagatgttccacgccaccgtggccacagaaaatgaggtgttccgggtgaaggtgttcaacatcgacctgaaggagaagttcacccccaagaagatcatcgccatcgccaactacgtgtgcagaaatggcttcctggaggtgtaccccttcaccctggtggctgatgtgaatgctgacaggaacatggagatccccaagggcctcatccgcagcgcctctgtgacccccaagatcaaccagctgtgcagccagaccaagggcagctttgtgaatggagtgtttgaggtgcacaagaagaatgtgcggggggagttcacctactatgagatccaggacaacacaggcaagatggaggtggtggtgcacggccgcctgaccaccatcaactgtgaggagggggacaagctgaagctgacctgctttgagctggcccccaagagcggcaacacaggagagctgcggagcgtcatccacagccacatcaaggtgatcaagaccaggaagaacaagaaggacatcctgaacccagacagctccatggagaccagcccagacttcttcttctag

SEQ ID NO: 285920 - DNA, 2022 bp, Artificial Sequence
  derived and/or modified sequence
atgggcaagaagtacaagaacatcgtgctgctgaagggcctggaggttatcaacgattaccatttccggatggtgaaatcccttctgtctaatgacctgaagctgaatcttaaaatgcgcgaggagtacgataagattcagattgccgacctgatggaggagaagttccgcggggacgcgggactgggcaaactgatcaaaatttttgaggatatccctaccttagaggacctggccgagacattaaaaaaagaaaaactcaaagttaaaggcccagccctctctagaaaacgtaaaaaagaggtggatgcaacatcccctgcccccagcacatcctctacagtaaagacagaaggggccgaggcgaccccaggggctcagaagaggaagaagagcaccaaagaaaaagcaggtcccaagggctctaaagtgagtgaggagcagacccagcccccttcccccgccggcgcgggaatgagcaccgcgatgggaagatcccctagtcccaagaccagccttagcgcccccccaaatagctccagtaccgagaaccctaagactgttgcaaagtgtcaggttactccccgcaggaacgtcctccaaaagagaccggtgatcgtgaaagtcctgagcactaccaagcctttcgaatatgagaccccagaaatggagaagaaaattatgttccacgcaaccgttgccactcagacacagtttttccacgtgaaagtgctgaatacttctctgaaagaaaagtttaacgggaaaaagattatcattatttctgattaccttgaatacgacagtctgctggaggtgaatgaggagtccacagtcagtgaggcgggccctaaccagacatttgaggtcccgaataagataattaaccgggctaaggagacgctaaagattgatatacttcataagcaggcatctggcaacattgtgtacggggtgttcatgctacacaagaagaccgtgaatcagaaaactacaatttatgagatccaagatgaccgggggaagatggacgtggtaggcactgggcagtgtcataacatcccatgcgaggagggagacaaactgcagctgttctgtttcaggctgcgtaagaagaaccagatgagtaagctgatttccgaaatgcattccttcatacagattaagaagaagacaaacccccgcaataacgatccaaagtccatgaaactccctcaggaacagagacagctgccttacccgtctgaagcatctacgaccttccccgagtcccatcttcgaacccctcaaatgcctccaacaacccctagctcctcttttttcactaagctgaagcccaggctcaagacagagcccgaagaagtgagcatcgaggattccgcacagtccgacctcaaagaggttatggttctgaatgctaccgaaagcttcgtttacgaaccaaaagagcagaagaaaatgtttcatgcaacagtggccactgagaatgaggttttcagagtgaaggtcttcaatatagatctcaaagaaaagttcacccctaaaaagattatcgctatcgctaactatgtttgccgcaatgggtttcttgaggtgtacccctttaccctcgtggctgatgtgaatgccgaccggaacatggagataccaaaagggcttatccggtctgcctccgtaacccctaaaattaatcagctgtgcagccaaacaaaagggagcttcgttaatggcgtttttgaggtacacaagaagaacgttcgcggcgaatttacttattacgaaatccaggataacacgggtaaaatggaggtggtggtccatgggagactgacaaccatcaactgtgaggagggagacaagctgaagcttacatgtttcgagctcgctcccaaaagtggtaacacaggagagttgagatcggtgatccatagtcatataaaggttataaaaactaggaagaacaagaaagacatcctcaaccctgacagctccatggagactagcccggatttcttcttctag

SEQ ID NO: 285921 - DNA, 1245 bp, Artificial Sequence
  derived and/or modified sequence
atgggcaagaagtacaagaacatcgtgctgctgaagggcctggaggtgatcaacgactatcactttcggatggtgaaatcactgcttagcaacgatctgaagctgaatctaaaaatgcgtgaggaatacgacaagatacaaattgcagacctgatggaagagaagttccgcggcgacgctgggctcggaaaactgattaagatttttgaggacatccctaccctggaggatctggccgagacacttaaaaaagagaagctgaaagtgaagggcccagcattgagcaggaagcgaaagaaagaggtagacgccacgagccctgccccctccacttcgagcacagtgaagactgagggggccgaagctacaccaggcgcacagaaaagaaagaagtcaaccaaggagaaggccggccccaagggatccaaggtgtcagaagagcaaacccagccacccagtcctgcaggtgccgggatgtcaacagccatgggacgatccccatctcctaaaaccagtctgagcgccccacctaatagttcctcaacagagaatccaaagacagtggctaagtgccaggtaacgcctcggaggaatgtgctgcagaaacgacccgtgatcgtgaaagtgttgtcaaccacaaagccgttcgagtacgaaacccccgagatggaaaagaaaatcatgtttcatgcaaccgtggccacccagacacagttcttccatgtcaaggtgctgaacacctctctgaaggagaagttcactccgaaaaagattatcgccatcgcgaactatgtgtgcagaaatggtttcctggaagtgtatccctttacactggtggccgacgtcaacgcagatagaaatatggagattccaaaaggcctgatccggagcgccagtgtgaccccaaagatcaatcagctctgtagccagacgaaagggtcctttgtgaacggcgttttcgaggtccataaaaagaatgtaagaggcgaattcacatattacgagattcaggacaacaccggcaaaatggaggtggtggtgcacggacggctgacgaccatcaactgtgaggagggcgacaagctgaagctcacttgttttgagttggcacccaagtcaggcaatacgggtgaattacgcagcgttattcattctcatatcaaggtgatcaaaactaggaagaataagaaggatatcttgaatccagattccagtatggagaccagccctgactttttcttctag

SEQ ID NO: 285922 - DNA, 384 bp, Artificial Sequence
  derived and/or modified sequence
atgggcaagaagtacaagaacatcgtgctgctgaagggcctggaggtgataaacgactaccactttcgaatggtcaagagtttactgtctaacgacctcaagctgaacctgaagatgcgcgaggaatacgataaaatccagatcgcggaccttatggaggaaaagtttcggggtgacgcaggcctagggaagctgattaagatttttgaggatattcctaccctcgaagacctggctgagaccctgaaaaaggaaaagctcaaagtgaagggacccgctctctcaagaaaaaggaagaaggaggtcgacgcgacttcccccgctcctagcacgagctccaccgtaaagacggaaggagcagaggcgactccaggcgctcagtag

SEQ ID NO: 285923 - DNA, 543 bp, Artificial Sequence
  derived and/or modified sequence
atgggcaagaagtacaagaacatcgtgctgctgaagggcctggaggtcatcaatgactaccacttcaggatggtgaagagcttactgtctaacgacctgaaactcaacctgaaaatgcgtgaagagtacgacaaaatacaaatcgccgatttaatggaagagaagttccggggtgacgctggtttgggcaaactcattaagattttcgaggatattcctaccctcgaggacctggccgagactctcaagaaggagaagcttaaggtgaagggccccgcgctctccaggaaacgaaagaaagaggtagatgccacaagtcctgctcccagcacatcaagcactgtcaagaccgaaggcgccgaggccactcctggtgcgcagaaaagaaagaagagtacaaaagaaaaagcagggcctaaagggtccaaggttagcgaggagcagacccaacctccgagcccagccggggccgggatgagcaccgctatgggccggagccccagccccaagaccagcttatcagcacctcccaacagctcatag

SEQ ID NO: 285924 - DNA, 1485 bp, Artificial Sequence
  derived and/or modified sequence
tgaagcaccgagaaccccaagaccgtggccaagtgccaggtgacccctcggcgcaatgtcctccagaaaagacctgtcatcgtgaaggttctctcaaccacaaagccgtttgagtatgaaacccccgagatggagaaaaaaattatgtttcacgccacagtagcaacacaaacacagttcttccatgtaaaggtgctcaacacgtccctgaaagagaagttcaatggcaagaagatcataattatatctgattacctcgagtacgactcactgctagaagtcaacgaggaaagcactgtttccgaagccgggcccaatcagacattcgaggtccccaacaaaatcatcaacagggccaaggagactctcaaaattgatatcctccataaacaggcctctgggaatatcgtttacggggtgtttatgctccacaagaagaccgttaatcagaagacaaccatatatgaaatccaggatgaccgcggcaagatggacgttgtgggtacaggacagtgccacaacattccgtgcgaagagggagacaagctgcaacttttttgcttcaggttacggaaaaagaatcagatgtccaagcttatatccgaaatgcactcctttattcagattaaaaaaaaaaccaacccacgcaacaatgacccgaaaagcatgaaacttccccaggaacagcggcagctcccttatccaagtgaggcttcgaccacatttccagagagccacttgcgtaccccccagatgccgccaacaacaccctcgtctagtttcttcacaaagctgaaaccccggttaaaaacagaacccgaagaagtgagtattgaggatagtgcacagagcgacctcaaggaggtgatggtcctcaacgctacagagagcttcgtgtatgaacctaaagagcagaagaaaatgttccacgcaaccgtcgccaccgagaatgaagtgtttcgggtgaaagtgtttaatatagatttgaaggaaaagttcacacctaagaaaataatcgccattgctaattacgtatgtcgaaatgggtttttggaagtgtacccgttcaccttggtggctgacgtaaacgccgatcgcaacatggaaatccccaaggggttgataagaagcgcttcggtcactcctaaaataaaccagctctgcagccagaccaagggctctttcgtgaacggtgtgtttgaggttcacaaaaagaatgtgcgtggcgagttcacttactatgagattcaggacaataccggcaaaatggaggtggtggtgcacgggcgcttgaccacaattaattgtgaagaaggcgacaagctgaaacttacctgctttgaactggctcccaaatctgggaatactggggaactccgaagtgtgatccactcccatatcaaggtgatcaagactcggaaaaacaagaaggatatcttgaaccccgacagcagtatggagacctcccctgatttctttttctag

SEQ ID NO: 285925 - DNA, 2022 bp, Artificial Sequence
  derived and/or modified sequence
atgggaaagaagtacaaaaacattgtgctcctgaagggactggaggtcatcaatgattaccactttaggatggtcaagtctctcctgtccaacgatctgaagttgaatctgaagatgagggaagagtatgataaaatccagatcgcagatctgatggaagaaaaattcagaggggacgccggtctggggaagcttattaagattttcgaggacatcccgaccctcgaggacctggctgaaactcttaagaaagaaaagctgaaagttaagggtcctgccctgtcacgcaaaaggaaaaaggaagtcgacgctacaagcccggcaccatccacatctagtacagtaaagactgaaggggctgaagccacacctggcgctcagaaaaggaaaaagtctacaaaggagaaagccggaccgaagggaagcaaagtatccgaagagcagacccagccacctagtcccgctggagcaggcatgagcacggccatggggaggtctccctcccctaagacctccctcagcgctccaccgaattcctcgagcacagagaaccctaagacagttgctaagtgtcaagtcacccctaggcgcaacgtattacagaagcgtcccgttattgtaaaggtgctctctacgacaaagccgttcgagtatgagaccccagagatggaaaagaaaattatgttccatgcaaccgtggctacccagacgcaatttttccacgtcaaggtcctgaacacctccctcaaggaaaaattcaatggaaagaagatcattattatctccgattatctggaatatgatagcctcctcgaagtgaatgaagagagcactgttagtgaagcaggtcctaatcagacgttcgaagtaccaaacaagatcataaatagagccaaggagacattgaaaattgacattctgcacaaacaggctagcggtaacatagtatacggagtgttcatgcttcacaaaaagacggtgaatcagaagaccaccatctacgaaattcaggatgacaggggcaagatggatgtggtgggcacagggcagtgtcataacatcccctgtgaagagggagacaagctccagctgttctgtttcaggctgcgcaaaaaaaatcagatgtcaaaactgatcagtgaaatgcacagctttatccagattaagaagaaaaccaacccccgtaacaacgatccgaagtctatgaagcttcctcaagagcagagacaactcccataccccagtgaggcgtcaaccacgttccccgaatcccacttgcgcactccacagatgccccctacaacacctagttcctcattcttcacgaaactgaaaccaaggttaaagacagagcccgaagaagtgtccatcgaggactctgcacagtccgacttgaaggaggtgatggtcctcaacgccactgaatcattcgtatacgaacctaaggagcaaaaaaaaatgtttcatgccaccgttgccacggagaatgaggtgttccgcgtcaaggtgttcaacattgatctgaaagagaagttcacacccaaaaaaattatagctatcgctaactatgtctgcagaaacggattcctggaggtgtacccatttacccttgtagcagacgtgaacgccgacagaaatatggagattccgaaaggacttatcagatcggcatcagtgacgcctaagatcaatcagctgtgttctcaaacaaagggaagttttgtgaacggagtctttgaggtccataagaaaaacgtgcgcggagagtttacctattacgagatccaggacaacaccggcaagatggaggtcgtggttcacgggaggcttaccaccataaactgcgaggagggagacaagctaaagctcacatgcttcgagctcgcaccaaaatctggaaacacgggagaactcaggtctgttatccactctcatattaaagtgattaaaacacgcaagaacaagaaggacatcctgaacccagatagtagtatggagacctcccccgacttctttttctag

SEQ ID NO: 285926 - DNA, 1245 bp, Artificial Sequence
  derived and/or modified sequence
atgggcaagaagtataaaaatatcgtgctgttgaaagggctggaagtgatcaatgactatcatttccgaatggtgaaatctcttttgtcaaatgacctgaaactgaacctgaagatgcgcgaggaatatgataaaattcagattgccgacttaatggaagaaaagttccggggtgacgcagggctcgggaaattaataaaaatctttgaggatattcccactctcgaggacctggccgaaacattgaagaaggaaaagttaaaagttaaggggccagccctgagccggaaacgtaaaaaagaagtggatgctactagtcctgccccatctacatcttccaccgtcaaaactgagggagctgaggctacccccggtgcccagaagcggaaaaagtctacaaaagaaaaggctggtcctaagggcagcaaggtgtctgaggaacaaactcagccaccgtctccagcaggtgcgggtatgtctacagccatgggccgaagtccctccccgaagacaagtctctctgctccccctaactctagcagtactgagaacccaaagacagtcgctaagtgtcaggtaacccctagacgaaatgtgctgcaaaagagacctgttatcgtaaaagtactatcgactacaaaaccctttgagtacgagactccggaaatggagaaaaagattatgttccacgctacagtcgccacccagacccagttttttcacgtgaaggttctcaacacatcattaaaggaaaagttcaccccgaagaagatcattgccatcgcaaattacgtgtgccgcaatgggtttttagaagtgtatccattcacactggtggccgatgtcaacgccgatcggaacatggaaatccccaagggactgattaggagcgccagcgtgacgcctaaaatcaatcagctctgttctcagactaagggaagcttcgttaatggcgtctttgaggtgcataaaaagaatgtgagaggggagtttacgtattacgagattcaagacaatactgggaagatggaggtagttgtccacgggcgactcactaccattaattgcgaagagggagataagcttaagctgacttgcttcgagctggccccaaagagcggcaacaccggggaattacggagtgtcatccactctcacattaaagtaatcaagacccgcaagaacaaaaaggacatacttaatcccgactcttctatggaaacgtcaccagacttcttcttttag

SEQ ID NO: 285927 - DNA, 384 bp, Artificial Sequence
  derived and/or modified sequence
atgggcaagaagtacaaaaacattgtgctcttaaagggacttgaagtcatcaacgactatcatttccggatggtgaagagtctccttagcaacgacctgaagctgaatctgaagatgcgggaggagtacgataaaattcagatcgccgatttaatggaggaaaaatttaggggagacgccggtctgggcaagttgattaagattttcgaagacatcccgacattagaggacctggccgagacactgaagaaggagaaacttaaagttaaaggtcctgcgctgtccagaaagcgtaagaaagaagtggacgcaactagtccagcgccaagcacctcatccaccgtgaagactgagggtgccgaagcgacaccgggagctcagtag

SEQ ID NO: 285928 - DNA, 543 bp, Artificial Sequence
  derived and/or modified sequence
atgggcaagaagtataagaatatcgtgctactgaagggtctggaggtcatcaatgactatcactttcgcatggtcaaatcacttttgtcgaatgacctgaagctgaatttgaaaatgcgcgaggagtacgataagatacagattgccgacctgatggaggaaaaattcagaggcgatgcagggcttggcaagctgatcaagatctttgaagatatccccacacttgaggatttagccgaaacactaaagaaagaaaagttaaaagtgaaaggcccagccctatcacgtaagagaaagaaggaggtggacgctactagtcctgcccctagcacaagctccactgtgaagactgagggagcagaggctacccctggcgctcagaagcggaaaaaaagtactaaagaaaaagctgggcctaaaggctccaaggtgtccgaagaacagacccagccaccttcacccgcaggggcaggcatgtccacggcaatgggcagatccccttctccaaaaacatcactgtcagctcccccaaatagcagctag

SEQ ID NO: 285929 - DNA, 1485 bp, Artificial Sequence
  derived and/or modified sequence
taaagcaccgagaatccaaagaccgtcgcaaaatgtcaggtcacccctagacgcaacgtcctgcagaaacgtcctgttatcgtcaaggtgctctcaacaaccaagccgttcgagtatgaaactccggagatggaaaaaaaaataatgttccacgcgacagtagccactcagacccagttttttcacgtgaaggtgctcaatactagcctgaaagagaagtttaacgggaagaaaataattatcatctcagactatttggaatacgactcactgcttgaggtgaacgaggagtcgaccgtcagcgaggcagggcctaatcagacttttgaggttcccaacaaaatcataaaccgtgcgaaggagacacttaagatcgatatcctgcacaaacaagcaagtggaaacatcgtctatggcgtgtttatgctgcacaagaaaaccgttaaccagaagaccactatctatgagatccaggacgatcggggaaagatggacgtggtagggacagggcagtgccacaacattccatgcgaggagggggacaagcttcagttgttctgctttcgactgagaaagaagaatcagatgtctaagcttattagtgagatgcactccttcatccagattaagaagaaaaccaaccccaggaataacgaccctaagtctatgaagctgccacaagaacagaggcaactgccctatccttctgaggcttcaactactttcccggaaagtcacttgagaacccctcagatgcccccaaccactccctcatcaagtttttttacaaagctcaaaccaagactcaaaactgaacctgaagaggtcagcatcgaagacagcgcccagagcgatctcaaagaggtgatggtgctaaatgccaccgagagctttgtgtatgagcccaaggagcagaaaaagatgttccatgccacggtggctaccgagaatgaggttttcagggttaaagttttcaacatcgatctgaaggagaaatttacccctaaaaagatcattgcaattgcgaattacgtctgccgcaatggattcctggaggtgtacccattcaccctcgtggcggacgtgaatgctgacagaaacatggaaatccccaaaggcctcattcggagcgcctctgtcacacctaagatcaaccagttgtgttcacagacaaagggcagtttcgtcaatggagtattcgaagttcataaaaaaaatgttaggggcgaattcacttactatgagatccaagacaacacgggtaaaatggaggttgttgttcatgggagattgacaacgatcaattgcgaggagggggataaattaaagctcacatgcttcgaactggctcctaagagtgggaacaccggcgaacttaggtccgtgattcattctcatattaaagttatcaaaacccggaaaaacaagaaggatatcctgaatccagacagcagtatggagacatctcccgacttcttcttctag

SEQ ID NO: 285930 - DNA, 2022 bp, Artificial Sequence
  derived and/or modified sequence
atgggcaagaagtacaagaacatcgtgctgctgaagggcctggaggtgatcaacgactaccacttcagaatggtgaagagcctgctgagcaacgacctgaagctgaacctgaagatgagagaggagtacgacaagatccagatcgccgacctgatggaggagaagttcagaggcgacgccggcctgggcaagctgatcaagatcttcgaggacatccccaccctggaggacctggccgagaccctgaagaaggagaagctgaaggtgaagggccccgccctgagcagaaagagaaagaaggaggtggacgccaccagccccgcccccagcaccagcagcaccgtgaagaccgagggcgccgaggccacccccggcgcccagaagagaaagaagagcaccaaggagaaggccggccccaagggcagcaaggtgagcgaggagcagacccagccccccagccccgccggcgccggcatgagcaccgccatgggcagaagccccagccccaagaccagcctgagcgccccccccaacagcagcagcaccgagaaccccaagaccgtggccaagtgccaggtgacccccagaagaaacgtgctgcagaagagacccgtgatcgtgaaggtgctgagcaccaccaagcccttcgagtacgagacccccgagatggagaagaagatcatgttccacgccaccgtggccacccagacccagttcttccacgtgaaggtgctgaacaccagcctgaaggagaagttcaacggcaagaagatcatcatcatcagcgactacctggagtacgacagcctgctggaggtgaacgaggagagcaccgtgagcgaggccggccccaaccagaccttcgaggtgcccaacaagatcatcaacagagccaaggagaccctgaagatcgacatcctgcacaagcaggccagcggcaacatcgtgtacggcgtgttcatgctgcacaagaagaccgtgaaccagaagaccaccatctacgagatccaggacgacagaggcaagatggacgtggtgggcaccggccagtgccacaacatcccctgcgaggagggcgacaagctgcagctgttctgcttcagactgagaaagaagaaccagatgagcaagctgatcagcgagatgcacagcttcatccagatcaagaagaagaccaaccccagaaacaacgaccccaagagcatgaagctgccccaggagcagagacagctgccctaccccagcgaggccagcaccaccttccccgagagccacctgagaaccccccagatgccccccaccacccccagcagcagcttcttcaccaagctgaagcccagactgaagaccgagcccgaggaggtgagcatcgaggacagcgcccagagcgacctgaaggaggtgatggtgctgaacgccaccgagagcttcgtgtacgagcccaaggagcagaagaagatgttccacgccaccgtggccaccgagaacgaggtgttcagagtgaaggtgttcaacatcgacctgaaggagaagttcacccccaagaagatcatcgccatcgccaactacgtgtgcagaaacggcttcctggaggtgtaccccttcaccctggtggccgacgtgaacgccgacagaaacatggagatccccaagggcctgatcagaagcgccagcgtgacccccaagatcaaccagctgtgcagccagaccaagggcagcttcgtgaacggcgtgttcgaggtgcacaagaagaacgtgagaggcgagttcacctactacgagatccaggacaacaccggcaagatggaggtggtggtgcacggcagactgaccaccatcaactgcgaggagggcgacaagctgaagctgacctgcttcgagctggcccccaagagcggcaacaccggcgagctgagaagcgtgatccacagccacatcaaggtgatcaagaccagaaagaacaagaaggacatcctgaaccccgacagcagcatggagaccagccccgacttcttcttctag

SEQ ID NO: 285931 - DNA, 1245 bp, Artificial Sequence
  derived and/or modified sequence
atgggcaagaagtacaagaacatcgtgctgctgaagggcctggaggtgatcaacgactaccacttcagaatggtgaagagcctgctgagcaacgacctgaagctgaacctgaagatgagagaggagtacgacaagatccagatcgccgacctgatggaggagaagttcagaggcgacgccggcctgggcaagctgatcaagatcttcgaggacatccccaccctggaggacctggccgagaccctgaagaaggagaagctgaaggtgaagggccccgccctgagcagaaagagaaagaaggaggtggacgccaccagccccgcccccagcaccagcagcaccgtgaagaccgagggcgccgaggccacccccggcgcccagaagagaaagaagagcaccaaggagaaggccggccccaagggcagcaaggtgagcgaggagcagacccagccccccagccccgccggcgccggcatgagcaccgccatgggcagaagccccagccccaagaccagcctgagcgccccccccaacagcagcagcaccgagaaccccaagaccgtggccaagtgccaggtgacccccagaagaaacgtgctgcagaagagacccgtgatcgtgaaggtgctgagcaccaccaagcccttcgagtacgagacccccgagatggagaagaagatcatgttccacgccaccgtggccacccagacccagttcttccacgtgaaggtgctgaacaccagcctgaaggagaagttcacccccaagaagatcatcgccatcgccaactacgtgtgcagaaacggcttcctggaggtgtaccccttcaccctggtggccgacgtgaacgccgacagaaacatggagatccccaagggcctgatcagaagcgccagcgtgacccccaagatcaaccagctgtgcagccagaccaagggcagcttcgtgaacggcgtgttcgaggtgcacaagaagaacgtgagaggcgagttcacctactacgagatccaggacaacaccggcaagatggaggtggtggtgcacggcagactgaccaccatcaactgcgaggagggcgacaagctgaagctgacctgcttcgagctggcccccaagagcggcaacaccggcgagctgagaagcgtgatccacagccacatcaaggtgatcaagaccagaaagaacaagaaggacatcctgaaccccgacagcagcatggagaccagccccgacttcttcttctag

SEQ ID NO: 285932 - DNA, 384 bp, Artificial Sequence
  derived and/or modified sequence
atgggcaagaagtacaagaacatcgtgctgctgaagggcctggaggtgatcaacgactaccacttcagaatggtgaagagcctgctgagcaacgacctgaagctgaacctgaagatgagagaggagtacgacaagatccagatcgccgacctgatggaggagaagttcagaggcgacgccggcctgggcaagctgatcaagatcttcgaggacatccccaccctggaggacctggccgagaccctgaagaaggagaagctgaaggtgaagggccccgccctgagcagaaagagaaagaaggaggtggacgccaccagccccgcccccagcaccagcagcaccgtgaagaccgagggcgccgaggccacccccggcgcccagtag

SEQ ID NO: 285933 - DNA, 543 bp, Artificial Sequence
  derived and/or modified sequence
atgggcaagaagtacaagaacatcgtgctgctgaagggcctggaggtgatcaacgactaccacttcagaatggtgaagagcctgctgagcaacgacctgaagctgaacctgaagatgagagaggagtacgacaagatccagatcgccgacctgatggaggagaagttcagaggcgacgccggcctgggcaagctgatcaagatcttcgaggacatccccaccctggaggacctggccgagaccctgaagaaggagaagctgaaggtgaagggccccgccctgagcagaaagagaaagaaggaggtggacgccaccagccccgcccccagcaccagcagcaccgtgaagaccgagggcgccgaggccacccccggcgcccagaagagaaagaagagcaccaaggagaaggccggccccaagggcagcaaggtgagcgaggagcagacccagccccccagccccgccggcgccggcatgagcaccgccatgggcagaagccccagccccaagaccagcctgagcgccccccccaacagcagctag

SEQ ID NO: 285934 - DNA, 1485 bp, Artificial Sequence
  derived and/or modified sequence
tgaagcaccgagaaccccaagaccgtggccaagtgccaggtgacccccagaagaaacgtgctgcagaagagacccgtgatcgtgaaggtgctgagcaccaccaagcccttcgagtacgagacccccgagatggagaagaagatcatgttccacgccaccgtggccacccagacccagttcttccacgtgaaggtgctgaacaccagcctgaaggagaagttcaacggcaagaagatcatcatcatcagcgactacctggagtacgacagcctgctggaggtgaacgaggagagcaccgtgagcgaggccggccccaaccagaccttcgaggtgcccaacaagatcatcaacagagccaaggagaccctgaagatcgacatcctgcacaagcaggccagcggcaacatcgtgtacggcgtgttcatgctgcacaagaagaccgtgaaccagaagaccaccatctacgagatccaggacgacagaggcaagatggacgtggtgggcaccggccagtgccacaacatcccctgcgaggagggcgacaagctgcagctgttctgcttcagactgagaaagaagaaccagatgagcaagctgatcagcgagatgcacagcttcatccagatcaagaagaagaccaaccccagaaacaacgaccccaagagcatgaagctgccccaggagcagagacagctgccctaccccagcgaggccagcaccaccttccccgagagccacctgagaaccccccagatgccccccaccacccccagcagcagcttcttcaccaagctgaagcccagactgaagaccgagcccgaggaggtgagcatcgaggacagcgcccagagcgacctgaaggaggtgatggtgctgaacgccaccgagagcttcgtgtacgagcccaaggagcagaagaagatgttccacgccaccgtggccaccgagaacgaggtgttcagagtgaaggtgttcaacatcgacctgaaggagaagttcacccccaagaagatcatcgccatcgccaactacgtgtgcagaaacggcttcctggaggtgtaccccttcaccctggtggccgacgtgaacgccgacagaaacatggagatccccaagggcctgatcagaagcgccagcgtgacccccaagatcaaccagctgtgcagccagaccaagggcagcttcgtgaacggcgtgttcgaggtgcacaagaagaacgtgagaggcgagttcacctactacgagatccaggacaacaccggcaagatggaggtggtggtgcacggcagactgaccaccatcaactgcgaggagggcgacaagctgaagctgacctgcttcgagctggcccccaagagcggcaacaccggcgagctgagaagcgtgatccacagccacatcaaggtgatcaagaccagaaagaacaagaaggacatcctgaaccccgacagcagcatggagaccagccccgacttcttcttctag

SEQ ID NO: 285935 - protein, 311 aa, Artificial Sequence
  derived and/or modified sequence
MLLWTAVLLFVPCVGKTVWLYLQAWPNPVFEGDALTLRCQGWKNTPLSQVKFYRDGKFLHFSKENQTLSMGAATVQSRGQYSCSGQVMYIPQTFTQTSETAMVQVQAPVSRPVLTLHHGPADPAVGDMVQLLCEAQRGSPPILYSFYLDEKIVGNHSAPCGGTTSLLFPVKSEQDAGNYSCEAENSVSRERSEPKKLSLKGSQVLFTPASNWLVPWLPASLLGLMVIAAALLVYVRSWRKAGPLPSQIPPTAPGGEQCPLYANVHHQKGKDEGVVYSVVHRTSKRSEARSAEFTVGRKFYHLCGGEMPAAQ

SEQ ID NO: 285936 - DNA, 88 bp, Artificial Sequence
  derived and/or modified sequence
aatggactccaatggaataatcattgaacggaatctaatggaatcatcatcggatggaaatgagtggaatcatcatcgaatggaatcg

SEQ ID NO: 285937 - DNA, 96 bp, Artificial Sequence
  derived and/or modified sequence
atggactcgaatgtaataatcattgaacggaatcgaatggaatcatcatcggatggaaacgaatggaatcatcatcgaatggaatcgaatgggatc

SEQ ID NO: 285938 - protein, 370 aa, Artificial Sequence
  derived and/or modified sequence
MPYLHLDHQTILRAWAVKDFAPNCPLYVQILKPENKFHIKFADHVVCEEEFKYAMLALNCICPATSTLITLLVHTSRGQEGQQSPEQWQKMYGRCSGNEVYHIVLEESTFFAEYEGKSFTYASFHAHKKFGVCLIGVRREDNKNILLNPGPRYIMNSTDICFYINITKEENSAFKNQDQQRKSNVSRSFYHGPSRLPVHSIIASMGTVAIDLQDTSCRSASGPTLSLPTEGSKEIRRPSIAPVLEVADTSSIQTCDLLSDQSEDETTPDEEMSSNLEYAKGYPPYSPYIGSSPTFCHLLHEKVPFCCLRLDKSCQHNYYEDAKAYGFKNKLIIVAAETAGNGLYNFIVPLRAYYRPKKELNPIVLLLDNP

SEQ ID NO: 285939 - protein, 585 aa, Artificial Sequence
  derived and/or modified sequence
MSQQHTLPVTLSPALSQELLKTVPPPVNTHQEQMKQPTPLPPPCQKVPVELPVEVPSKQEEKHMTAVKGLPEQECEQQQKEPQEQELQQQHWEQHEEYQKAENPEQQLKQEKTQRDQQLNKQLEEEKKLLDQQLDQELVKRDEQLGMKKEQLLELPEQQEGHLKHLEQQEGQLKHPEQQEGQLELPEQQEGQLELPEQQEGQLELPEQQEGQLELPEQQEGQLELPEQQEGQLELPQQQEGQLELSEQQEGQLELSEQQEGQLKHLEHQEGQLEVPEEQMGQLKYLEQQEGQLKHLDQQEKQPELPEQQMGQLKHLEQQEGQPKHLEQQEGQLEQLEEQEGQLKHLEQQEGQLEHLEHQEGQLGLPEQQVLQLKQLEKQQGQPKHLEEEEGQLKHLVQQEGQLKHLVQQEGQLEQQERQVEHLEQQVGQLKHLEEQEGQLKHLEQQQGQLEVPEQQVGQPKNLEQEEKQLELPEQQEGQVKHLEKQEAQLELPEQQVGQPKHLEQQEKHLEHPEQQDGQLKHLEQQEGQLKDLEQQKGQLEQPVFAPAPGQVQDIQPALPTKGEVLLPVEHQQQKQEVQWPPKHK

SEQ ID NO: 285940 - protein, 439 aa, Artificial Sequence
  derived and/or modified sequence
MKKEQLLELPEQQEGHLKHLEQQEGQLKHPEQQEGQLELPEQQEGQLELPEQQEGQLELPEQQEGQLELPEQQEGQLELPEQQEGQLELPQQQEGQLELSEQQEGQLELSEQQEGQLKHLEHQEGQLEVPEEQMGQLKYLEQQEGQLKHLDQQEKQPELPEQQMGQLKHLEQQEGQPKHLEQQEGQLEQLEEQEGQLKHLEQQEGQLEHLEHQEGQLGLPEQQVLQLKQLEKQQGQPKHLEEEEGQLKHLVQQEGQLKHLVQQEGQLEQQERQVEHLEQQVGQLKHLEEQEGQLKHLEQQQGQLEVPEQQVGQPKNLEQEEKQLELPEQQEGQVKHLEKQEAQLELPEQQVGQPKHLEQQEKHLEHPEQQDGQLKHLEQQEGQLKDLEQQKGQLEQPVFAPAPGQVQDIQPALPTKGEVLLPVEHQQQKQEVQWPPKHK

SEQ ID NO: 285941 - DNA, 813 bp, Artificial Sequence
  derived and/or modified sequence
atgcagggcaacaacctgcagccccccagccccagacccctggagtgctggagcctgcacagagaggccccccagagaaccgaggccagcagaacccaccccagccccttcctggccctgcccggcagccacagaaccgccaaccaggcccaggtggtgcccggcctggtgcaccacccccaggagaacacccagagactgagaatcagagccggcctgagccccttccccagagccagactggccgccatcggcagcacccacggccacagatgggtgcccggcatctgcctgcccagatgcctgtgccccgccagctgcgccctgcacgcctgccccccccactgcaacaacgccgaggcccacagctggctgagactgggcggccccctgcagagcagaagcgtggagcaccagcagcacgcctgcggctggggctgggtgacccacgccacctacggcgagagaggcaccagccaggccgccgagagacagagaatcgcccacaccagagccctgagcgtgggcaactgccccagaagccacttccagtgcgagttcagcagcatcagcaagtggagcgagggcaccggcaccttcagccccagacccagagccgtgaagagcggcgtgggcggccagcccagcccccacatcagaatcacctggagaagctgcaccaccctgaccagcaagccctgcagcagagccatcacccccgagtgcgtggtgggctggagcagaagaagcagacactggtacagcgacatgagaaccggcgagtgccagggcctgagccccatcaccagatag

SEQ ID NO: 285942 - DNA, 1506 bp, Artificial Sequence
  derived and/or modified sequence
atggacgagaacaacggcctgctgctgctggagctgaacccccccaacccctgggacctgcagcccagaagccccgaggagctggccttcggcgaggtgcagatcacctacctgacccacgcctgcatggacctgaagctgggcgacaagagaatggtgttcgacccctggctgatcggccccgccttcgccagaggctggtggctgctgcacgagccccccagcgactggctggagagactgtgccaggccgacctgatctacatcagccacctgcacagcgaccacctgagctaccccaccctgaagaagctggccggcagaagacccgacatccccatctacgtgggcaacaccgagagacccgtgttctggaacctgaaccagagcggcgtgcagctgaccaacatcaacgtggtgcccttcggcatctggcagcaggtggacaagaacctgagattcatgatcctgatggacggcgtgcaccccgagatggacacctgcatcatcgtggagtacaagggccacaagatcctgaacatcgtggactgcaccagacccaacggcggcagactgcccatgaaggtggccctgatgatgagcgacttcgccggcggcgccagcggcttccccatgaccttcagcggcggcaagttcaccgaggagtggaaggcccagttcatcaagaccgagagaaagaagctgctgaactacaaggccagactggtgaagaacctgcagcccagaatctactgccccttcgccggctacttcgtggagagccaccccagcgacaagtacatcaaggagaccaacaccaagaacgaccccaacgagctgaacaacctgatcaagaagaacagcgacgtgatcacctggacccccagacccggcgccaccctggacctgggcagaatgctgaaggacagaaccgacagcaagggcatcatcgagccccccgagggcaccaagatctacaaggacagctgggacttcgagccctacctggagatcctgaacgccgccctgggcgacgagatcttcctgcacagcagctggatcaaggagtacttcacctgggccggcttcaaggactacaacctggtggtgagaatgatcgagaccgacgaggacttcaaccccttccccggcggctacgactacctggtggacttcctggacctgagcttccccaaggagagaccccagagagagcacccctacgaggagatccacagcagagtggacgtgatcagacacgtggtgaagaacggcctgctgtgggacgagctgtacatcggcttccagaccagactgcagagagaccccgacatctaccaccacctgttctggaaccacttccagatcaagctgcccctgaccccccccaactggaagagcttcctgatgtgctgcgagcagaacggccccgtgatcctgcagttcagcaccgagagaaccaacgagcccaacagaaacaagttcagcgtggagaacaaggcctag

SEQ ID NO: 285943 - DNA, 1461 bp, Artificial Sequence
  derived and/or modified sequence
atggacgagaacaacggcctgctgctgctggagctgaacccccccaacccctgggacctgcagcccagaagccccgaggagctggccttcggcgaggtgcagatcacctacctgacccacgcctgcatggacctgaagctgggcgacaagagaatggtgttcgacccctggctgatcggccccgccttcgccagaggctggtggctgctgcacgagccccccagcgactggctggagagactgtgccaggccgacctgatctacatcagccacctgcacagcgaccacctgagctaccccaccctgaagaagctggccggcagaagacccgacatccccatctacgtgggcaacaccgagagacccgtgttctggaacctgaaccagagcggcgtgcagctgaccaacatcaacgtggtgcccttcggcatctggcagcaggtggacaagaacctgagattcatgatcctgatggacggcgtgcaccccgagatggacacctgcatcatcgtggagtacaagggccacaagatcctgaacatcgtggactgcaccagacccaacggcggcagactgcccatgaaggtggccctgatgatgagcgacttcgccggcggcgccagcggcttccccatgaccttcagcggcggcaagttcaccgaggagtggaaggcccagttcatcaagaccgagagaaagaagctgctgaactacaaggccagactggtgaagaacctgcagcccagaatctactgccccttcgccggctacttcgtggagagccaccccagcgacaagtacatcaaggagaccaacaccaagaacgaccccaacgagctgaacaacctgatcaagaagaacagcgacgtgatcacctggacccccagacccggcgccaccctggacctgggcagaatgctgaaggacagaaccgacagcaagggcatcatcgagccccccgagggcaccaagatctacaaggacagctgggacttcgagccctacctggagatcctgaacgccgccctgggcgacgagatcttcctgcacagcagctggatcaaggagtacttcacctgggccggcttcaaggactacaacctggtggtgagaatgatcgagaccgacgaggacttcaaccccttccccggcggctacgactacctggtggacttcctggacctgagcttccccaaggagagaccccagagagagcacccctacgaggagatccacagcagagtggacgtgatcagacacgtggtgaagaacggcctgctgtgggacgagctgtacatcggcttccagaccagactgcagagagaccccgacatctaccaccacctgttctggaaccacttccagatcaagctgcccctgaccccccccaactggaagagcttcctgatgtgctgcgagcagaacggccccgtgatcctgcaggagtgcaagaccacctag

SEQ ID NO: 285944 - DNA, 312 bp, Artificial Sequence
  derived and/or modified sequence
atgaagctgaagagcctgtttggagagatcaccttcaccttcggcatcagcaaggagaagctgaagatcctggatgacctgaccctgctgcccctgctggtgaagcagtacaagatgctgtggagctacaagctgcccggcagcggcatcgtcatctggagcaccttccacgctgtgatggacagcgagtggaggcggcagaatgctgagctgaacctgatcaccaacaagcacttcctgaagaacctgcagagcaagcacctggatgtgaagatcctgaagaccaagaacaagctggtggagggcatctag

SEQ ID NO: 285945 - DNA, 1758 bp, Artificial Sequence
  derived and/or modified sequence
atgtctcagcagcacaccctacctgtaaccttgagtcctgctctctcgcaggaactgttaaagaccgtaccgccacccgtgaacactcatcaggagcagatgaagcagccaactccacttccaccaccctgccagaaagttcccgtggagctgcccgtcgaggtcccttcaaagcaagaagaaaaacacatgacagcggttaaggggctaccggaacaagagtgcgaacagcaacagaaggagccccaggaacaggagttacaacagcagcactgggagcagcacgaggagtaccagaaggccgagaaccctgagcagcaactgaaacaggaaaagacgcaacgagaccagcagctgaacaagcaactcgaagaggaaaaaaaactgctagatcagcagcttgaccaggagttggtgaaacgcgacgagcagttgggtatgaaaaaggagcaactactcgagcttccagagcagcaggagggtcatttgaaacatttggaacagcaggaaggacaactgaaacatcccgaacaacaggaaggtcagctggagctcccagagcagcaagaggggcagctcgagctcccagaacagcaggaagggcagctcgaacttcctgagcagcaggagggccagctcgagctgcccgaacaacaggaagggcaactggagctgcctgaacaacaggagggccagcttgagctgccccaacagcaggaaggccagctcgagctctccgagcagcaggaagggcaactcgaactgagtgaacaacaggagggtcaactgaagcacctggagcaccaggaggggcagcttgaggtcccggaggagcaaatggggcagctgaaatatcttgaacagcaggaaggacagctcaaacatctggaccaacaggaaaaacagccggagctcccggaacaacagatggggcagctcaaacacctggagcagcaggaaggacagccgaagcatctggagcaacaagagggtcaactggaacaactcgaggagcaggaggggcagctgaaacacctcgaacagcaggaaggacagttggaacacctggaacatcaggaggggcagctggggcttccggagcagcaggtcctccagcttaagcagttggagaagcagcagggacagccaaaacacctggaagaagaggagggtcagttgaaacacctggttcagcaggaagggcaacttaagcacctggtgcaacaggaagggcagttggagcaacaggaacgccaggtggagcatctggagcagcaggtgggtcagttaaaacacttagaggagcaggaagggcagctaaagcacctcgagcaacagcagggccagttggaggtgcctgaacagcaggtcgggcagcctaaaaatctcgaacaggaggaaaaacagctggaactaccggaacagcaagaaggccaagtcaagcacctggagaagcaagaggcacagctggagctgccggagcagcaagttggtcagcctaaacacctcgagcagcaggagaaacatctggagcatcccgaacagcaagacggacagttgaagcatctagaacagcaggagggccagctgaaggacttggagcaacagaaaggacagctagagcaacccgttttcgcaccagctccaggccaggttcaggatattcaaccggccctccccaccaagggggaagtcctcctgcccgtggaacatcagcaacaaaaacaggaggtgcagtggccacccaagcacaagtag

SEQ ID NO: 285946 - DNA, 1320 bp, Artificial Sequence
  derived and/or modified sequence
atgaaaaaagaacagcttctggagctgcctgaacagcaggagggccacctgaaacacctggaacaacaggaaggacagctgaaacaccccgaacagcaagaaggacaactcgagctgcctgaacagcaggaggggcaactcgaattgcctgaacagcaggaaggacaactcgagcttcccgaacagcaggaggggcagctggaactgcctgaacagcaagaaggccagctggaactacccgaacagcaggagggacagttggagctgccccagcaacaggaggggcagctggagctctccgagcagcaggagggtcagctcgagctttcagagcagcaagagggacagctgaagcatctggaacaccaggagggtcagctagaagttccggaggaacaaatgggtcagctcaagtacttggagcagcaggaaggacagctcaaacacctcgaccagcaagagaaacaaccagaattaccagagcagcaaatgggtcagctcaaacatctggaacagcaagagggacagccaaaacacctcgagcaacaggagggccagctggaacagctggaggagcaagagggccagctgaagcatttggagcagcaggagggccagctcgaacaccttgagcaccaagagggccagctggggttgcctgaacagcaggtcctgcagctgaagcaactggagaagcagcaaggacagccaaagcatctggaggaggaggagggtcagctcaagcatctcgtgcagcaagaaggtcagctgaaacacctggttcagcaggaaggccagttggagcagcaggaacggcaagtggagcacctcgaacagcaggtgggccagctcaaacatcttgaggaacaggaaggacagctgaaacatttagagcagcagcaggggcagctggaggtgcctgaacagcaggtcggccagcctaagaatctggagcaggaggagaagcagctggagttgcctgaacagcaggaagggcaggtcaagcacctcgagaagcaggaggctcaactggaattgcctgagcagcaggtcgggcagcctaaacacctagagcagcaagaaaaacacttagaacacccggaacagcaggacgggcagctgaaacacctggaacaacaggagggacagcttaaagacctcgagcagcaaaaggggcaactcgaacagcctgttttcgccccagcccccggacaggtacaggacatccagcccgcactccctacgaagggcgaggtcctgctccccgtggagcatcagcaacagaagcaggaagtccagtggccgccgaaacacaaatag

SEQ ID NO: 285947 - DNA, 2153 bp, Artificial Sequence
  derived and/or modified sequence
tcagcactccaccaaagcctctgcctcagccttactgtgagtctggttgacagtagcttctaagatgtcccagcaacacacactgccagtgaccctctcccctgccctcagtcaggagctcctcaagactgttcctcctccagtcaatacccatcaggagcaaatgaaacagccaactccactgcctcccccatgccagaaggtgcctgtcgagctcccagtggaggtcccatcaaagcaagaggaaaagcacatgactgctgtaaagggactgcctgagcaagaatgtgagcaacagcagaaggagccacaggagcaggagctgcagcaacagcactgggaacagcatgaggaatatcagaaagcagaaaacccagagcagcagcttaagcaggagaaaacacaaagggatcagcagctaaacaaacagctggaagaagagaagaagctcttagaccagcaactggatcaagagctagtcaagagagatgagcaactgggaatgaagaaagagcaactgttggagctcccagagcagcaggaggggcacctgaagcacctagagcagcaggagggacagctgaagcacccggagcagcaggaggggcagctggagctcccagagcagcaggaggggcagctggagctcccagagcagcaggaggggcagctggagctcccagagcagcaggaggggcagctggagctcccagagcagcaggaggggcagctggagctcccagagcagcaggaggggcagctggagctcccacagcagcaggaggggcagctggagctctctgagcagcaggaggggcagctggagctctctgagcagcaggagggacagctgaagcacctggagcaccaggaggggcagctggaggtcccagaggagcagatggggcagctgaagtacctggaacagcaggaggggcagctgaagcacctggatcagcaggagaagcagccagagctcccagagcagcagatggggcagctgaagcacctggagcagcaggaggggcagcctaagcatctggagcagcaggaggggcaactggagcagctggaggagcaggaggggcagctgaagcacctggagcagcaggaggggcagctggagcacctggagcaccaggaagggcagctggggctcccagagcagcaggtgctgcagctgaagcagctagagaagcagcaggggcagccaaagcacctggaggaggaggaggggcagctgaagcacctggtgcagcaggaggggcagctgaagcatctggtgcagcaggaggggcagctggagcagcaggagaggcaggtggagcacctggagcagcaggtggggcagctgaagcacctagaggagcaggagggacaactgaagcatctggagcagcagcaggggcagttggaggtcccagagcagcaggtggggcagccaaagaacctggagcaggaggagaagcaactggagctcccagagcagcaagagggccaggtgaagcacctggagaagcaggaggcacagctggagctcccagagcagcaggtaggacagccaaagcacctggaacagcaggaaaagcacctagagcacccagagcagcaggacggacaactaaaacatctggagcagcaggaggggcagctgaaggacctggagcagcagaaggggcagctggagcagcctgtgtttgccccagctccaggccaggtccaagacattcaaccagccctgcccacaaagggagaagtattgcttcctgtagagcaccagcagcagaagcaggaggtgcagtggccacccaaacataaataaccacccgcagtgtccagaggccctcagatcgtctcatacaagggaagagagagccactggctccacttatttcgggtccgctaggtggcccgtctcatctgtgaacttgactctgtccctctacatgtctctttaatggggtgagggtgggggagagagggaattattgtccagtgccaaccccaatgaccccaatcccaacctcaggtgagcagagcctctacttgagggactattgttactataggaatccttacttccccagtattgaagctgaatcagtgagtgtgtacaatgatacataataaatcctggaagtcttgggatccta

SEQ ID NO: 285948 - DNA, 2015 bp, Artificial Sequence
  derived and/or modified sequence
agcactccaccaaagcctctgcctcagccttactgtgagtctggttgacagtagcttctaagatgtcccagcaacacacactgccagtgaccctctcccctgccctcagtcaggagctcctcaagactgttcctcctccagtcaatacccatcaggagcaaatgaaacagccaactccactgcctcccccatcaacagcactgggaacagcatgaggaatatcagaaagcagaaaacccagagcagcagcttaagcaggagaaaacacaaagggatcagcagctaaacaaacagctggaagaagagaagaagctcttagaccagcaactggatcaagagctagtcaagagagatgagcaactgggaatgaagaaagagcaactgttggagctcccagagcagcaggaggggcacctgaagcacctagagcagcaggagggacagctgaagcacccggagcagcaggaggggcagctggagctcccagagcagcaggaggggcagctggagctcccagagcagcaggaggggcagctggagctcccagagcagcaggaggggcagctggagctcccagagcagcaggaggggcagctggagctcccagagcagcaggaggggcagctggagctcccacagcagcaggaggggcagctggagctctctgagcagcaggaggggcagctggagctctctgagcagcaggagggacagctgaagcacctggagcaccaggaggggcagctggaggtcccagaggagcagatggggcagctgaagtacctggaacagcaggaggggcagctgaagcacctggatcagcaggagaagcagccagagctcccagagcagcagatggggcagctgaagcacctggagcagcaggaggggcagcctaagcatctggagcagcaggaggggcaactggagcagctggaggagcaggaggggcagctgaagcacctggagcagcaggaggggcagctggagcacctggagcaccaggaagggcagctggggctcccagagcagcaggtgctgcagctgaagcagctagagaagcagcaggggcagccaaagcacctggaggaggaggaggggcagctgaagcacctggtgcagcaggaggggcagctgaagcatctggtgcagcaggaggggcagctggagcagcaggagaggcaggtggagcacctggagcagcaggtggggcagctgaagcacctagaggagcaggagggacaactgaagcatctggagcagcagcaggggcagttggaggtcccagagcagcaggtggggcagccaaagaacctggagcaggaggagaagcaactggagctcccagagcagcaagagggccaggtgaagcacctggagaagcaggaggcacagctggagctcccagagcagcaggtaggacagccaaagcacctggaacagcaggaaaagcacctagagcacccagagcagcaggacggacaactaaaacatctggagcagcaggaggggcagctgaaggacctggagcagcagaaggggcagctggagcagcctgtgtttgccccagctccaggccaggtccaagacattcaaccagccctgcccacaaagggagaagtattgcttcctgtagagcaccagcagcagaagcaggaggtgcagtggccacccaaacataaataaccacccgcagtgtccagaggccctcagatcgtctcatacaagggaagagagagccactggctccacttatttcgggtccgctaggtggcccgtctcatctgtgaacttgactctgtccctctacatgtctctttaatggggtgagggtgggggagagagggaattattgtccagtgccaaccccaatgaccccaatcccaacctcaggtgagcagagcctctacttgagggactattgttactataggaatccttacttccccagtattgaagctgaatcagtgagtgtgtacaatgatacataataaatcctggaagtcttgggatcc

SEQ ID NO: 285949 - DNA, 1758 bp, Artificial Sequence
  derived and/or modified sequence
atgagccagcagcacaccctgcctgtgaccctgagccctgccctgagccaggagctgctgaagacagtgcccccacctgtgaacacccaccaggagcagatgaagcagcccacccccctgcccccaccctgccagaaggtgcctgtggagctgcctgtggaggtgcccagcaagcaggaggagaagcacatgacagctgtgaagggcctgcctgagcaggagtgtgagcagcagcagaaggagccccaggagcaggagctgcagcagcagcactgggagcagcacgaggagtaccagaaggccgagaaccctgagcagcagctgaagcaggagaagacccagagggaccagcagctgaacaagcagctggaggaggagaagaagctgctggaccagcagctggaccaggagctggtgaagagagatgagcagctgggcatgaagaaggagcagctgctggagctgcctgagcagcaggagggccacctgaagcacctggagcagcaggagggccagctgaagcaccctgagcagcaggagggccagctggagctgcctgagcagcaggagggccagctggagctgcctgagcagcaggagggccagctggagctgcctgagcagcaggagggccagctggagctgcctgagcagcaggagggccagctggagctgcctgagcagcaggagggccagctggagctgccccagcagcaggagggccagctggagctgtctgagcagcaggagggccagctggagctgtctgagcagcaggagggccagctgaagcacctggagcaccaggagggccagctggaggtgcctgaggagcagatgggccagctgaagtacctggagcagcaggagggccagctgaagcacctggaccagcaggagaagcagcctgagctgcctgagcagcagatgggccagctgaagcacctggagcagcaggagggccagcccaagcacctggagcagcaggagggccagctggagcagctggaggagcaggagggccagctgaagcacctggagcagcaggagggccagctggagcacctggagcaccaggagggccagctgggcctgcctgagcagcaggtgctgcagctgaagcagctggagaagcagcagggccagcccaagcacctggaggaggaggagggccagctgaagcacctggtgcagcaggagggccagctgaagcacctggtgcagcaggagggccagctggagcagcaggagcggcaggtggagcacctggagcagcaggtgggccagctgaagcacctggaggagcaggagggccagctgaagcacctggagcagcagcagggccagctggaggtgcctgagcagcaggtgggccagcccaagaacctggagcaggaggagaagcagctggagctgcctgagcagcaggagggccaggtgaagcacctggagaagcaggaggcccagctggagctgcctgagcagcaggtgggccagcccaagcacctggagcagcaggagaagcacctggagcaccctgagcagcaggacggccagctgaagcacctggagcagcaggagggccagctgaaggacctggagcagcagaagggccagctggagcagcctgtgtttgccccagcccctggccaggtgcaggacatccagcctgccctgcccaccaagggggaggtgctgctgcctgtggagcaccagcagcagaagcaggaggtgcagtggccacccaagcacaagtag

SEQ ID NO: 285950 - DNA, 1320 bp, Artificial Sequence
  derived and/or modified sequence
atgaagaaggagcagctgctggagctgcctgagcagcaggagggccacctgaagcacctggagcagcaggagggccagctgaagcaccctgagcagcaggagggccagctggagctgcctgagcagcaggagggccagctggagctgcctgagcagcaggagggccagctggagctgcctgagcagcaggagggccagctggagctgcctgagcagcaggagggccagctggagctgcctgagcagcaggagggccagctggagctgccccagcagcaggagggccagctggagctgtctgagcagcaggagggccagctggagctgtctgagcagcaggagggccagctgaagcacctggagcaccaggagggccagctggaggtgcctgaggagcagatgggccagctgaagtacctggagcagcaggagggccagctgaagcacctggaccagcaggagaagcagcctgagctgcctgagcagcagatgggccagctgaagcacctggagcagcaggagggccagcccaagcacctggagcagcaggagggccagctggagcagctggaggagcaggagggccagctgaagcacctggagcagcaggagggccagctggagcacctggagcaccaggagggccagctgggcctgcctgagcagcaggtgctgcagctgaagcagctggagaagcagcagggccagcccaagcacctggaggaggaggagggccagctgaagcacctggtgcagcaggagggccagctgaagcacctggtgcagcaggagggccagctggagcagcaggagcggcaggtggagcacctggagcagcaggtgggccagctgaagcacctggaggagcaggagggccagctgaagcacctggagcagcagcagggccagctggaggtgcctgagcagcaggtgggccagcccaagaacctggagcaggaggagaagcagctggagctgcctgagcagcaggagggccaggtgaagcacctggagaagcaggaggcccagctggagctgcctgagcagcaggtgggccagcccaagcacctggagcagcaggagaagcacctggagcaccctgagcagcaggacggccagctgaagcacctggagcagcaggagggccagctgaaggacctggagcagcagaagggccagctggagcagcctgtgtttgccccagcccctggccaggtgcaggacatccagcctgccctgcccaccaagggggaggtgctgctgcctgtggagcaccagcagcagaagcaggaggtgcagtggccacccaagcacaagtag

SEQ ID NO: 285951 - DNA, 1758 bp, Artificial Sequence
  derived and/or modified sequence
atgagccagcagcacaccctgcccgtgaccctgagccccgccctgagccaagagctgctgaaaaccgtgcctccccccgtgaacacacatcaggagcagatgaagcaaccaactcctctgcctccaccatgtcagaaagtgcctgtcgagctccccgtggaagtgccaagcaagcaggaagagaaacatatgactgccgtgaagggccttccagaacaagaatgtgaacagcaacagaaggaaccacaagaacaggagctacagcagcagcactgggagcaacacgaggagtaccagaaggccgagaaccccgaacagcagctcaagcaggaaaagactcagcgtgaccagcagctcaacaaacagcttgaggaggaaaaaaaactgcttgatcaacagctagaccaggagctggtcaaaagagacgagcaactggggatgaagaaagaacagctgctggagctgcctgaacaacaagaggggcatctgaaacatttagagcagcaagaaggacagctgaaacatcctgagcagcaggaaggacagcttgagcttcccgagcagcaggaaggtcagctggagttacctgaacagcaagagggacaactggaattgcctgaacaacaggaaggccagcttgagcttcctgagcagcaagagggccagctggagctccctgaacagcaggaaggccagctggagttgcctcagcagcaagagggccaactggaactgagcgagcagcaggagggccagctcgaactttccgagcaacaggagggccagttaaagcacctagagcatcaggaggggcagttggaagttcccgaagaacaaatgggccagttgaagtaccttgaacaacaggaggggcagctcaagcacctagaccaacaggaaaagcagcctgagctgccagagcagcagatgggccaattgaaacacctggaacagcaggaggggcagcccaagcaccttgagcagcaagagggacagttggagcagttagaggagcaggaaggacagctcaaacacttagagcagcaggaagggcaacttgagcacctggaacaccaggagggccagctgggcttaccggagcaacaggtactgcaattaaagcagctggaaaaacaacaggggcaaccaaaacacttggaagaggaggaaggacagctgaaacatttggtgcagcaggaaggccagctcaagcacttagtgcagcaggaggggcaactggagcagcaggagcgtcaagttgagcatctggagcagcaggtgggccagctcaaacatctggaggagcaggaaggccaactgaagcatctcgaacagcaacagggacagctcgaggtgcccgagcagcaagtgggtcagcctaagaacctggaacaggaagagaagcagctggaattaccagagcagcaggaagggcaggtgaagcatctggaaaaacaggaagctcagttggaactccctgaacagcaggtagggcagcctaaacacctagagcagcaggagaagcatcttgaacaccccgaacagcaagacggacaacttaagcaccttgagcagcaggaggggcagctgaaggatctggaacagcagaagggccaattggagcaacccgtcttcgcaccagcccctggccaggttcaagacatccagcccgcgctccctaccaagggagaagtactgctgccggtcgagcatcaacagcaaaaacaagaggtccagtggccaccaaagcacaagtag

SEQ ID NO: 285952 - DNA, 1320 bp, Artificial Sequence
  derived and/or modified sequence
atgaagaaggagcagctgctggagctgcccgagcagcaggagggccatctgaaacatctggagcagcaggaaggacagttaaaacacccagagcaacaggaagggcagctggaactgcctgaacagcaagaaggtcaactggagttgccagagcagcaggaaggacagttagagctgcctgagcagcaggagggccaactggaactgccagaacagcaagagggccaactggagctgcccgaacagcaggaaggccaactggagttaccccagcaacaggaaggccagttggaactgtccgagcaacaggaggggcaacttgagttgtccgaacagcaggagggccagctgaagcacctggaacaccaggaaggccagctagaggtcccggaggaacagatggggcagctcaagtacctagaacagcaggaaggtcagctgaagcatctggatcagcaggagaaacagccagaactacctgagcagcaaatgggccagttgaagcatctggagcaacaggagggacagcccaaacacctggagcaacaagaagggcaactggagcagctggaggaacaggagggccaacttaagcacctggaacaacaggagggtcagctcgagcacttagaacaccaggaaggtcagctgggcctgccggagcaacaagtcctgcaactgaagcagcttgaaaagcaacagggccaaccaaaacacctagaagaagaagagggccagctgaagcatctagtgcagcaggaaggtcagctgaagcatctggtgcagcaggagggccagctggagcagcaggagaggcaggtggaacatctggaacaacaagtgggtcagctgaaacacctcgaagaacaggaagggcaactgaaacacctcgagcagcagcaggggcagcttgaggtacccgaacagcaagtggggcagcctaaaaacctggagcaggaggagaaacaacttgagctgcctgagcagcaggagggtcaggtgaagcacctcgaaaaacaggaggctcagctggagctgcctgagcagcaggtgggccagcccaagcatctggaacagcaggagaaacacctggaacacccggaacagcaagatgggcagttaaagcacctagagcagcaggagggtcagctgaaggacctagagcagcaaaagggacagctcgaacagcccgtgttcgcaccagccccaggccaagtgcaggatattcaacccgccttacccaccaagggggaggtgctactgccggtagagcaccagcagcagaaacaagaagtccagtggcccccaaagcataaatag

SEQ ID NO: 285953 - DNA, 1758 bp, Artificial Sequence
  derived and/or modified sequence
atgagtcagcagcatactttgcctgtcacactgtcgccagctttgtcacaggagcttttgaagactgtacctcccccagtcaatacacaccaagagcagatgaaacagccaacacccctgcccccaccgtgccagaaggttcccgtcgaactccctgtcgaagttccttccaagcaggaagagaagcacatgaccgctgtgaaaggtctgcctgagcaagagtgtgagcagcaacaaaaagaacctcaagagcaggagctgcagcagcaacattgggaacaacacgaagaatatcaaaaggcagaaaacccggaacagcagctgaagcaggaaaagacccagcgagatcaacagttgaataagcagctggaagaagagaaaaaactgctggatcagcagctggaccaggagcttgtcaagcgagacgagcaactggggatgaaaaaggagcagctgctcgagctaccagaacagcaggaaggtcatttgaaacatttggaacagcaggaggggcaactgaaacaccccgaacagcaggaaggtcagttagagcttccggaacaacaggaggggcaactggagctccccgaacagcaggagggacagttggaacttccagaacagcaggaaggacagctcgaattgccggaacagcaggaagggcagttggaactacccgagcagcaggagggtcaactggagctgccgcaacagcaggaaggccagctcgagctgagcgagcaacaggaggggcagttggagctgtcagagcagcaggaagggcagctgaagcacttggagcaccaggagggccaactggaagtgcctgaggagcagatgggtcagcttaagtacctggaacaacaggagggccagcttaagcacctggaccagcaggaaaaacaaccggagttgcctgagcaacagatggggcaactcaagcacttagagcaacaggagggccagccaaagcatcttgagcagcaggaaggacagctggaacagcttgaggagcaggaaggacagctgaagcacctggaacagcaggaagggcaactcgaacatctagagcatcaggagggtcagttgggcctccctgagcagcaggtgctccagttgaagcaactagaaaaacaacagggccagcctaagcacctggaagaggaagagggccaactcaagcacttggtccagcaggaaggccagctcaaacatcttgtgcagcaggaagggcagctggagcagcaagaacggcaagtcgagcacctcgagcagcaggtgggccagctgaagcatctcgaagagcaggaaggccagcttaaacacctagagcaacagcaagggcaactcgaggtgccagagcaacaggtgggacagcccaaaaaccttgaacaggaagagaaacagctggaactcccagaacagcaagagggccaggtcaagcacctggaaaaacaagaagcgcagctcgagctgccggagcagcaggtgggtcaaccaaaacacctagagcaacaagagaagcacctggaacaccccgagcagcaagatggtcagctgaagcacctggaacagcaggagggccagctaaaagatttggagcagcagaaaggccagcttgagcagccagtcttcgcccctgcccctggacaagtacaggacattcagccagccctacctacaaagggggaagtactcctgccagttgaacaccagcaacagaaacaggaggtccagtggcctcccaagcataagtag

SEQ ID NO: 285954 - DNA, 1320 bp, Artificial Sequence
  derived and/or modified sequence
atgaagaaagaacagttgctggagttgcctgagcaacaggaaggccaccttaagcatttggaacagcaagagggacagctaaaacatccagagcaacaggagggccagctcgaattgccagagcaacaggaaggccagcttgagctgcctgagcagcaggaaggccagctggaactgccagaacaacaggaaggccaactagaactcccagaacaacaggaggggcagctggaactccccgagcagcaagagggccaactggaattgccccagcagcaggagggacagctggaacttagtgagcagcaggaaggacagctggaactgagtgagcaacaggaggggcaattgaagcacctggagcatcaagaaggccagctggaggtgcctgaggagcagatggggcaacttaagtacctggagcagcaagagggccagctaaagcacctggatcaacaggagaaacagcccgagctgccagagcagcagatgggccagctcaagcacctggagcaacaggagggccagccaaagcatctggagcagcaggagggccaacttgagcagttggaggaacaagaaggccaattgaaacatctggagcaacaagagggccaactcgagcacctggaacatcaggagggccagctgggcctgcctgagcagcaggttcttcaactaaaacagttggagaaacagcagggtcagcccaagcacctagaggaggaagaggggcaactaaaacatctcgttcagcaggaaggtcaacttaaacacctggtacaacaagaggggcagctggagcaacaagaaagacaggtcgaacacctagaacagcaggtcggccagctgaaacaccttgaggagcaggaaggacaactcaaacacctggagcaacagcaggggcagctcgaggtgccagagcagcaggtgggtcagcccaagaatttggaacaagaggagaaacagctcgaactgcccgaacaacaggaggggcaagttaagcacctcgaaaagcaggaagcccagctcgagctccctgaacagcaggtcggacagcctaaacatctagagcagcaggagaaacacctggagcaccctgagcagcaggatggccaactgaaacacctggagcagcaagagggacaacttaaagacctggagcagcaaaaagggcaacttgaacagcccgtgttcgcccctgcccctgggcaggtgcaggatatccaacccgctcttcctacaaagggcgaggtgctgcttccagtggagcaccagcagcagaagcaggaggtccagtggcccccaaaacacaaatag

SEQ ID NO: 285955 - DNA, 1758 bp, Artificial Sequence
  derived and/or modified sequence
atgagccagcagcacaccctgcccgtgaccctgagccccgccctgagccaggagctgctgaagaccgtgcccccccccgtgaacacccaccaggagcagatgaagcagcccacccccctgccccccccctgccagaaggtgcccgtggagctgcccgtggaggtgcccagcaagcaggaggagaagcacatgaccgccgtgaagggcctgcccgagcaggagtgcgagcagcagcagaaggagccccaggagcaggagctgcagcagcagcactgggagcagcacgaggagtaccagaaggccgagaaccccgagcagcagctgaagcaggagaagacccagagagaccagcagctgaacaagcagctggaggaggagaagaagctgctggaccagcagctggaccaggagctggtgaagagagacgagcagctgggcatgaagaaggagcagctgctggagctgcccgagcagcaggagggccacctgaagcacctggagcagcaggagggccagctgaagcaccccgagcagcaggagggccagctggagctgcccgagcagcaggagggccagctggagctgcccgagcagcaggagggccagctggagctgcccgagcagcaggagggccagctggagctgcccgagcagcaggagggccagctggagctgcccgagcagcaggagggccagctggagctgccccagcagcaggagggccagctggagctgagcgagcagcaggagggccagctggagctgagcgagcagcaggagggccagctgaagcacctggagcaccaggagggccagctggaggtgcccgaggagcagatgggccagctgaagtacctggagcagcaggagggccagctgaagcacctggaccagcaggagaagcagcccgagctgcccgagcagcagatgggccagctgaagcacctggagcagcaggagggccagcccaagcacctggagcagcaggagggccagctggagcagctggaggagcaggagggccagctgaagcacctggagcagcaggagggccagctggagcacctggagcaccaggagggccagctgggcctgcccgagcagcaggtgctgcagctgaagcagctggagaagcagcagggccagcccaagcacctggaggaggaggagggccagctgaagcacctggtgcagcaggagggccagctgaagcacctggtgcagcaggagggccagctggagcagcaggagagacaggtggagcacctggagcagcaggtgggccagctgaagcacctggaggagcaggagggccagctgaagcacctggagcagcagcagggccagctggaggtgcccgagcagcaggtgggccagcccaagaacctggagcaggaggagaagcagctggagctgcccgagcagcaggagggccaggtgaagcacctggagaagcaggaggcccagctggagctgcccgagcagcaggtgggccagcccaagcacctggagcagcaggagaagcacctggagcaccccgagcagcaggacggccagctgaagcacctggagcagcaggagggccagctgaaggacctggagcagcagaagggccagctggagcagcccgtgttcgcccccgcccccggccaggtgcaggacatccagcccgccctgcccaccaagggcgaggtgctgctgcccgtggagcaccagcagcagaagcaggaggtgcagtggccccccaagcacaagtag

SEQ ID NO: 285956 - DNA, 1320 bp, Artificial Sequence
  derived and/or modified sequence
atgaagaaggagcagctgctggagctgcccgagcagcaggagggccacctgaagcacctggagcagcaggagggccagctgaagcaccccgagcagcaggagggccagctggagctgcccgagcagcaggagggccagctggagctgcccgagcagcaggagggccagctggagctgcccgagcagcaggagggccagctggagctgcccgagcagcaggagggccagctggagctgcccgagcagcaggagggccagctggagctgccccagcagcaggagggccagctggagctgagcgagcagcaggagggccagctggagctgagcgagcagcaggagggccagctgaagcacctggagcaccaggagggccagctggaggtgcccgaggagcagatgggccagctgaagtacctggagcagcaggagggccagctgaagcacctggaccagcaggagaagcagcccgagctgcccgagcagcagatgggccagctgaagcacctggagcagcaggagggccagcccaagcacctggagcagcaggagggccagctggagcagctggaggagcaggagggccagctgaagcacctggagcagcaggagggccagctggagcacctggagcaccaggagggccagctgggcctgcccgagcagcaggtgctgcagctgaagcagctggagaagcagcagggccagcccaagcacctggaggaggaggagggccagctgaagcacctggtgcagcaggagggccagctgaagcacctggtgcagcaggagggccagctggagcagcaggagagacaggtggagcacctggagcagcaggtgggccagctgaagcacctggaggagcaggagggccagctgaagcacctggagcagcagcagggccagctggaggtgcccgagcagcaggtgggccagcccaagaacctggagcaggaggagaagcagctggagctgcccgagcagcaggagggccaggtgaagcacctggagaagcaggaggcccagctggagctgcccgagcagcaggtgggccagcccaagcacctggagcagcaggagaagcacctggagcaccccgagcagcaggacggccagctgaagcacctggagcagcaggagggccagctgaaggacctggagcagcagaagggccagctggagcagcccgtgttcgcccccgcccccggccaggtgcaggacatccagcccgccctgcccaccaagggcgaggtgctgctgcccgtggagcaccagcagcagaagcaggaggtgcagtggccccccaagcacaagtag

SEQ ID NO: 285957 - protein, 1848 aa, Artificial Sequence
  derived and/or modified sequence
MAAAPGLLVWLLVLRLPWRVPGQLDPSTGRRFSEHKLCADDECSMLMYRGEALEDFTGPDCRFVNFKKGDPVYVYYKLARGWPEVWAGSVGRTFGYFPKDLIQVVHEYTKEELQVPTDETDFVCFDGGRDDFHNYNVEELLGFLELYNSAATDSEKAVEKTLQDMEKNPELSKEREPEPEPVEANSEESDSVFSENTEDLQEQFTTQKHHSHANSQANHAQGEQASFESFEEMLQDKLKVPESENNKTSNSSQVSNEQDKIDAYKLLKKEMTLDLKTKFGSTADALVSDDETTRLVTSLEDDFDEELDTEYYAVGKEDEENQEDFDELPLLTFTDGEDMKTPAKSGVEKYPTDKEQNSNEEDKVQLTVPPGIKNDDKNILTTWGDTIFSIVTGGEETRDTMDLESSSSEEEKEDDDDALVPDSKQGKPQSATDYSDPDNVDDGLFIVDIPKTNNDKEVNAEHHIKGKGRGVQESKRGLVQDKTELEDENQEGMTVHSSVHSNNLNSMPAAEKGKDTLKSAYDDTENDLKGAAIHISKGMLHEEKPGEQILEGGSESESAQKAAGNQMNDRKIQQESLGSAPLMGDDHPNASRDSVEGDALVNGAKLHTLSVEHQREELKEELVLKTQNQPRFSSPDEIDLPRELEDEVPILGRNLPWQQERDVAATASKQMSEKIRLSEGEAKEDSLDEEFFHHKAMQGTEVGQTDQTDSTGGPAFLSKVEEDDYPSEELLEDENAINAKRSKEKNPGNQGRQFDVNLQVPDRAVLGTIHPDPEIEESKQETSMILDSEKTSETAAKGVNTGGREPNTMVEKERPLADKKAQRPFERSDFSDSIKIQTPELGEVFQNKDSDYLKNDNPEEHLKTSGLAGEPEGELSKEDHENTEKYMGTESQGSAAAEPEDDSFHWTPHTSVEPGHSDKREDLLIISSFFKEQQSLQRFQKYFNVHELEALLQEMSSKLKSAQQESLPYNMEKVLDKVFRASESQILSIAEKMLDTRVAENRDLGMNENNIFEEAAVLDDIQDLIYFVRYKHSTAEETATLVMAPPLEEGLGGAMEEMQPLHEDNFSREKTAELNVQVPEEPTHLDQRVIGDTHASEVSQKPNTEKDLDPGPVTTEDTPMDAIDANKQPETAAEEPASVTPLENAILLIYSFMFYLTKSLVATLPDDVQPGPDFYGLPWKPVFITAFLGIASFAIFLWRTVLVVSNTVYYVTEQQISEKLKTIMKENTELVQKLSNYEQKIKESKKHVQETRKQNMILSDEAIKYKDKIKTLEKNQEILDDTAKNLRVMLESEREQNVKNQDLLQQEIEDWSKLHAELSEQIKSFEKSQKDLEVALTHKDDNINALTNCITQLNLLECESESEGQNKGGNDSDELANGEVGGDRNEKMKNQIKQMMDVSRTQTAISVVEEDLKLLQLKLRASVSTKCNLEDQVKKLEDDRNSLQAAKAGLEDECKTLRQKVEILNELYQQKEMALQKKLSQEEYERQEREHRLSAADEKAVSAAEEVKTYKRRIEEMEDELQKTERSFKNQIATHEKKAHENWLKARAAERAIAEEKREAANLRHKLLELTQKMAMLQEEPVIVKPMPGKPNTQNPPRRGPLSQNGSFGPSPVSGGECSPPLTVEPPVRPLSATLNRRDMPRSEFGSVDGPLPHPRWSAEASGKPSPSDPGSGTATMMNSSSRGSSPTRVLDEGKVNMAPKGPPPFPGVPLMSTPMGGPVPPPIRYGPPPQLCGPFGPRPLPPPFGPGMRPPLGLREFAPGVPPGRRDLPLHPRGFLPGHAPFRPLGSLGPREYFIPGTRLPPPTHGPQEYPPPPAVRDLLPSGSRDEPPPASQSTSQDCSQALKQSP

SEQ ID NO: 285958 - protein, 1016 aa, Artificial Sequence
  derived and/or modified sequence
  misc_feature (1)..(1): Xaa can be any naturally occurring amino acid
XLVPDSKQGKPQSATDYSDPDNVDDGLFIVDIPKTNNDKEVNAEHHIKGKGRGVQESKRGLVQDKTELEDENQEGMTVHSSVHSNNLNSMPAAEKGKDTLKSAYDDTENDLKGAAIHISKGMLHEEKPGEQILEGGSESESAQKAAGNQMNDRKIQQESLGSAPLMGDDHPNASRDSVEGDALVNGAKLHTLSVEHQREELKEELVLKTQNQPRFSSPDEIDLPRELEDEVPILGRNLPWQQERDVAATASKQMSEKIRLSEGEAKEDSLDEEFFHHKAMQGTEVGQTDQTDSTGGPAFLSKVEEDDYPSEELLEDENAINAKRSKEKNPGNQGRQFDVNLQVPDRAVLGTIHPDPEIEESKQETSMILDSEKTSETAAKGVNTGGREPNTMVEKERPLADKKAQRPFERSDFSDSIKIQTPELGEVFQNKDSDYLKNDNPEEHLKTSGLAGEPEGELSKEDHENTEKYMGTESQGSAAAEPEDDSFHWTPHTSVEPGHSDKREDLLIISSFFKEQQSLQRFQKYFNVHELEALLQEMSSKLKSAQQESLPYNMEKVLDKVFRASESQILSIAEKMLDTRVAENRDLGMNENNIFEEAAVLDDIQDLIYFVRYKHSTAEETATLVMAPPLEEGLGGAMEEMQPLHEDNFSREKTAELNVQVPEEPTHLDQRVIGDTHASEVSQKPNTEKDLDPGPVTTEDTPMDAIDANKQPETAAEEPASVTPLENAILLIYSFMFYLTKSLVATLPDDVQPGPDFYGLPWKPVFITAFLGIASFAIFLWRTVLVVKDRVYQVTEQQISEKLKTIMKENTELVQKLSNYEQKIKESKKHVQETRKQNMILSDEAIKYKDKIKTLEKNQEILDDTAKNLRVMLESEREQNVKNQDLLQQEIEDWSKLHAELSEQIKSFEKSQKDLEVALTHKDDNINALTNCITQLNLLECESESEGQNKGGNDSDELANGEVGGDRNEKMKNQIKQMMDVSRTQTAISVVEEDLKLLQLKLRASVSTKCNLEDQV

SEQ ID NO: 285959 - DNA, 5547 bp, Artificial Sequence
  derived and/or modified sequence
atggccgccgctcccggacttcttgtgtggctgctggtgctccggctgccttggcgggtgcccggtcagctggacccgtcaacgggaagacggttctccgaacataagctgtgcgccgatgatgagtgtagcatgctgatgtacaggggagaggcgctggaggatttcactggccctgattgccggtttgtcaacttcaaaaaaggcgacccggtttacgtttattacaagttagcccgtggatggcccgaggtctgggcgggtagcgttggacgtacttttggatacttcccaaaggatctgatccaggttgttcacgagtacaccaaggaagaattgcaagtgccgactgatgaaacagactttgtgtgttttgatggagggcgggatgatttccacaattataacgtcgaagagctcctgggctttctggagctctataattctgctgctacagattctgaaaaagctgtggagaaaactctgcaggatatggaaaaaaaccccgagctttccaaagagagggaacccgaaccagagccggtggaggcaaactccgaagagtccgactccgtgttttcggagaatacagaggaccttcaggaacagttcaccacacagaaacatcattcccacgccaatagccaggccaatcacgcccaaggtgagcaagcatcttttgagtccttcgaagagatgctccaagacaaacttaaagtgcctgaatccgagaacaacaaaacaagtaattcctcacaagtcagcaacgaacaagacaagatagatgcatataaactgttgaagaaagaaatgacgttggatctgaaaactaagttcggatctaccgctgatgccttggtatccgacgatgagacgactagactcgtgacgtccctcgaggacgattttgacgaagagttagacactgagtactatgctgtcggtaaagaggatgaggagaaccaggaagactttgacgaattgccgctgttaaccttcacagatggagaggacatgaagacaccagcgaagagtggagtggagaagtatcctactgacaaggagcagaactctaatgaggaagataaagtgcaactaaccgtgcccccagggattaaaaatgatgataagaatatccttacgacatggggtgataccatcttttccatcgtgaccggtggcgaggaaacgcgtgataccatggacctggaatcatctagctccgaggaggagaaggaggacgacgacgatgcgctcgtaccggattccaaacaggggaaaccccagagtgccacagattatagcgatcccgataacgtcgatgatggcttgtttatcgtcgacatcccgaagactaacaacgacaaggaggtgaatgccgaacaccacattaagggaaagggcaggggcgtgcaggaaagcaagcgagggttggtccaggataaaactgagcttgaggatgaaaatcaggaaggaatgacagtgcacagtagtgtgcactcaaacaacctcaacagcatgcccgccgctgaaaaggggaaagacacgctcaagagtgcgtatgatgatacagagaacgacttgaaaggggctgcaatccatatttctaaggggatgctccacgaggagaaaccaggcgagcagatacttgaaggggggtccgagagtgaaagcgcacagaaagcagcggggaaccaaatgaatgatagaaagatccagcaggagtctctggggagtgctcccctgatgggagatgatcatcctaacgcctctagggacagcgttgaaggtgatgccctggtgaatggcgctaagctgcacactctgtctgtggaacatcagcgggaggagctgaaagaggagctggtgctcaaaacccagaatcagcctaggttctcatcccctgacgagatagaccttccgcgcgaattagaggatgaggttcccatcctcgggaggaacctgccatggcaacaggaacgggatgtggccgctacagccagtaaacagatgtccgagaagatccggctgagtgaaggagaggcaaaggaagattccctcgatgaggagtttttccatcacaaggcaatgcaaggcaccgaggtggggcagacagaccagaccgattcaacgggaggaccagcctttttgtctaaggttgaagaagatgactacccctccgaagaactcctggaggatgaaaatgcaatcaacgcgaagcgaagcaaggagaaaaaccctggtaatcagggtaggcagttcgatgtgaatcttcaggtgccagatagggccgtgcttggtacaattcacccagatccagagattgaggagtccaaacaggaaacctcgatgatcttggactccgagaagaccagcgagacggccgccaagggcgttaatacgggtggcagagaacctaatacaatggtagaaaaggagaggcctctcgcagacaaaaaggcccagaggccattcgaacggtcagacttttccgattccattaagattcagacacctgagctgggcgaagtgtttcagaataaagactcggactaccttaaaaacgacaatcccgaagagcacctcaaaacatcaggcctggccggcgaaccagagggggagttatcaaaagaagaccacgagaatacggagaagtatatgggaacagaatctcaaggcagcgccgccgccgagccagaggatgactcttttcactggacccctcacacgtcggtggaacctgggcatagtgacaagcgcgaggacctgcttattatttccagtttttttaaggaacaacagtccctacagagatttcagaagtactttaatgttcatgagctggaagctctgctccaggagatgagctccaaattaaaatccgcccagcaggagtcactaccatataatatggaaaaagtgctcgacaaagtttttagggcctctgagagtcaaatcctgtctattgctgagaagatgctagatactagagttgcggagaaccgcgacttgggaatgaatgaaaataatatttttgaagaagccgctgtgctggacgacattcaggatcttatctactttgtgaggtacaaacattccactgccgaggagactgctacattagtgatggccccccccctggaagagggtctgggaggcgccatggaagagatgcaaccattacatgaggacaatttctcaagggagaaaacagcagaactcaacgtccaagttcctgaggaacccacgcacctcgaccagcgcgtcataggcgacactcacgcttccgaggtttcgcagaaaccaaatactgagaaagatctcgatccaggccccgtcactaccgaagacacgcccatggatgctattgatgccaataagcagccagagactgccgccgaggaacctgcttcggttacccctctcgagaacgcaatcttgctgatctacagcttcatgttttatctgaccaagtctttagttgctaccttgcctgacgatgtgcagccgggccctgacttctatggccttccctggaaacctgtattcataacagcattcctcggaattgcttctttcgccatctttttatggaggaccgtgcttgtcgtctctaatactgtgtattacgtgaccgagcagcaaatttccgaaaagctcaagacaatcatgaaagagaacactgagctggttcaaaagctgagcaactatgagcagaagattaaggagagcaagaagcatgtgcaagaaacaaggaaacaaaatatgatacttagcgatgaggcaattaagtacaaagacaaaataaagacgctggagaagaatcaggaaatcctggatgacaccgctaagaatcttcgggttatgctcgagagtgaaagggagcagaacgtgaaaaaccaggacctgctccagcaagagattgaagattggtcaaaattacacgctgaactgtcagagcagatcaaatcctttgaaaaaagtcagaaggatttagaggtggccctcactcacaaggatgataacataaatgccctgacaaattgtataacccagctcaatctactggaatgcgaaagcgaatcagaggggcagaataaagggggaaacgacagcgatgagctggcgaacggggaggtagggggcgatcggaacgagaaaatgaagaatcagatcaagcagatgatggacgtttctcggacacagactgctatatcagtagtcgaggaagacttaaagctgctccagttgaagttacgggcaagcgtgagtacaaagtgtaatcttgaagatcaggtaaaaaaactcgaagacgacagaaactccctgcaggcggctaaggctggactagaggacgaatgtaaaacgcttagacagaaggtggagatattgaatgagttgtatcagcagaaagagatggccttacaaaagaagctgtctcaggaagaatatgagagacaggaacgggagcatcggctgagcgctgctgacgagaaagcagtttcagccgctgaggaagtgaaaacttataaaagaaggatcgaagagatggaagatgagctgcagaagaccgagcgatcgtttaagaatcagatcgccactcacgagaaaaaagctcacgaaaactggctgaaggcccgggccgccgaaagggcaatagccgaggaaaagagagaggccgccaatctgcggcacaagctacttgagttgacccagaagatggctatgctccaggaagagcctgtgatcgttaagcctatgcctggaaagcccaacacacagaatccaccccgtcgggggcccctttcgcagaatggcagcttcgggccatccccagtcagtggcggcgagtgcagcccacccttaaccgtcgagccccccgtgcggcccctgagtgctacactgaaccgtcgggatatgcccagaagcgagttcggtagtgtcgatgggcctctccctcatcccagatggagtgcggaggccagtgggaagccaagccctagcgaccctggatccgggactgccaccatgatgaattcatcttctcgcggtagttctcctactagggtactggatgagggcaaggtcaatatggcgccaaaaggccctcctccgtttcctggcgtacccctgatgtcgacccccatgggcggaccagtgccccctcccatcaggtacggaccccccccacagctgtgcgggccttttggaccaagacccctgcctcctcctttcggcccaggtatgagaccacctcttgggctcagggagtttgcccccggtgtgccgcctgggcgtagggaccttcccctgcacccacgcgggttcttgcctgggcacgctccattcaggccactgggcagcctgggtccgagggaatatttcattcctggcacacgtttgcctccacccacgcacggacctcaggagtaccctcccccacccgccgtccgcgaccttctgccttcgggtagccgggatgaacccccacccgcttcgcagtctacctctcaagattgttcccaggcattgaaacagtccccttag

SEQ ID NO: 285960 - DNA, 3051 bp, Artificial Sequence
  derived and/or modified sequence
tagcttgtcccagatagcaagcagggtaagccgcagagcgcaacagactacagtgaccccgacaacgtggatgacggtctcttcattgtagacatcccgaagaccaacaatgacaaggaagtgaatgcagaacatcatattaaagggaagggtaggggagtccaggagtctaagaggggccttgttcaggacaaaaccgagctcgaggatgaaaatcaggagggtatgacagtgcatagctccgtacacagtaataacctgaacagcatgccggctgcggagaagggaaaggacacattgaaatccgcatatgatgatactgaaaatgatctcaaaggggcagccatccacattagtaagggaatgttgcatgaggagaaaccaggtgagcagatcctcgaaggaggatctgagtccgaatcggcacagaaggcggcgggcaatcagatgaatgacagaaaaatccaacaggagtccttggggagcgcccctctgatgggtgacgaccaccctaatgctagccgagactctgtggagggcgacgcactggtcaatggcgcaaaactgcataccctgtcggtagaacaccaacgagaggagttgaaagaggaactagtgctgaagacacagaatcagccccgcttctcaagtcccgacgagattgatctgcctagagaacttgaggacgaggttcccatactagggaggaaccttccgtggcagcaggagcgagatgtggctgcaacggcctccaagcagatgtctgaaaagatacgcctgtccgagggcgaagctaaagaggattcacttgacgaggaattttttcaccataaggccatgcagggaaccgaggttggtcagaccgatcagactgacagcactggggggccagcctttttgtctaaggtggaagaggatgactaccctagtgaggaactgctcgaggacgaaaacgctattaacgctaagaggagcaaagaaaagaaccccgggaaccaggggcgacagtttgacgttaatttacaggttcccgatcgcgctgttctggggaccatccatcccgatcccgagattgaagagtctaagcaggaaacctccatgatcctagacagcgagaaaactagtgagacagcggccaagggcgtcaacacaggcggccgtgaaccaaataccatggtcgaaaaagagagaccgttggcagacaagaaggcccaaaggcctttcgagcgctcggacttcagtgacagtattaaaatccagacaccggagttgggggaggtctttcagaataaagactcggactatctcaaaaacgacaaccccgaagagcatctgaagacgagtgggctagcgggcgagcctgaaggtgaactaagtaaagaggaccatgagaacactgaaaagtatatggggactgaatcccagggctccgctgccgccgaaccggaggatgatagtttccactggacaccacatacgagtgtcgagccaggacatagtgataagcgagaagacttactgataatttcatccttctttaaagaacagcagtccctccagcgtttccaaaaatactttaatgtccacgagctggaggccctgctccaagagatgtcttcaaaactgaaatctgcacaacaggaatcgttaccatataacatggagaaggtccttgacaaggtcttccgtgccagcgagtctcaaatccttagcatagcggaaaaaatgctcgacacaagggtggctgagaatagagacctgggcatgaacgaaaacaatatcttcgaagaagcagccgtcttggatgatatccaagatctgatctattttgttagatacaagcactcaacagccgaggagaccgccaccctggtcatggccccaccactggaggaagggctaggcggtgctatggaagagatgcagccgctccacgaggacaattttagccgggaaaagactgccgagcttaacgtccaagtgcccgaggagcctacccatctggaccagagggttatcggagacacacatgcttctgaggtttcacagaagccaaatacagaaaaggatctggatcccggccctgtaaccactgaagacacaccgatggacgctatagatgcaaacaagcagccagagaccgccgccgaagagccggcatctgtgacccctttggaaaatgctatcctcttgatttactcctttatgttctacctaacaaagtcactggtggccacgctcccagatgatgttcaacctggtcctgatttctatgggctaccgtggaaacctgtgtttataacagcctttctgggtatcgcctcttttgccatctttctctggcgtaccgtattagtggtcaaggacagggtgtaccaggtcacggagcagcagatcagtgagaagttgaaaaccattatgaaggaaaacactgagctggtccaaaagctgagcaactatgagcagaagatcaaggagtctaaaaaacatgtacaggaaacgcgaaagcaaaatatgatactcagcgatgaggccatcaaatataaagacaagatcaagactctggagaaaaatcaggaaatccttgatgacactgcaaagaacctgagggtgatgctggaaagtgaacgagaacagaacgttaaaaaccaggacttgttgcagcaggagatagaagattggtccaaattgcatgccgaacttagcgagcaaatcaagagctttgaaaagtcacagaaggacctggaagtggcactcacacacaaggatgataacatcaatgcactgactaattgtattacgcaactcaatttgctagaatgcgaatccgaaagcgaagggcagaacaaaggggggaacgattctgacgaattagcgaatggagaggtcggcggcgacagaaatgagaagatgaagaatcagattaagcagatgatggatgtctccaggacacagaccgcaatttcagtggtcgaggaggatctaaaactgctccagttaaaacttagagcttcagtctctacaaagtgtaatctggaagatcaggtttag

SEQ ID NO: 285961 - DNA, 5547 bp, Artificial Sequence
  derived and/or modified sequence
atggctgctgcccctggcctgctggtgtggctgctggtgctgcggctgccctggagggtgcccggccagctggaccccagcacaggccgccgcttcagcgagcacaagctgtgtgctgatgatgagtgcagcatgctgatgtacagaggagaggccctggaggacttcaccggccctgactgccgctttgtgaacttcaagaagggggaccctgtgtatgtgtactacaagctggcccggggctggccagaggtgtgggccggctctgtgggccgcaccttcggctacttccccaaggacctgatccaggtggtgcatgagtacaccaaggaggagctgcaggtgcccacagatgaaacagactttgtgtgctttgatggcggcagagatgacttccacaactacaacgtggaggagctgctgggcttcctggagctgtacaacagcgctgccacagacagcgagaaggctgtggagaagaccctgcaggacatggagaagaaccctgagctgagcaaggagcgggagcctgagcctgagcctgtggaggccaacagcgaggagagtgacagcgtcttctctgaaaatacagaggacctgcaggagcagttcaccacccagaagcaccacagccacgccaacagccaggccaaccacgcccagggcgagcaggccagctttgagagctttgaggagatgctgcaggacaagctgaaggtgcctgagagcgagaacaacaagaccagcaacagcagccaggtgtccaatgagcaggacaagattgatgcctacaagctgctgaagaaggagatgaccctggacctgaagaccaagtttggcagcacagcagatgccctggtgtctgatgatgagaccacccggctggtgaccagcctggaggatgactttgatgaggagctggacacagagtactatgctgtgggcaaggaggatgaggagaaccaggaggactttgatgagctgcccctgctgaccttcacagatggagaggacatgaagaccccagccaagtctggagtggagaagtaccccacagacaaggagcagaacagcaatgaggaggacaaggtgcagctgactgtgcccccaggcatcaagaatgatgacaagaacatcctgaccacctggggagacaccatcttcagcatcgtgactggaggagaggagacccgggacaccatggacctggagagcagcagcagcgaggaggagaaggaggatgatgatgatgccctggtgcctgacagcaagcagggcaagccccagagcgccacagactacagcgaccctgacaacgtggatgatggcctcttcatcgtggacatccccaagaccaacaatgacaaggaggtgaatgctgagcaccacatcaagggcaagggccggggcgtgcaggagagcaagaggggcctggtgcaggacaagacagagctggaggatgagaaccaggagggcatgacagtgcacagctctgtgcacagcaacaacctgaacagcatgcctgctgctgagaagggcaaggacaccctgaagagcgcctatgatgacacagaaaatgacctgaagggagctgccatccacatcagcaagggcatgctgcacgaggagaagccaggagagcagatcctggagggcggcagcgagagcgagagcgcccagaaggctgctggcaaccagatgaatgacaggaagatccagcaggagagcctgggcagcgcccccctgatgggagatgaccaccccaatgccagccgggacagcgtggagggagatgccctggtgaatggagccaagctgcacaccctgtctgtggagcaccagcgggaggagctgaaggaggagctggtgctgaagacccagaaccagccccgcttcagcagcccagatgaaattgacctgccccgggagctggaggatgaggtgcccatcctgggcaggaacctgccctggcagcaggagagagatgtggccgccacagccagcaagcagatgtctgagaagatccggctgtctgagggggaggccaaggaggacagcctggatgaggagttcttccaccacaaggccatgcagggcacagaggtgggccagacagaccagacagacagcactggaggccctgccttcctgagcaaggtggaggaggatgactaccccagcgaggagctgctggaggatgaaaatgccatcaatgccaagaggagcaaggagaagaaccctggcaaccagggccggcagtttgatgtgaacctgcaggtgcctgacagagctgtgctgggcaccatccacccagaccctgagattgaggagagcaagcaggagacctccatgatcctggacagcgagaagaccagcgagacagctgccaagggcgtgaacacaggaggccgggagcccaacaccatggtggagaaggagcggcccctggccgacaagaaggcccagaggccctttgagaggagtgacttcagtgacagcatcaagatccagaccccagagctgggggaggtgttccagaacaaggacagcgactacctgaagaatgacaaccctgaggagcacctgaagaccagcggcctggccggggagcctgagggggagctgagcaaggaggaccatgaaaatacagagaagtacatgggcacagagagccagggcagcgctgctgctgagccagaagatgacagcttccactggaccccccacacctctgtggagcccggccacagcgacaagcgggaggacctgctgatcatcagcagcttcttcaaggagcagcagagcctgcagcgcttccagaagtacttcaacgtgcatgagctggaggccctgctgcaggagatgagcagcaagctgaagagcgcccagcaggagagcctgccctacaacatggagaaggtgctggacaaggtgttccgggccagcgagagccagatcctgagcattgctgagaagatgctggacaccagggtggccgagaacagagacctgggcatgaatgaaaacaacatctttgaggaggccgctgtgctggatgacatccaggacctgatctactttgtgcgctacaagcacagcacagctgaggagacagccaccctggtgatggccccacccctggaggagggcctgggcggggccatggaggagatgcagcccctgcacgaggacaacttcagccgggagaagacagctgagctgaatgtgcaggtgcctgaggagcccacccacctggaccagagggtcatcggggacacccacgccagcgaggtgtcccagaagcccaacacagagaaggacctggaccccggccctgtgaccacagaggacacccccatggatgccattgatgccaacaagcagcctgagacagctgctgaggagcccgcctctgtgacccccctggagaatgccatcctgctgatctacagcttcatgttctacctgaccaagagcctggtggccaccctgcctgatgatgtgcagcccggccctgacttctacggcctgccctggaagcctgtgttcatcacagccttcctgggcatcgccagctttgccatcttcctgtggaggacagtgctggtggtgagcaacacagtgtactacgtgacagagcagcagatcagcgagaagctgaagaccatcatgaaggagaacacagagctggtgcagaagctgagcaactatgagcagaagatcaaggagagcaagaagcacgtgcaggagaccaggaagcagaacatgatcctgagtgatgaggccatcaagtacaaggacaagatcaagaccctggagaagaaccaggagatcctggatgacacagccaagaacctgcgggtgatgctggagagcgagcgggagcagaatgtgaagaaccaggacctgctgcagcaggagattgaggactggagcaagctgcacgccgagctgtctgagcagatcaagagctttgagaagagccagaaggacctggaggtggccctgacccacaaggatgacaacatcaatgccctgaccaactgcatcacccagctgaacctgctggagtgtgagagcgagagcgagggccagaacaagggcggcaatgacagtgatgagctggccaatggagaggtgggcggggacagaaatgagaagatgaagaaccagatcaagcagatgatggatgtgtccaggacccagacagccatctctgtggtggaggaggacctgaagctgctgcagctgaagctgcgggcctctgtgtccaccaagtgcaacctggaggaccaggtgaagaagctggaggatgacaggaacagcctgcaggccgccaaggccggcctggaggatgagtgcaagaccctgcggcagaaggtggagatcctgaatgagctgtaccagcagaaggagatggccctgcagaagaagctgagccaggaggagtatgaaaggcaggagcgggagcaccggctgtctgctgctgatgagaaggctgtgtctgctgctgaggaggtgaagacctacaagaggcgcatcgaggagatggaggatgagctgcagaagacagagaggagcttcaagaaccagatcgccacccatgagaagaaggcccacgagaactggctgaaggcccgggctgctgagcgggccatcgccgaggagaagcgggaggccgccaacctgcggcacaagctgctggagctgacccagaagatggccatgctgcaggaggagcctgtgattgtgaagcccatgcctgggaagcccaacacccagaaccccccccggcggggccccctgagccagaatggcagctttggccccagccctgtgtctggaggagaatgtagcccccccctgactgtggagccccctgtgcggcccctgagcgccaccctgaacagaagagacatgcccaggagtgaatttggatctgtggatggccccctgccccacccccgctggagcgctgaggccagcggcaagcccagccccagcgaccccggcagcggcacagccaccatgatgaacagcagcagccggggcagcagccccaccagggtgctggatgagggcaaggtgaacatggcccccaagggccccccacccttccctggggtgcccctgatgagcacccccatgggcggccctgtgcccccacccatccgctatggccccccaccccagctgtgtggccccttcggcccccggcccctgcccccaccatttggacctggcatgaggcctcccctgggcctgcgggagtttgcccctggggtgcccccaggccggcgggacctgcccctgcacccccggggcttcctgcccggccacgcccccttccggcccctgggcagcctgggcccccgggagtacttcatccctggcacccggctgcccccacccacccacggcccccaggagtacccacctcctcctgctgtgcgggacctgctgcccagcggcagcagagatgagcccccaccagccagccagagcaccagccaggactgcagccaggccctgaagcagagcccctag

SEQ ID NO: 285962 - DNA, 3051 bp, Artificial Sequence
  derived and/or modified sequence
tgactggtgcctgacagcaagcagggcaagccccagagcgccacagactacagcgaccctgacaacgtggatgatggcctcttcatcgtggacatccccaagaccaacaatgacaaggaggtgaatgctgagcaccacatcaagggcaagggccggggcgtgcaggagagcaagaggggcctggtgcaggacaagacagagctggaggatgagaaccaggagggcatgacagtgcacagctctgtgcacagcaacaacctgaacagcatgcctgctgctgagaagggcaaggacaccctgaagagcgcctatgatgacacagaaaatgacctgaagggggccgccatccacatcagcaagggcatgctgcacgaggagaagccaggagagcagatcctggagggcggcagcgagagcgagagcgcccagaaggccgccggcaaccagatgaatgacaggaagatccagcaggagagcctgggcagcgcccccctgatgggagatgaccaccccaatgccagccgggacagcgtggagggagatgccctggtgaatggagccaagctgcacaccctgtctgtggagcaccagcgggaggagctgaaggaggagctggtgctgaagacccagaaccagccccgcttcagcagcccagatgaaattgacctgccccgggagctggaggatgaggtgcccatcctgggcaggaacctgccctggcagcaggagagagatgtggccgccacagccagcaagcagatgtctgagaagatccggctgtctgagggggaggccaaggaggacagcctggatgaggagttcttccaccacaaggccatgcagggcacagaggtgggccagacagaccagacagacagcactggaggccctgccttcctgagcaaggtggaggaggatgactaccccagcgaggagctgctggaggatgaaaatgccatcaatgccaagaggagcaaggagaagaaccctggcaaccagggccggcagtttgatgtgaacctgcaggtgcctgacagagctgtgctgggcaccatccacccagaccctgagattgaggagagcaagcaggagacctccatgatcctggacagcgagaagaccagcgagacagctgccaagggcgtgaacacaggaggccgggagcccaacaccatggtggagaaggagcggcccctggccgacaagaaggcccagaggccctttgagaggagtgacttcagtgacagcatcaagatccagaccccagagctgggggaggtgttccagaacaaggacagcgactacctgaagaatgacaaccctgaggagcacctgaagaccagcggcctggccggggagcctgagggggagctgagcaaagaagatcatgagaacacagagaagtacatgggcacagagagccagggcagcgctgctgctgagccagaagatgacagcttccactggaccccccacacctctgtggagcccggccacagcgacaagcgggaggacctgctgatcatcagcagcttcttcaaggagcagcagagcctgcagcgcttccagaagtacttcaacgtgcatgagctggaggccctgctgcaggagatgagcagcaagctgaagagcgcccagcaggagagcctgccctacaacatggagaaggtgctggacaaggtgttccgggccagcgagagccagatcctgagcattgctgagaagatgctggacaccagggtggctgaaaatagagacctgggcatgaatgaaaacaacatctttgaggaggccgctgtgctggatgacatccaggacctgatctactttgtgcgctacaagcacagcacagctgaggagacagccaccctggtgatggccccacccctggaggagggcctgggcggggccatggaggagatgcagcccctgcacgaggacaacttcagccgggagaagacagctgagctgaatgtgcaggtgcctgaggagcccacccacctggaccagagggtgattggagacacccacgccagcgaggtgtcccagaagcccaacacagagaaggacctggaccccggccctgtgaccacagaggacacccccatggatgccattgatgccaacaagcagcctgagacagctgctgaggagcccgcctctgtgacccccctggagaatgccatcctgctgatctacagcttcatgttctacctgaccaagagcctggtggccaccctgcctgatgatgtgcagcccggccctgacttctacggcctgccctggaagcctgtgttcatcacagccttcctgggcatcgccagctttgccatcttcctgtggaggacagtgctggtggtgaaggacagagtgtaccaggtgacagagcagcagatcagcgagaagctgaagaccatcatgaaggaaaatacagagctggtgcagaagctgagcaactatgagcagaagatcaaggagagcaagaagcacgtgcaggagaccaggaagcagaacatgatcctgagtgatgaggccatcaagtacaaggacaagatcaagaccctggagaagaaccaggagatcctggatgacacagccaagaacctgcgggtgatgctggagagcgagcgggagcagaatgtgaagaaccaggacctgctgcagcaggagattgaggactggagcaagctgcatgctgagctgtctgagcagatcaagagctttgagaagagccagaaggacctggaggtggccctgacccacaaggatgacaacatcaatgccctgaccaactgcatcacccagctgaacctgctggagtgtgagagcgagagcgagggccagaacaagggcggcaatgacagtgatgagctggccaacggggaggtgggcggggacagaaatgagaagatgaagaaccagatcaagcagatgatggatgtgtccaggacccagacagccatctctgtggtggaggaggacctgaagctgctgcagctgaagctgcgggcctctgtgtccaccaagtgcaacctggaggaccaggtgtag

SEQ ID NO: 285963 - DNA, 7946 bp, Artificial Sequence
  derived and/or modified sequence
gaccacaacatggctgcggcgcctgggctgctcgtctggctgctcgtgctccggctgccctggcgggtgccgggccagctggaccccagcactggccggcggttctcggagcacaaactctgcgcggacgacgaatgcagcatgttaatgtaccgcggtgaggctcttgaagatttcacaggcccggattgtcgttttgtgaattttaaaaaaggtgatcctgtatatgtttactataaactggcaagaggatggcctgaagtttgggctggaagtgttggacgcacttttggatattttccaaaagatttaatccaggtagttcatgaatataccaaagaagagctacaagttccaacagatgagacggattttgtttgttttgatggaggaagagatgattttcataattataatgtagaagaacttttagggtttttggaactgtacaattctgcagctacagattctgagaaagctgtagaaaaaactttacaggatatggaaaaaaaccctgaattatctaaggaaagggaacctgaacctgaaccagtagaagccaactcagaggaaagtgatagtgtattctcagaaaacactgaggatcttcaggaacagtttacaactcagaagcaccactcccatgcaaacagccaagcaaatcatgctcagggagagcaggcttcatttgaatcttttgaagaaatgctgcaagataaactaaaagtgccagaaagtgaaaacaacaaaaccagcaatagttctcaggtctcaaatgaacaggataagattgatgcctataaacttttgaaaaaagaaatgactctagacttgaaaaccaaatttggctcaacagctgatgcacttgtatctgatgatgagacaaccagactcgttacttcattagaagatgattttgatgaggaattggatactgagtattatgcagttggaaaggaagatgaggagaaccaagaagactttgatgagttgccattacttacctttacagatggggaagatatgaaaactccagcaaagtctggcgttgagaaatatccaacagataaagagcagaattcaaatgaagaggacaaggttcagctaactgtgccccctggcatcaaaaatgatgataaaaatatactaacaacctggggggacactatcttctctattgtcacaggaggtgaagaaacaagagatacgatggatttagagagctctagttcagaggaagaaaaagaagatgatgatgatgcattagtcccagatagcaaacaggggaaaccacagtcagcaacagattatagtgaccctgacaatgtagatgatggtctttttattgtagacattcctaaaacaaataatgacaaagaagtaaacgcagaacatcacattaaaggaaaagggaggggagttcaggaatccaagaggggcctggtacaagataagacagaattagaggatgaaaatcaagaaggcatgactgtgcacagttctgttcacagcaataacctcaactctatgccagctgctgaaaagggtaaagacacattaaaatcagcttatgatgatacagaaaatgacctaaaaggagcagctattcatatctcaaaaggaatgctccacgaagaaaagcctggagagcagattttggaaggtggctcagagagtgaatctgcacagaaagctgcagggaatcaaatgaatgacagaaagattcaacaggaatccctgggtagtgcaccactcatgggagatgaccaccctaacgcatccagagacagtgtggagggagacgctttggtaaatggggccaaactgcacacgctttcagtggagcatcaacgtgaggaattgaaagaggaattagttcttaaaactcaaaaccaacctagattctcctctccagatgagattgatttgcccagagaactggaagacgaggttcccattctgggaagaaatcttccctggcaacaagaaagagatgtggctgccacagccagtaagcaaatgagtgagaagataaggctctctgagggagaagccaaagaggactccttggatgaagagttttttcatcacaaggcaatgcagggcacagaggtaggacagacagaccaaactgacagcacaggaggaccagctttcctttctaaagtagaagaggatgattatccctctgaagaactactagaggatgaaaacgctataaatgcaaaacggtctaaagaaaaaaaccctgggaatcagggcaggcagtttgatgttaatctgcaagtccctgacagagcagttttagggaccattcatccagatccagaaattgaagaaagcaagcaagaaactagtatgattttggatagcgaaaaaacaagtgagactgctgccaaaggggtcaacacaggaggcagggaaccaaatacaatggtggaaaaagaacgccctctggcagataagaaagcacagagaccatttgaacgaagtgacttttctgacagcataaaaattcagactccagaattaggtgaagtgtttcagaataaagattctgattatctgaagaacgacaaccctgaggaacatctgaagacctcagggcttgcaggggagcctgagggagaactctcaaaagaggaccatgagaacacagagaagtacatgggcacagaaagccaggggtctgctgctgcagaacctgaagatgactcgttccactggactccacatacaagtgtagagccagggcatagtgacaagagggaggacttacttatcataagcagcttctttaaagaacaacagtctttgcagcggttccagaagtactttaatgtccatgagctggaagccttgctacaagaaatgtcatcaaaactgaagtcagcgcagcaggagagcctgccctataatatggaaaaagtcctagataaggtcttccgtgcttctgagtcacaaattctgagcatagcagaaaaaatgcttgatactcgtgtggctgaaaatagagatctgggaatgaacgaaaataacatatttgaagaggctgcagtgcttgatgacattcaagacctcatctattttgtcaggtacaagcactccacagcagaggagacagccacactggtgatggcaccacctctagaggaaggcttgggtggagcaatggaagagatgcaaccactgcatgaagataatttctcacgagagaagacagcagaacttaatgtgcaggttcctgaagaacccacccacttggaccaacgtgtgattggggacactcatgcctcagaagtgtcacagaagccaaatactgagaaagacctggacccagggccagttacaacagaagacactcctatggatgctattgatgcaaacaagcaaccagagacagccgccgaagagccggcaagtgtcacacctttggaaaacgcaatccttctaatatattcattcatgttttatttaactaagtcgctagttgctacattgcctgatgatgttcagcctgggcctgatttttatggactgccatggaaacctgtatttatcactgccttcttgggaattgcttcgtttgccattttcttatggagaactgtccttgttgtgagtaatacagtatattatgtcacggaacagcaaatttctgagaagttgaagactatcatgaaagaaaatacagaacttgtacaaaaattgtcaaattatgaacagaagatcaaggaatcaaagaaacatgttcaggaaaccaggaaacaaaatatgattctctctgatgaagcaattaaatataaggataaaatcaagacacttgaaaaaaatcaggaaattctggatgacacagctaaaaatcttcgtgttatgctagaatctgagagagaacagaatgtcaagaatcaggacttgttgcagcaggaaatcgaagactggagtaaattacatgctgagctcagtgagcaaatcaaatcatttgagaagtctcagaaagatttggaagtagctcttactcacaaggatgataatattaatgctttgactaactgcattacacagttgaatctgttagagtgtgaatctgaatctgagggtcaaaataaaggtggaaatgattcagatgaattagcaaatggagaagtgggaggtgaccggaatgagaagatgaaaaatcaaattaagcagatgatggatgtctctcggacacagactgcaatatcggtagttgaagaggatctaaagcttttacagcttaagctaagagcctccgtgtccactaaatgtaacctggaagaccaggtaaagaaattggaagatgaccgcaactcactacaagctgccaaagctggactggaagatgaatgcaaaaccttgaggcagaaagtggagattctgaatgagctctatcagcagaaggagatggctttgcaaaagaaactgagtcaagaagagtatgaacggcaagaaagagagcacaggctgtcagctgcagatgaaaaggcagtttcggctgcagaggaagtaaaaacttacaagcggagaattgaagaaatggaggatgaattacagaagacagagcggtcatttaaaaaccagatcgctacccatgagaagaaagctcatgaaaactggctcaaagctcgtgctgcagaaagagctatagctgaagagaaaagggaagctgccaatttgagacacaaattattagaattaacacaaaagatggcaatgctgcaagaagaacctgtgattgtaaaaccaatgccaggaaaaccaaatacacaaaaccctccacggagaggtcctctgagccagaatggctcttttggcccatcccctgtgagtggtggagaatgctcccctccattgacagtggagccacctgtgagacctctctctgctactctcaatcgaagagatatgcctagaagtgaatttggatcagtggacgggcctctacctcatcctcgatggtcagctgaggcatctgggaaaccctctccttctgatccaggatctggtacagctaccatgatgaacagcagctcaagaggctcttcccctaccagggtactcgatgaaggcaaggttaatatggctccaaaagggccccctcctttcccaggagtccctctcatgagcacccccatgggaggccctgtaccaccacccattcgatatggaccaccacctcagctctgcggaccttttgggcctcggccacttcctccaccctttggccctggtatgcgtccaccactaggcttaagagaatttgcaccaggcgttccaccaggaagacgggacctgcctctccaccctcggggatttttacctggacacgcaccatttagacctttaggttcacttggcccaagagagtactttattcctggtacccgattaccacccccaacccatggtccccaggaatacccaccaccacctgctgtaagagacttactgccgtcaggctctagagatgagcctccacctgcctctcagagcactagccaggactgttcacaggctttaaaacagagcccataaaactatgacctctgaggtttcattggaaagaaagtgtactgtgcattatccattacagtaaaggatttcattggcttcaaaatccaaaagtttattttaaaaggtttgttgttagaactaagctgccttggcagtgtgcatttttgagccaaacaattcaaaaatgtcatttcttccctaaataaaaatcaccttttaagctagagcgtccttacaactttgaaatgtgcaataaagaatacctgtgttttagctaatgtagcatatgtaattgcaaaatgatttagaatgtcatgaaaaatatgaacatttcctgtggaaatgctttaagaacatgtatttccattatcctatttttagtgtacaccagctgaatacggagcaatggtgtttataagcgtttttttaaactatctggtcacaaagactgttacgctaaaaatgtttactaaaagatcactaaactatctcccctcttgctgaagttctttgtagtaatagctcataaaaatttgtttattaatatttcccaagtgtctgttgactcattggactgttatgaggcttgtgccatttggggaacatgtaaactcaggctcccagaactgaagatggtggctggtggcacacttccggctgctcctccgtcacctgtgaactctacaagtgacgtctttttatttcaaagaagtttatttcccacttgtatagcattcacatgctttctttacgatcctcattgtctatttgagaatggttttctgagagtgagtttacattagtagcaagagttgtttgacctgatgttccattgtttttaccattcctgtagaaaaagggtgcacaacagaaaaatgaaaatgatgtgtcatggccataaaagtatagaaatctttaaaaattttaaaatgtacagtcccttatctatctttcccattccttgccactgatttttgaggaatataataaaaagattggaagagtataatgccatgagaaagaatgatttaggactgtgagggttataacatgccctaggtcagcaaccaagggttgaaatcagttctgttttagggggaaatgggggcgacagatattattccaaaattaatattaattaatatttaaacgttggtgtttttatttaaaaatcagtaactaaccatctggaattgcaccatacttaaagtcttatccattactacactgtctttaaaacaatgtttctttaaatactctacaacgtttctaagaacgaacttcagacattttaattacagtaataatagcactccttttaaggagtttcagatccacactaaaactaaaatcataaaaggctgatacttttgtttgctgctaggctatattcttccattctttgaagtcctatgatgtaatatttttgaaacctagtgtatgtcttgtcactgttgtgatatttaatcgattaagaataccttgtaaaaaggagcaaaagcttcaatgtgaaacaattttctctctttatactaaacaactgaagatagatagtttagaaagataaggacctttgaaagaagacaactctgtcaaagttcataaggaatataaaaattcttcaggaaaagagaattcaatctatatgtcctcccgtttaatatcaagaatagaagaaattaagaggaaaactccacagaagagcataggccacttttagccatgtaaaaataagattaagtcacaaatacaacttttgaatttacctgtcaatatctctttaggacacaaaacaatgctgaagttaatataatttctaattttaaatgtcatttaagtgtagattatgccatctaggaaggtaagtaggaaaggtaaattaaatctatttttaaaattcaaaatattagagtatttttcccctctaaagccttttttggtgattattctgtatctgacataattgagaaactggtaagctgtaaagattccagtgtagcttctctgagaagttgtgagccagtccataactgcttcctcacatccatctgattgcaccatttctgcagcaaaccccaaagcagggtgccaatatgcagatggcatagggagtatcatccctcagccaaatcacttttccatctctaaagtttcatctattttggaagtcatctccaactaattgtgtctggatttagttgctaaaattgtcttatttatgaagcagcaatattcagcctgaaagcatttctgccatagttgttgtagttatatcgccaatggctgatttttttcattggaaagtaaatttaagtaattcgtgggatgtggtatattctgtgtcaacttcaagataatcactcattttctcgttatattcaggtctgaattaaagttaagttaatcacaca

SEQ ID NO: 285964 - DNA, 3045 bp, Artificial Sequence
  derived and/or modified sequence
attagtcccagatagcaaacaggggaaaccacagtcagcaacagattatagtgaccctgacaatgtagatgatggtctttttattgtagacattcctaaaacaaataatgacaaagaagtaaacgcagaacatcacattaaaggaaaagggaggggagttcaggaatccaagaggggcctggtacaagataagacagaattagaggatgaaaatcaagaaggcatgactgtgcacagttctgttcacagcaataacctcaactctatgccagctgctgaaaagggtaaagacacattaaaatcagcttatgatgatacagaaaatgacctaaaaggagcagctattcatatctcaaaaggaatgctccacgaagaaaagcctggagagcagattttggaaggtggctcagagagtgaatctgcacagaaagctgcagggaatcaaatgaatgacagaaagattcaacaggaatccctgggtagtgcaccactcatgggagatgaccaccctaacgcatccagagacagtgtggagggagacgctttggtaaatggggccaaactgcacacgctttcagtggagcatcaacgtgaggaattgaaagaggaattagttcttaaaactcaaaaccaacctagattctcctctccagatgagattgatttgcccagagaactggaagacgaggttcccattctgggaagaaatcttccctggcaacaagaaagagatgtggctgccacagccagtaagcaaatgagtgagaagataaggctctctgagggagaagccaaagaggactccttggatgaagagttttttcatcacaaggcaatgcagggcacagaggtaggacagacagaccaaactgacagcacaggaggaccagctttcctttctaaagtagaagaggatgattatccctctgaagaactactagaggatgaaaacgctataaatgcaaaacggtctaaagaaaaaaaccctgggaatcagggcaggcagtttgatgttaatctgcaagtccctgacagagcagttttagggaccattcatccagatccagaaattgaagaaagcaagcaagaaactagtatgattttggatagcgaaaaaacaagtgagactgctgccaaaggggtcaacacaggaggcagggaaccaaatacaatggtggaaaaagaacgccctctggcagataagaaagcacagagaccatttgaacgaagtgacttttctgacagcataaaaattcagactccagaattaggtgaagtgtttcagaataaagattctgattatctgaagaacgacaaccctgaggaacatctgaagacctcagggcttgcaggggagcctgagggagaactctcaaaagaggaccatgagaacacagagaagtacatgggcacagaaagccaggggtctgctgctgcagaacctgaagatgactcgttccactggactccacatacaagtgtagagccagggcatagtgacaagagggaggacttacttatcataagcagcttctttaaagaacaacagtctttgcagcggttccagaagtactttaatgtccatgagctggaagccttgctacaagaaatgtcatcaaaactgaagtcagcgcagcaggagagcctgccctataatatggaaaaagtcctagataaggtcttccgtgcttctgagtcacaaattctgagcatagcagaaaaaatgcttgatactcgtgtggctgaaaatagagatctgggaatgaacgaaaataacatatttgaagaggctgcagtgcttgatgacattcaagacctcatctattttgtcaggtacaagcactccacagcagaggagacagccacactggtgatggcaccacctctagaggaaggcttgggtggagcaatggaagagatgcaaccactgcatgaagataatttctcacgagagaagacagcagaacttaatgtgcaggttcctgaagaacccacccacttggaccaacgtgtgattggggacactcatgcctcagaagtgtcacagaagccaaatactgagaaagacctggacccagggccagttacaacagaagacactcctatggatgctattgatgcaaacaagcaaccagagacagccgccgaagagccggcaagtgtcacacctttggaaaacgcaatccttctaatatattcattcatgttttatttaactaagtcgctagttgctacattgcctgatgatgttcagcctgggcctgatttttatggactgccatggaaacctgtatttatcactgccttcttgggaattgcttcgtttgccattttcttatggagaactgtccttgttgtgaaggatagagtatatcaagtcacggaacagcaaatttctgagaagttgaagactatcatgaaagaaaatacagaacttgtacaaaaattgtcaaattatgaacagaagatcaaggaatcaaagaaacatgttcaggaaaccaggaaacaaaatatgattctctctgatgaagcaattaaatataaggataaaatcaagacacttgaaaaaaatcaggaaattctggatgacacagctaaaaatcttcgtgttatgctagaatctgagagagaacagaatgtcaagaatcaggacttgttgcagcaggaaatcgaagactggagtaaattacatgctgagctcagtgagcaaatcaaatcatttgagaagtctcagaaagatttggaagtagctcttactcacaaggatgataatattaatgctttgactaactgcattacacagttgaatctgttagagtgtgaatctgaatctgagggtcaaaataaaggtggaaatgattcagatgaattagcaaatggagaagtgggaggtgaccggaatgagaagatgaaaaatcaaattaagcagatgatggatgtctctcggacacagactgcaatatcggtagttgaagaggatctaaagcttttacagcttaagctaagagcctccgtgtccactaaatgtaacctggaagaccaggt

SEQ ID NO: 285965 - DNA, 5547 bp, Artificial Sequence
  derived and/or modified sequence
atggccgccgcccccggcctgctggtgtggctgctggtgctgcggctgccctggagggttcccgggcaactcgatccctcaacaggaaggcgtttttctgaacacaaactgtgtgccgacgacgaatgttccatgctcatgtatcggggcgaggcactcgaagactttaccgggcccgactgtcggttcgtaaattttaagaaaggcgacccagtctatgtatattataaacttgccagaggctggcctgaagtctgggcaggtagtgtgggacggaccttcggctattttccaaaggacctcatccaagtcgtgcacgaatataccaaagaagagttacaagtcccaacagatgagacagatttcgtttgtttcgacggaggtcgcgatgatttccataattataatgttgaggaacttctcggtttcctggaactttataacagcgccgccacagattctgagaaggccgtcgaaaagactctgcaggacatggaaaagaaccccgaactcagcaaagagagggaaccagagccagagcccgtggaggccaatagtgaggagtcggatagcgtcttctctgagaatacagaagatctgcaggaacagtttacaacgcaaaagcatcattctcacgccaatagccaggccaatcacgctcagggggaacaggcctcatttgagtcctttgaggagatgctgcaggacaagctaaaagttcctgaatcagagaacaataagacttctaactcctcccaggtctctaatgaacaggacaaaattgatgcttacaagctgctcaagaaggagatgaccctggacctgaagactaaatttgggtcaaccgcagacgctctcgtgtcagacgatgagaccaccaggctggtgacatccctggaggacgattttgacgaagagttagacactgaatattatgccgtaggaaaggaagatgaggagaaccaagaagacttcgatgagctcccattgctaaccttcactgatggagaggatatgaagaccccagccaagtccggggtggaaaagtaccccaccgacaaggaacagaattctaatgaagaggacaaggttcagctcacagtgccacctggtatcaagaatgacgataaaaacatattgacaacgtggggtgacacgatcttcagcattgttacagggggtgaagagacccgggatacgatggatctggagtctagctcctctgaggaggagaaagaggacgatgacgatgccttggttccggattcgaagcagggtaagccacagagtgcgaccgactatagcgacccagataacgtagatgatggtttattcattgttgacatcccaaagactaacaacgataaggaagttaatgctgaacaccacatcaaaggaaaagggcggggcgtgcaagagtccaagcgaggcctagtacaggacaagacagaactcgaggacgagaatcaggaaggtatgacagttcactcctctgttcactcaaataacctgaattctatgccagccgccgagaagggaaaggatacgctgaagagtgcctatgacgatacagagaatgacctgaaaggagcggcaatccatatctctaaggggatgttgcatgaagaaaagcccggcgagcagatcctggagggtggaagcgaatcggagtctgcccagaaagctgccggcaatcagatgaatgaccgaaaaattcagcaggagtctcttggaagcgctccattaatgggggatgatcatcctaacgcctcaagagatagcgtggaaggcgatgccttagtgaacggtgccaaattgcacaccctctcagtcgagcaccaaagggaggagctcaaagaagagctggttctgaagactcagaaccaaccgcggttctctagtcccgacgagatagacctgccacgtgagctcgaggacgaggtacccatcctgggcaggaaccttccatggcagcaggaacgagatgtggcagccacagctagcaaacagatgtccgaaaaaatcagactgagcgagggggaggccaaggaagacagcctggacgaagagttcttccatcataaagccatgcagggaaccgaagttggacagactgaccagacagacagcaccggcggtcccgccttcctaagcaaggtcgaggaggacgattaccccagcgaagagcttctcgaggacgaaaatgcaataaatgctaaacggagtaaggaaaagaatcctggaaatcagggcaggcagtttgacgtaaacctgcaagttcccgaccgagctgtattaggaacaatccatccagaccctgagatagaggaatcaaaacaggaaacatctatgatactagatagcgagaaaacctcagagaccgcagcgaagggcgtgaatacgggcggcagagagccaaatacgatggtagaaaaagaaaggcccctcgctgataaaaaagcccaacgcccttttgagagatctgacttcagcgactcaatcaagatccagactccagagctcggggaggttttccaaaacaaggactcagattacctgaagaatgataacccagaggaacacctgaagacttcgggtcttgctggggaacctgagggcgaattatccaaggaggatcacgagaatacagaaaagtacatgggaaccgaatcacagggaagtgccgctgctgagccagaagatgactctttccattggaccccccatactagcgttgagcctggacactccgacaagcgggaggacctactgatcatttcctccttcttcaaggagcagcaatccctgcaacgtttccaaaagtacttcaacgtacacgagcttgaggccctgctccaggaaatgtccagcaagctcaagagcgcccaacaggagagcctcccatataatatggaaaaagtcttagacaaggtgttccgtgcctccgaatctcagatcctcagcatcgcagagaaaatgttagacacccgagtggcagagaaccgggatttggggatgaatgaaaacaacatatttgaagaagcagcggtcctggacgacattcaggatctgatatattttgtgaggtataagcattcgaccgctgaggagaccgcgacactggtcatggctcctcctctggaggaaggcttaggaggagctatggaggaaatgcagccactgcatgaggacaacttctctcgtgagaagacagctgaactgaacgtccaagtccctgaggagcccacacacttggaccaacgggtgattggggacactcacgcatccgaggtgagccagaagcctaatacagagaaagatctcgatccaggtccagtcaccaccgaggacactccaatggacgctatcgacgcgaacaagcagccggagaccgctgccgaggagccagccagtgtcaccccactagagaacgcaattctgctgatttatagtttcatgttttacctgacgaagtcactcgtagccaccctgccagatgacgttcagcctggacccgacttctacgggctaccttggaaacccgtgttcataactgcctttctggggattgcaagttttgctatctttctgtggaggacagtattggtggtgagcaacactgtttattatgtgacagaacagcaaatctccgaaaaactgaagacaattatgaaggagaacaccgagttagtccagaagctatcaaattacgagcagaaaattaaggagtccaaaaaacacgtacaggagacccggaaacaaaacatgatcctgtccgacgaagccatcaagtataaagacaaaattaagactctggagaaaaaccaggaaatcctggatgataccgctaaaaacctaagagtcatgttggagagcgagagggagcaaaacgtaaaaaatcaggacctgcttcaacaggagattgaagactggagtaagcttcatgccgagctctcggagcagatcaaaagttttgagaagagccaaaaagacctcgaggtggcactgacacacaaagatgacaacataaacgctctgacaaattgtattacacagcttaatctcttagaatgtgagtccgaatcggagggccaaaataaaggtggcaacgactcagatgagttagctaacggtgaggtgggcggagaccgcaacgagaagatgaagaaccagataaaacaaatgatggatgtatcccggacacagacagccatcagcgttgtggaggaggatctcaagctgcttcagctaaagctgagagcctccgtgtctaccaagtgtaatctggaagaccaagttaagaaactagaggacgacaggaattcgctccaggcagccaaagcaggcctcgaggacgagtgcaaaactttgcgccagaaggtggagatactgaatgaattgtaccagcagaaagagatggctctgcaaaaaaagttaagtcaggaagagtacgagaggcaggaacgagagcaccggttaagcgcagctgatgaaaaagcggtatctgccgcagaggaggtaaaaacctacaagaggagaatcgaggaaatggaagacgaattacagaaaactgaaaggagctttaaaaatcagatcgccactcacgagaagaaagcccatgaaaattggcttaaagcccgcgccgcagaaagggcaatcgctgaagaaaagagggaagctgccaatctaagacacaagttgctggagctaacgcagaagatggccatgctccaggaagaacctgtcattgtgaaaccgatgcctggcaaacctaatacacaaaatcctccgcgtagagggccactgtcacagaacggctccttcggtccaagccccgtgagcggaggcgaatgttctcctcccctcaccgttgagcccccagttcgccctctgagcgcaacactgaaccgccgggatatgccgcgaagtgaattcggttcggttgacgggcctcttccacatccaagatggtctgctgaagccagcggaaagcctagtccatctgatcccggatccggcactgccacgatgatgaacagcagtagcagggggagctctccaacccgcgttctggatgagggaaaggtgaatatggccccaaaaggccctccacccttccctggggtccctctcatgtcgaccccaatgggaggtcccgtgcccccaccaatacgctacggtccaccaccccaactctgcggaccattcggcccgagacccctgccccctcctttcggaccgggaatgaggcctccgcttggactgagggagtttgctccaggcgtcccgcccgggcgcagagacttaccgctacatcctcggggtttccttcctggccacgcgccattccggcctctggggtcactgggcccacgcgagtacttcatacctgggaccaggctgcctccaccgacacatggaccgcaagagtaccccccgccccctgcagtgcgggatctgctgcccagcggtagtagagatgagccacccccagccagccagtcaacctctcaggactgtagccaggccctaaagcagtctccgtag

SEQ ID NO: 285966 - DNA, 3051 bp, Artificial Sequence
  derived and/or modified sequence
tgactggtgcccgacagcaagcagggcaagccccagagcgccaccgactacagcgatccagataacgtggatgacggcttgtttatcgtggacatccctaaaaccaacaacgacaaggaagtgaacgcagagcaccacataaaaggaaagggcagaggcgtgcaggaatccaagcgggggctcgtgcaggataagaccgagctggaggacgaaaaccaggagggaatgaccgtgcacagtagcgtacacagcaataatctcaattccatgcccgcagccgagaaaggcaaagatactcttaagagtgcttatgacgacacagaaaacgacctcaagggggcagcaatccacatctctaaagggatgttgcatgaagagaagccgggcgaacaaattctggaggggggcagcgaaagcgagagcgcacagaaagcggccggcaatcagatgaacgatcgcaaaatccagcaggagtccctcggaagcgcgcctctaatgggcgatgaccaccccaacgcgtcaagagactcagtcgaaggagacgctctcgtgaacggtgccaaattacatactctctctgtggagcaccaaagagaggagctgaaggaagaactggtactgaaaactcaaaaccagcctcgcttctcatccccagatgagatcgatctgcccagagaactggaggacgaggtcccaatcctgggtcgcaacttaccgtggcagcaggaacgagatgtggccgccaccgcctctaaacagatgtcagaaaaaatcagactctcagagggcgaggccaaagaagatagcctggacgaagagttctttcaccataaggcgatgcaaggaactgaagtgggacagaccgatcagactgatagtacaggtggcccagcatttctgtctaaagtggaagaagacgattatcctagcgaagagttgcttgaggatgaaaatgctattaacgcaaagcgatctaaggaaaagaatcccgggaaccagggccgacagtttgacgttaatctccaggtgcctgatagggccgtccttgggaccatccacccagaccccgagatcgaggaatcaaaacaggaaaccagtatgattctcgattccgaaaaaacatcagagacggcggctaaaggggtgaataccggggggagggagcccaatacaatggtggaaaaagaacgtcccctggcggacaagaaagcccagaggccattcgagaggagcgacttcagtgattccattaaaatccagacaccggaactcggcgaggtgttccagaataaagacagcgattacctgaagaatgataatcccgaagagcatctgaaaacctctggactagccggagagccagaaggcgagctcagtaaggaagatcacgaaaataccgagaaatatatgggtactgagagccaaggatctgctgccgccgaaccagaagacgattcctttcattggacacctcacaccagcgtggagcctggacactccgataagcgcgaagatctcctgatcatcagctcattttttaaagaacagcagtcgctacaaagattccagaagtatttcaacgtgcacgaactggaggccctcctccaggaaatgtcctccaaactgaagtccgctcagcaggaatccctgccctataacatggagaaagtgctcgataaagtattcagggcctccgagtcacaaatcctaagtatagccgaaaaaatgctagatacaagggtagccgagaaccgggacctcggaatgaacgaaaataacattttcgaggaagccgcggtgctagatgacatccaggatctcatctacttcgtgcggtacaagcactccaccgccgaggagacggccaccctcgtgatggcccctcctctcgaagagggcctcggcggggccatggaagaaatgcagccactgcacgaggacaacttctcgcgagaaaagacagcagaactgaacgtgcaggtaccagaagagcccacccacttggaccagcgtgtgatcggggacacccacgcatctgaggtgtcacaaaagcccaatacagaaaaagatcttgaccccgggccggtgacaacagaagacacccccatggatgccatcgatgcaaataagcaacccgagactgccgcagaagagcccgcttcagtgacccctctggagaatgccatcctgttgatttactccttcatgttttacttaaccaagtctctcgtcgctacccttccggacgatgtgcagccgggaccagacttctatggcctcccttggaaaccggtgtttatcacagcatttctcggcattgcttcatttgcaattttcttgtggcgaactgtactggtcgttaaggatcgcgtgtaccaagtaaccgagcaacaaatcagcgagaagcttaagaccattatgaaggaaaacaccgagctggtgcagaaactgagtaactacgaacagaaaatcaaggagtcaaagaagcacgtccaggaaacaaggaagcagaatatgatcctatccgatgaggccattaagtataaagataagatcaaaactctcgaaaaaaatcaggagatactcgatgataccgcgaaaaatttgcgagtgatgcttgagtctgagagagagcagaacgtcaagaatcaagatctgttgcaacaagagatagaagattggtcaaaactgcacgctgagttaagcgagcagataaagtcctttgagaagtctcaaaaagacctcgaggtggccctgactcataaagatgacaacataaacgcacttaccaactgcattacacagttgaatctcctcgaatgtgaatccgagagtgaaggacaaaacaagggagggaacgacagcgacgagctggccaatggcgaagttgggggagacagaaatgaaaagatgaaaaaccagatcaagcaaatgatggacgtctccagaacgcagacagcgataagtgtagtggaggaggaccttaagctgttacagttgaagctgcgcgcatctgttagcactaaatgtaacctggaggatcaggtctag

SEQ ID NO: 285967 - DNA, 5546 bp, Artificial Sequence
  derived and/or modified sequence
atggctgcggcacctggcctgctcgtatggctgctggttttgcgactaccctggcgcgtgcctgggcagctggatcctagcacaggcaggcggtttagcgagcacaagttgtgcgccgatgacgaatgcagtatgttgatgtacaggggagaagcattggaggacttcactggacccgattgtaggttcgtgaactttaaaaagggcgatcctgtgtacgtgtactacaaacttgccagagggtggccagaggtgtgggcgggttccgtgggacggactttcggatactttccaaaggaccttatccaggtcgttcacgagtatactaaagaggagctgcaggtgcccacggacgaaaccgattttgtgtgcttcgatggcggtagagacgactttcacaattataatgtggaggaattgctgggctttctggagctctacaactccgccgctaccgattcagaaaaggctgtggaaaaaaccttgcaagatatggaaaaaaaccctgagctttccaaagaacgggagcccgaacccgagcccgtggaagcgaacagtgaagagagcgattcagtgttctcggaaaacacagaggacctgcaggagcagttcaccacacagaagcaccactcacacgctaattcccaagccaaccacgctcagggtgagcaggcttcttttgagtctttcgaggagatgttgcaggataagctgaaagtccctgagtcagaaaacaataagacctcaaactctagtcaggtatctaacgaacaggataaaattgatgcttacaaattactgaaaaaggaaatgactttggatctgaaaacgaagttcggcagcaccgccgatgcgctggtgtcagatgatgagaccacacgcctggtaacctccctggaagatgactttgacgaggagctggataccgagtactatgccgttgggaaagaggacgaagaaaaccaagaggatttcgatgaattaccattgttgacatttacagacggggaggacatgaaaacacctgctaagtctggggtagaaaagtatcccacagacaaagaacagaattcgaatgaagaagacaaggtacaattgaccgtcccccctggcattaagaacgatgacaagaacattctgaccacgtggggcgacactattttttcaatcgtgaccggcggtgaagaaactagagacactatggatttggagtcttcttcctccgaggaggagaaagaggatgacgatgacgcgctggtacctgacagcaagcaaggcaaaccacagtccgccacagactactccgaccctgataacgtcgacgatggcctttttatcgtagatatccctaagaccaataatgacaaggaggtgaacgcggagcatcatatcaaggggaaaggtcggggtgttcaagagtcaaaacgcggactggttcaagataagaccgaactggaagatgaaaaccaggagggaatgactgtgcatagttcagtccactctaataacctcaactctatgccagcagcagaaaaaggaaaagacaccctcaaaagcgcttatgatgatactgagaacgatctcaaaggcgctgccatacatatctcaaaggggatgctgcacgaagaaaaaccgggagagcagatcttggaaggcggatccgagtcggaaagtgcacagaaggcggcaggtaatcagatgaacgatcgaaaaatccagcaggaaagccttggcagcgcacctctcatgggcgatgatcatccaaatgcctcgagagattctgttgagggtgacgctctagtgaatggagcgaaacttcacacattatctgtcgagcaccagcgtgaggaattgaaggaagagctcgtactgaaaacacagaaccagcccagatttagctcacccgatgagatcgatctgccccgtgagttggaggatgaggtcccaatcttgggcagaaatttaccctggcagcaggaaagggatgtggcagcaacggctagcaagcagatgagcgaaaaaatccgactttcagagggagaagcaaaggaggactcccttgatgaagaattctttcaccacaaagccatgcaggggacagaggtgggtcagaccgaccagactgatagcacgggaggccctgcattcctatcgaaggtggaagaggacgactatccttccgaggaactcctggaggacgaaaacgctataaatgctaagcggtcaaaagaaaagaatcctgggaaccagggcaggcaatttgacgtcaaccttcaggtccctgatagagcggtgctaggaacgatccacccagaccctgaaatcgaagagtctaagcaagagaccagtatgatactggactccgagaagacatctgaaaccgcagcgaagggagtgaatacaggcggaagggaacccaacaccatggttgagaaggaaaggccccttgcagacaagaaagctcagcgcccattcgagcgcagcgatttttctgatagtatcaagatacagacccctgagttaggggaggttttccaaaataaagattcggactacctcaaaaatgacaatccagaggagcacctcaagacctctgggctagctggtgaaccggagggggaactgagcaaggaggatcacgaaaacaccgagaagtacatggggacagaaagtcaggggagtgctgcagctgagcctgaagacgattctttccactggaccccccacaccagcgtggagcctggtcattcagacaaaagggaggaccttcttataatatctagtttcttcaaagagcagcagagcctgcagcgctttcagaagtacttcaatgtgcacgaattggaggcactacttcaggagatgtctagcaaactcaaatcggcccaacaagaatccttgccatataacatggaaaaagtgctggacaaagtgttccgggcttctgagtcccagatattgagcatcgccgagaagatgctggatactcgggtcgcagagaaccgggacctcggcatgaacgaaaacaatatatttgaggaggcagcagtactggacgacatccaggatctgatctattttgtccgatacaaacactccaccgccgaagagacagctactctggttatggcaccaccactcgaagagggccttggcggagccatggaggaaatgcagcccttgcatgaggataatttctctcgcgaaaaaactgccgagctgaatgtccaggttcccgaggagccaacccatctggaccagcgggtgatcggtgatactcatgcttcagaggttagccagaaacctaacacagagaaggacctggaccccggacccgtaaccacagaggatacacccatggatgctatcgatgcaaacaaacagcctgaaaccgccgctgaggaacctgcctccgtgacccctctagagaatgctattttgttaatctacagctttatgttctacctaacgaagtctctcgtggcaactctccctgatgatgtacagccagggcctgatttttatggactcccttggaagcccgtttttattactgccttcctcggtatagcaagttttgccatttttctgtggcggaccgtcctcgtggtgagcaatacagtgtactacgtaacagaacagcagatttcagaaaagctcaaaaccatcatgaaagagaatacagaactcgttcaaaaactgtcaaactacgaacaaaaaatcaaagagtctaagaaacatgtacaagagaccagaaaacagaacatgatccttagcgacgaagcaatcaagtataaggacaagattaaaaccctggagaagaatcaggagatcctcgacgatacagcaaaaaacctgcgggtgatgttggagagcgaacgcgaacagaatgtgaagaaccaggatttgctgcaacaagagatcgaagattggtccaaactgcacgcagagctgtctgagcagataaagagctttgagaagagtcagaaggacctggaagtcgctctgacacataaagatgataatattaacgccttgaccaattgcatcactcagctaaacctgctggagtgcgagtccgaatccgaaggccagaataaggggggtaacgactccgacgagcttgcaaacggagaagtcggcggagatagaaatgaaaaaatgaaaaatcagatcaagcagatgatggatgtttctcgtacccagacagcaataagtgtcgttgaggaagacctgaagctgctgcaattgaaactgcgtgccagcgtttcaacgaagtgtaacctggaggatcaggtcaaaaaattagaggacgatcgcaattctctccaggcagcgaaagccggtctggaggatgaatgtaagactcttaggcagaaggtggaaatcctcaacgaactgtaccaacaaaaggagatggcattgcagaaaaagctgtcgcaggaagagtatgagcggcaggaaagggagcaccgtctcagtgccgctgatgagaaagctgtttccgccgcagaggaagtcaagacctacaaaagaaggatcgaggagatggaggacgaactgcaaaaaacagagaggtctttcaagaatcaaattgctacccatgaaaaaaaagctcacgaaaactggctgaaagccagggccgctgagcgcgctatcgctgaggagaaacgggaggcggctaacctgagacataagctgttggaactcacccagaagatggccatgttacaagaagagccagtgatcgtcaagcccatgccagggaagccgaacacccagaacccacctcgtcgaggaccactctcgcagaacggctcttttggcccttcccctgtgtcaggcggtgaatgcagtcctccgctcacagtcgaaccacctgtgcgtcccctcagcgctactcttaatcgccgtgacatgcccaggagtgagttcggcagtgtggatggtcccctcccacacccacgttggtctgccgaggcttctggcaagccctccccttctgatccaggcagcggaacagccacaatgatgaattcgtcttcacgcggtagtagccctacacgcgttttggatgaggggaaggtgaatatggcaccaaaagggcctcctcccttccccggagttcctctgatgtctactcctatgggtggacctgtgcccccaccaatccggtacgggccaccaccccaactgtgcggacccttcggacccagacctctaccacccccttttggcccaggtatgcgccctccactggggctgagagagtttgcaccgggagtgcctcccggtcggcgagacctccccttgcatcccagaggttttctgccaggccatgcgcctttcagaccactggggagcttaggccctagggaatatttcatacctggcacacgcctgccaccaccaacccacggaccccaggagtaccccccaccacctgcagtacgagatctgctccccagcgggagtcgggatgagccaccccctgcctcccagagcactagtcaggactgctctcaggcccttaagcagtctcctta

SEQ ID NO: 285968 - DNA, 3051 bp, Artificial Sequence
  derived and/or modified sequence
tgactggtcccagatagcaagcaagggaaacctcagtccgctactgattattccgaccctgacaatgtagacgacggcctgtttatcgttgatatccccaaaaccaataacgacaaggaggtgaacgctgaacaccacatcaagggtaagggacgcggtgtgcaggagagcaagcgaggcctggtgcaggataagaccgagctggaggatgagaaccaggaaggcatgaccgtgcattctagtgttcactcaaataacttgaactcgatgccagctgccgaaaagggtaaagatacccttaaatcagcctacgatgacaccgaaaacgatcttaagggagccgctatccatattagcaagggaatgctccacgaagaaaaacccggtgagcagatactggaaggcggaagtgaatccgagagcgcacagaaagcggctgggaatcagatgaatgatagaaaaatccaacaggagtctctggggagcgctcccttgatgggggatgaccatcccaacgctagtagggactccgtcgaaggcgacgcgttggtgaatggcgcaaagctgcataccttatccgtggaacaccagcgcgaggagcttaaggaggagctcgtcctgaaaacccagaatcagccaaggttcagtagccctgatgagatcgatctgcccagagaacttgaagacgaagtacccatcttgggacgcaatctcccttggcaacaggagagggacgtcgcagccactgccagcaagcagatgagcgagaaaatacgtctgtctgagggggaggccaaagaagacagcttggatgaggagttctttcaccacaaagccatgcagggtacagaggtagggcagacagaccagactgacagcactggcggacccgcattcctatccaaggtggaagaagacgactacccttctgaagaactcctcgaggacgaaaacgcaatcaatgccaagaggagcaaggagaagaatcccggaaaccagggcagacaattcgatgtgaacttgcaggttcctgatcgagccgttttgggaacaatacaccctgatcctgaaattgaggaatccaaacaggagaccagcatgatacttgatagcgaaaaaacctcagagacggcggctaaaggggtcaacaccggtggcagggagccaaacactatggttgagaaggaacgtccgcttgcagacaaaaaagctcagcgccctttcgagcggtcagatttttccgactccattaagatccagacacccgagctgggagaggtgtttcagaataaggactcagactacctgaagaacgacaacccagaggaacacctgaagacctctggacttgctggagaaccggagggggaactgtcaaaggaagaccatgagaatactgagaaatacatggggaccgagtcacagggttcggcagccgctgaaccagaggatgattctttccactggacgccgcacacctctgtcgagcccggacactcagataagcgggaagatttgctgatcatctcttccttctttaaggaacaacaaagcttgcaaaggttccagaaatactttaatgtgcatgaactagaagcacttctacaggaaatgtcctccaagctgaagtccgcccagcaggagagcttaccttacaacatggaaaaagttttagataaagttttccgggcttcagagtcccaaattctaagcatagctgagaagatgctggacacacgggttgccgagaatcgggaccttggcatgaatgagaataatatcttcgaggaggcagccgtgctcgatgacatccaggacctgatttacttcgttaggtacaaacatagcacagccgaggagactgctactctggtaatggcccctccgctcgaggagggactgggtggggcaatggaagaaatgcagccacttcacgaagataacttcagcagggagaagacggccgaattaaatgtgcaggtgcctgaggaacctacacacctggaccagagagtaatcggagacacgcatgcttcagaagtgtctcagaagccaaacacagagaaggatctggaccctgggcctgtgaccacggaggacacacctatggacgccatcgacgccaacaagcagccagagaccgccgctgaggagcccgcaagcgttactccactggaaaacgccatccttctgatctacagcttcatgttctacctcaccaagtcactggttgctacactgccagatgacgtgcagccaggtccagacttctatggactcccctggaagccggtgttcattacggcctttctcggaattgcctcctttgctatcttcctttggcgcacagtactagtggtgaaagatagagtctatcaggtgactgaacagcagatttcagaaaaactgaagacaattatgaaagagaatacggaattagtccagaaactgagtaactatgaacagaagattaaggagtccaagaagcatgtgcaagaaactagaaagcagaacatgatactaagcgatgaggccatcaaatacaaggacaagatcaaaactctggaaaagaatcaggagattttggacgataccgctaagaatctccgggtaatgctcgaatccgaaagggaacaaaacgtgaaaaatcaggatctgctacagcaagaaattgaagactggtccaaattgcacgcagagttgtcagaacagatcaaaagttttgagaagtcccagaaagaccttgaggtggcactgacccataaggacgacaatatcaacgccctgaccaattgcattacccagttaaacttactggaatgtgagagcgaaagcgagggacagaataagggagggaacgactcggacgagctagccaatggagaagtcggtggggataggaatgagaagatgaagaaccagataaaacagatgatggatgtgtctcgcactcaaacggccatctcggtcgtggaagaagatctcaagcttttgcagctgaagctccgagcttcagtgtccacaaagtgtaatttagaagaccaagtttag

SEQ ID NO: 285969 - DNA, 5547 bp, Artificial Sequence
  derived and/or modified sequence
atggccgccgcccccggcctgctggtgtggctgctggtgctgagactgccctggagagtgcccggccagctggaccccagcaccggcagaagattcagcgagcacaagctgtgcgccgacgacgagtgcagcatgctgatgtacagaggcgaggccctggaggacttcaccggccccgactgcagattcgtgaacttcaagaagggcgaccccgtgtacgtgtactacaagctggccagaggctggcccgaggtgtgggccggcagcgtgggcagaaccttcggctacttccccaaggacctgatccaggtggtgcacgagtacaccaaggaggagctgcaggtgcccaccgacgagaccgacttcgtgtgcttcgacggcggcagagacgacttccacaactacaacgtggaggagctgctgggcttcctggagctgtacaacagcgccgccaccgacagcgagaaggccgtggagaagaccctgcaggacatggagaagaaccccgagctgagcaaggagagagagcccgagcccgagcccgtggaggccaacagcgaggagagcgacagcgtgttcagcgagaacaccgaggacctgcaggagcagttcaccacccagaagcaccacagccacgccaacagccaggccaaccacgcccagggcgagcaggccagcttcgagagcttcgaggagatgctgcaggacaagctgaaggtgcccgagagcgagaacaacaagaccagcaacagcagccaggtgagcaacgagcaggacaagatcgacgcctacaagctgctgaagaaggagatgaccctggacctgaagaccaagttcggcagcaccgccgacgccctggtgagcgacgacgagaccaccagactggtgaccagcctggaggacgacttcgacgaggagctggacaccgagtactacgccgtgggcaaggaggacgaggagaaccaggaggacttcgacgagctgcccctgctgaccttcaccgacggcgaggacatgaagacccccgccaagagcggcgtggagaagtaccccaccgacaaggagcagaacagcaacgaggaggacaaggtgcagctgaccgtgccccccggcatcaagaacgacgacaagaacatcctgaccacctggggcgacaccatcttcagcatcgtgaccggcggcgaggagaccagagacaccatggacctggagagcagcagcagcgaggaggagaaggaggacgacgacgacgccctggtgcccgacagcaagcagggcaagccccagagcgccaccgactacagcgaccccgacaacgtggacgacggcctgttcatcgtggacatccccaagaccaacaacgacaaggaggtgaacgccgagcaccacatcaagggcaagggcagaggcgtgcaggagagcaagagaggcctggtgcaggacaagaccgagctggaggacgagaaccaggagggcatgaccgtgcacagcagcgtgcacagcaacaacctgaacagcatgcccgccgccgagaagggcaaggacaccctgaagagcgcctacgacgacaccgagaacgacctgaagggcgccgccatccacatcagcaagggcatgctgcacgaggagaagcccggcgagcagatcctggagggcggcagcgagagcgagagcgcccagaaggccgccggcaaccagatgaacgacagaaagatccagcaggagagcctgggcagcgcccccctgatgggcgacgaccaccccaacgccagcagagacagcgtggagggcgacgccctggtgaacggcgccaagctgcacaccctgagcgtggagcaccagagagaggagctgaaggaggagctggtgctgaagacccagaaccagcccagattcagcagccccgacgagatcgacctgcccagagagctggaggacgaggtgcccatcctgggcagaaacctgccctggcagcaggagagagacgtggccgccaccgccagcaagcagatgagcgagaagatcagactgagcgagggcgaggccaaggaggacagcctggacgaggagttcttccaccacaaggccatgcagggcaccgaggtgggccagaccgaccagaccgacagcaccggcggccccgccttcctgagcaaggtggaggaggacgactaccccagcgaggagctgctggaggacgagaacgccatcaacgccaagagaagcaaggagaagaaccccggcaaccagggcagacagttcgacgtgaacctgcaggtgcccgacagagccgtgctgggcaccatccaccccgaccccgagatcgaggagagcaagcaggagaccagcatgatcctggacagcgagaagaccagcgagaccgccgccaagggcgtgaacaccggcggcagagagcccaacaccatggtggagaaggagagacccctggccgacaagaaggcccagagacccttcgagagaagcgacttcagcgacagcatcaagatccagacccccgagctgggcgaggtgttccagaacaaggacagcgactacctgaagaacgacaaccccgaggagcacctgaagaccagcggcctggccggcgagcccgagggcgagctgagcaaggaggaccacgagaacaccgagaagtacatgggcaccgagagccagggcagcgccgccgccgagcccgaggacgacagcttccactggaccccccacaccagcgtggagcccggccacagcgacaagagagaggacctgctgatcatcagcagcttcttcaaggagcagcagagcctgcagagattccagaagtacttcaacgtgcacgagctggaggccctgctgcaggagatgagcagcaagctgaagagcgcccagcaggagagcctgccctacaacatggagaaggtgctggacaaggtgttcagagccagcgagagccagatcctgagcatcgccgagaagatgctggacaccagagtggccgagaacagagacctgggcatgaacgagaacaacatcttcgaggaggccgccgtgctggacgacatccaggacctgatctacttcgtgagatacaagcacagcaccgccgaggagaccgccaccctggtgatggccccccccctggaggagggcctgggcggcgccatggaggagatgcagcccctgcacgaggacaacttcagcagagagaagaccgccgagctgaacgtgcaggtgcccgaggagcccacccacctggaccagagagtgatcggcgacacccacgccagcgaggtgagccagaagcccaacaccgagaaggacctggaccccggccccgtgaccaccgaggacacccccatggacgccatcgacgccaacaagcagcccgagaccgccgccgaggagcccgccagcgtgacccccctggagaacgccatcctgctgatctacagcttcatgttctacctgaccaagagcctggtggccaccctgcccgacgacgtgcagcccggccccgacttctacggcctgccctggaagcccgtgttcatcaccgccttcctgggcatcgccagcttcgccatcttcctgtggagaaccgtgctggtggtgagcaacaccgtgtactacgtgaccgagcagcagatcagcgagaagctgaagaccatcatgaaggagaacaccgagctggtgcagaagctgagcaactacgagcagaagatcaaggagagcaagaagcacgtgcaggagaccagaaagcagaacatgatcctgagcgacgaggccatcaagtacaaggacaagatcaagaccctggagaagaaccaggagatcctggacgacaccgccaagaacctgagagtgatgctggagagcgagagagagcagaacgtgaagaaccaggacctgctgcagcaggagatcgaggactggagcaagctgcacgccgagctgagcgagcagatcaagagcttcgagaagagccagaaggacctggaggtggccctgacccacaaggacgacaacatcaacgccctgaccaactgcatcacccagctgaacctgctggagtgcgagagcgagagcgagggccagaacaagggcggcaacgacagcgacgagctggccaacggcgaggtgggcggcgacagaaacgagaagatgaagaaccagatcaagcagatgatggacgtgagcagaacccagaccgccatcagcgtggtggaggaggacctgaagctgctgcagctgaagctgagagccagcgtgagcaccaagtgcaacctggaggaccaggtgaagaagctggaggacgacagaaacagcctgcaggccgccaaggccggcctggaggacgagtgcaagaccctgagacagaaggtggagatcctgaacgagctgtaccagcagaaggagatggccctgcagaagaagctgagccaggaggagtacgagagacaggagagagagcacagactgagcgccgccgacgagaaggccgtgagcgccgccgaggaggtgaagacctacaagagaagaatcgaggagatggaggacgagctgcagaagaccgagagaagcttcaagaaccagatcgccacccacgagaagaaggcccacgagaactggctgaaggccagagccgccgagagagccatcgccgaggagaagagagaggccgccaacctgagacacaagctgctggagctgacccagaagatggccatgctgcaggaggagcccgtgatcgtgaagcccatgcccggcaagcccaacacccagaacccccccagaagaggccccctgagccagaacggcagcttcggccccagccccgtgagcggcggcgagtgcagcccccccctgaccgtggagccccccgtgagacccctgagcgccaccctgaacagaagagacatgcccagaagcgagttcggcagcgtggacggccccctgccccaccccagatggagcgccgaggccagcggcaagcccagccccagcgaccccggcagcggcaccgccaccatgatgaacagcagcagcagaggcagcagccccaccagagtgctggacgagggcaaggtgaacatggcccccaagggccccccccccttccccggcgtgcccctgatgagcacccccatgggcggccccgtgcccccccccatcagatacggcccccccccccagctgtgcggccccttcggccccagacccctgcccccccccttcggccccggcatgagaccccccctgggcctgagagagttcgcccccggcgtgccccccggcagaagagacctgcccctgcaccccagaggcttcctgcccggccacgcccccttcagacccctgggcagcctgggccccagagagtacttcatccccggcaccagactgcccccccccacccacggcccccaggagtacccccccccccccgccgtgagagacctgctgcccagcggcagcagagacgagcccccccccgccagccagagcaccagccaggactgcagccaggccctgaagcagagcccctag

SEQ ID NO: 285970 - DNA, 3051 bp, Artificial Sequence
  derived and/or modified sequence
tgactggtgcccgacagcaagcagggcaagccccagagcgccaccgactacagcgaccccgacaacgtggacgacggcctgttcatcgtggacatccccaagaccaacaacgacaaggaggtgaacgccgagcaccacatcaagggcaagggcagaggcgtgcaggagagcaagagaggcctggtgcaggacaagaccgagctggaggacgagaaccaggagggcatgaccgtgcacagcagcgtgcacagcaacaacctgaacagcatgcccgccgccgagaagggcaaggacaccctgaagagcgcctacgacgacaccgagaacgacctgaagggcgccgccatccacatcagcaagggcatgctgcacgaggagaagcccggcgagcagatcctggagggcggcagcgagagcgagagcgcccagaaggccgccggcaaccagatgaacgacagaaagatccagcaggagagcctgggcagcgcccccctgatgggcgacgaccaccccaacgccagcagagacagcgtggagggcgacgccctggtgaacggcgccaagctgcacaccctgagcgtggagcaccagagagaggagctgaaggaggagctggtgctgaagacccagaaccagcccagattcagcagccccgacgagatcgacctgcccagagagctggaggacgaggtgcccatcctgggcagaaacctgccctggcagcaggagagagacgtggccgccaccgccagcaagcagatgagcgagaagatcagactgagcgagggcgaggccaaggaggacagcctggacgaggagttcttccaccacaaggccatgcagggcaccgaggtgggccagaccgaccagaccgacagcaccggcggccccgccttcctgagcaaggtggaggaggacgactaccccagcgaggagctgctggaggacgagaacgccatcaacgccaagagaagcaaggagaagaaccccggcaaccagggcagacagttcgacgtgaacctgcaggtgcccgacagagccgtgctgggcaccatccaccccgaccccgagatcgaggagagcaagcaggagaccagcatgatcctggacagcgagaagaccagcgagaccgccgccaagggcgtgaacaccggcggcagagagcccaacaccatggtggagaaggagagacccctggccgacaagaaggcccagagacccttcgagagaagcgacttcagcgacagcatcaagatccagacccccgagctgggcgaggtgttccagaacaaggacagcgactacctgaagaacgacaaccccgaggagcacctgaagaccagcggcctggccggcgagcccgagggcgagctgagcaaggaggaccacgagaacaccgagaagtacatgggcaccgagagccagggcagcgccgccgccgagcccgaggacgacagcttccactggaccccccacaccagcgtggagcccggccacagcgacaagagagaggacctgctgatcatcagcagcttcttcaaggagcagcagagcctgcagagattccagaagtacttcaacgtgcacgagctggaggccctgctgcaggagatgagcagcaagctgaagagcgcccagcaggagagcctgccctacaacatggagaaggtgctggacaaggtgttcagagccagcgagagccagatcctgagcatcgccgagaagatgctggacaccagagtggccgagaacagagacctgggcatgaacgagaacaacatcttcgaggaggccgccgtgctggacgacatccaggacctgatctacttcgtgagatacaagcacagcaccgccgaggagaccgccaccctggtgatggccccccccctggaggagggcctgggcggcgccatggaggagatgcagcccctgcacgaggacaacttcagcagagagaagaccgccgagctgaacgtgcaggtgcccgaggagcccacccacctggaccagagagtgatcggcgacacccacgccagcgaggtgagccagaagcccaacaccgagaaggacctggaccccggccccgtgaccaccgaggacacccccatggacgccatcgacgccaacaagcagcccgagaccgccgccgaggagcccgccagcgtgacccccctggagaacgccatcctgctgatctacagcttcatgttctacctgaccaagagcctggtggccaccctgcccgacgacgtgcagcccggccccgacttctacggcctgccctggaagcccgtgttcatcaccgccttcctgggcatcgccagcttcgccatcttcctgtggagaaccgtgctggtggtgaaggacagagtgtaccaggtgaccgagcagcagatcagcgagaagctgaagaccatcatgaaggagaacaccgagctggtgcagaagctgagcaactacgagcagaagatcaaggagagcaagaagcacgtgcaggagaccagaaagcagaacatgatcctgagcgacgaggccatcaagtacaaggacaagatcaagaccctggagaagaaccaggagatcctggacgacaccgccaagaacctgagagtgatgctggagagcgagagagagcagaacgtgaagaaccaggacctgctgcagcaggagatcgaggactggagcaagctgcacgccgagctgagcgagcagatcaagagcttcgagaagagccagaaggacctggaggtggccctgacccacaaggacgacaacatcaacgccctgaccaactgcatcacccagctgaacctgctggagtgcgagagcgagagcgagggccagaacaagggcggcaacgacagcgacgagctggccaacggcgaggtgggcggcgacagaaacgagaagatgaagaaccagatcaagcagatgatggacgtgagcagaacccagaccgccatcagcgtggtggaggaggacctgaagctgctgcagctgaagctgagagccagcgtgagcaccaagtgcaacctggaggaccaggtgtag

SEQ ID NO: 285971 - protein, 393 aa, Artificial Sequence
  derived and/or modified sequence
MAQENAAFSPGQEEPPRRRGRQRYVEKDGRCNVQQGNVRETYRYLTDLFTTLVDLQWRLSLLFFVLAYALTWLFFGAIWWLIAYGRGDLEHLEDTAWTPCVNNLNGFVAAFLFSIETETTIGYGHRVITDQCPEGIVLLLLQAILGSMVNAFMVGCMFVKISQPNKRAATLVFSSHAVVSLRDGRLCLMFRVGDLRSSHIVEASIRAKLIRSRQTLEGEFIPLHQTDLSVGFDTGDDRLFLVSPLVISHEIDAASPFWEASRRALERDDFEIVVILEGMVEATGMTCQARSSYLVDEVLWGHRFTSVLTLEDGFYEVDYASFHETFEVPTPSCSARELAEAAARLDAHLYWSIPSRLDEKVEEEGAGEGAGGEAGADKEQNGCLPPPESESKV

SEQ ID NO: 285972 - protein, 520 aa, Artificial Sequence
  derived and/or modified sequence
MGRKKIQIQRITDERNRQVTFTKRKFGLMKKAYELSVLCDCEIALIIFNHSNKLFQYASTDMDKVLLKYTEYNEPHESRTNADIIEALHKKHRECESPEVDEVFALTPQTEEKYKKIDEEFDKMMQSYRLASTVPAPNFAMPVTVPVSNQSSLQFSNPSGSLVTPSLVTSSLTDPRLLSPQQPALQRNSVSPGLPQRPASAGAMLGGDLNSANGACPSPVGNGYVSARASPGLLPVANGNSLNKVIPAKSPPPPTHSTQLGAPSRKPDLRVITSQAGKGLMHHLTEDHLDLNNAQRLGVSQSTHSLTTPVVSVATPSLLSQGLPFSSMPTAYNTDYQLTSAELSSLPAFSSPGGLSLGNVTAWQQPQQPQQPQQPQPPQQQPPQPQQPQPQQPQQPQQPPQQQSHLVPVSLSNLIPGSPLPHVGAALTVTTHPHISIKSEPVSPSRERSPAPPPPAVFPAARPEPGDGLSSPAGGSYETGDRDDGRGDFGPTLGLLRPAPEPEAEGSAVKRMRLDTWTLK

SEQ ID NO: 285973 - protein, 475 aa, Artificial Sequence
  derived and/or modified sequence
MGRKKIQIQRITDERNRQVTFTKRKFGLMKKAYELSVLCDCEIALIIFNHSNKLFQYASTDMDKVLLKYTEYNEPHESRTNADIIESTVPAPNFAMPVTVPVSNQSSLQFSNPSGSLVTPSLVTSSLTDPRLLSPQQPALQRNSVSPGLPQRPASAGAMLGGDLNSANGACPSPVGNGYVSARASPGLLPVANGNSLNKVIPAKSPPPPTHSTQLGAPSRKPDLRVITSQAGKGLMHHLTEDHLDLNNAQRLGVSQSTHSLTTPVVSVATPSLLSQGLPFSSMPTAYNTDYQLTSAELSSLPAFSSPGGLSLGNVTAWQQPQQPQQPQQPQPPQQQPPQPQQPQPQQPQQPQQPPQQQSHLVPVSLSNLIPGSPLPHVGAALTVTTHPHISIKSEPVSPSRERSPAPPPPAVFPAARPEPGDGLSSPAGGSYETGDRDDGRGDFGPTLGLLRPAPEPEAEGSAVKRMRLDTWTLK

SEQ ID NO: 285974 - DNA, 1011 bp, Artificial Sequence
  derived and/or modified sequence
ggcgcatcctcagggcctgggcctggcctccttgcctgtgagatggcactgtgacggtgcccacctcgtggggtgtgtgagggccgagtgaaatcgtgcatttgcgatgtctaggacacactggatttgtacatctggggctcaggagaggaccagatcagagctggaaatcatgccaggaagagtatgaagcagggagagaaggtgtggaggcctccctgaggaaacgaggggtcgagcaggtgaagagggggctgagagctaaggagtgcacagagacaatgacagaaagacgggaggtctggtttcaggaagggtgtgatggacagaagagatgcagcagaggtcaaggaaggaccaagatgcatcaggaggaaatgcccatgaccttcatcgcagcagcgtatgtgcgttggtcttctccagggatgccgaaagtagacatacagggagtcgcagtacggataccaccagtgccagcctgacctcacaagagacgtcttgtgtgactggccctgccgtcacagctgggccagtaaagtaccttccaggaggctccagttgctacctgactcacaaccttctaatcccatgatcttttagttctagtttccttatcttggtctgagcaaatggctcattttaaagatgacttgcagacaaatgtagagatcatcccaggggaaagtgccccaagaaaggagagtccaagaccacctgcccctcccagttctgcggctggagtgggtgggtgcagcaaccacagccccagtgtacaggagtcaccactgtctcctcccgcattggcccagcttggaagtgcacagcaaccaagcatgaggactgagttaagcttttcggagaaaaaagacactatgatcatctggcagatcacgatcactgtttggtgccagaggtaaggagtttgcttgttgtgtttgcttggaggcgacagttggcaatgacagcctgggagaagcaccggcagttaacagcactctgcaccactca

SEQ ID NO: 285975 - DNA, 1563 bp, Artificial Sequence
  derived and/or modified sequence
atgggtaggaaaaagatacagatacagagaatcaccgacgagaggaacagacaggtcaccttcaccaagcgtaaatttggattgatgaagaaggcctatgagctgagcgttctctgcgattgcgagatagctctgatcatctttaatcattcaaataaactcttccagtacgcttccaccgacatggataaagtgttacttaagtataccgaatacaatgagccacacgaatccagaacaaatgcagacattattgaagccctgcacaagaaacatagagagtgcgaaagtcctgaagttgatgaagtgtttgccttaacaccccagactgaggagaaatataagaaaatcgacgaggagtttgataaaatgatgcagtcctatcgactcgcctccacagtgccggccccaaattttgcaatgcctgtgacggtgcccgtatcaaatcaatcctcactgcagttctcaaatccgtccgggtccctggttactccatcactcgtgacatcgagtctcacagaccctcgcctattgagcccacagcaacctgcccttcagcgcaacagtgttagtccgggcctaccgcagagacccgcctctgcaggagctatgcttggcggcgacttgaatagtgctaacggagcctgcccttcccctgtaggaaacggatatgtgagcgcccgggccagtcctggcctgttgcctgttgccaacggaaattctctgaacaaggtcattcccgctaaaagcccaccacccccaacccacagcacccagctgggtgccccaagccggaagccggaccttcgggtcatcacctcccaagccggtaagggtctaatgcaccatctgactgaggaccacctcgacctgaacaacgcacagagactgggagtgtcccagtctacccattcactgactactcctgtggtgtccgtggccaccccatccctactgagccaggggttgccttttagctcaatgcctacagcctataatacggactatcagctgacatccgcagagctgtcctctctgcccgcttttagctctccaggaggactgtctctcgggaacgtgactgcctggcagcagccacagcagcctcagcaaccccagcagccacagcctccacagcaacaaccacctcagcctcagcagccccaaccccagcaacctcagcagccgcagcagccccctcagcaacagagccacttggtgcccgtcagtttgagcaacctcattccaggctcacctctgcctcacgtcggtgcagctctaacagtcaccacgcatcctcacataagcattaaaagtgagccagttagtccatctagagagcggtctcccgctccccctcctcccgcggtgtttcctgctgcccgccccgaacctggtgacgggctgtctagtcctgctggggggtcatatgaaaccggcgatagagacgatgggcggggcgacttcggcccgaccctgggacttcttagaccagcacccgagcctgaagcagagggcagtgcagtgaaacgtatgagacttgatacatggacactgaagtag

SEQ ID NO: 285976 - DNA, 1428 bp, Artificial Sequence
  derived and/or modified sequence
atgggccgtaaaaagatacagattcagaggataaccgacgagcggaatcgccaagtgactttcaccaagcggaagttcgggttgatgaaaaaggcttacgaactgtccgtgctgtgtgattgcgaaatcgccctgatcatattcaatcatagcaataagctgtttcaatatgccagtaccgatatggacaaggtactcttgaaatacaccgagtacaatgaaccgcatgagtccaggaccaacgccgacatcatcgagtctacggtccctgcacccaacttcgccatgcccgtcactgtgccagtgagtaatcagtcttctctgcagttcagtaacccttctggaagtctcgtgactccctctcttgtaacctcttcactcacggatccccgtctgctgagtccccaacagccagcgctgcagaggaatagtgtatcaccaggcctacctcagcgccccgcttccgcaggggctatgctcggcggggatctgaatagcgcgaatggagcttgtccctcccctgttggcaacgggtatgtttccgccagggctagcccagggcttcttccagtcgctaatggtaatagtctgaacaaagttattccagcgaaaagcccaccaccccccacccatagcacgcagctaggggctccatcacgcaaaccggaccttagagtgattacttcacaagcagggaaagggcttatgcaccaccttaccgaagaccatcttgacctcaacaacgcgcaacgtttgggcgtgtcccagagcacccacagtctgacgactccagttgtgagtgtcgctaccccgtccctcctgtctcagggtctcccattttcctctatgccaaccgcatacaatactgattaccagcttaccagcgccgaactttcaagtttgccggctttttcgtcccctggtggactctctttaggcaacgtgaccgcatggcaacagccccagcagccacagcagccccagcagcctcagccaccccagcagcagccacctcaacctcagcagccacagccacaacagcctcaacagccacagcagccgcctcagcagcagtcacacttagttcccgtgtcactgagcaatttgattcctggctccccgcttcctcacgtgggagcagctctgactgtgacgactcatccccatatctctattaagtctgaacccgtatctccgtcccgcgaacggtcaccggcccctccaccccccgccgtgtttccagctgcgcgaccagagccgggcgacggcttgtccagtcctgcaggaggatcttacgaaactggggatagagacgatggtagaggagactttggacccacactgggcctgctgcgccccgccccggagccagaggccgaaggctcagcagtgaagcgcatgaggctggatacctggacccttaaatag

SEQ ID NO: 285977 - DNA, 1563 bp, Artificial Sequence
  derived and/or modified sequence
atgggcaggaagaagatccagatccagaggatcacagatgaaagaaaccggcaggtgaccttcaccaagaggaagtttggcctgatgaagaaggcctatgagctgtctgtgctgtgtgactgtgaaattgccctgatcatcttcaaccacagcaacaagctgttccagtatgccagcacagacatggacaaggtgctgctgaagtacacagagtacaatgagccccatgagagcaggaccaatgctgacatcatcgaggccctgcacaagaagcaccgggagtgtgagagccctgaggtggatgaggtgtttgccctgaccccccagacagaggagaagtacaagaagattgatgaggagtttgacaagatgatgcagagctaccgcctggccagcacagtgcctgcccccaactttgccatgcctgtgacagtgcctgtgagcaaccagagcagcctgcagttcagcaaccccagcggcagcctggtgacccccagcctggtgaccagcagcctgacagacccccggctgctgagcccccagcagcctgccctgcagagaaattctgtgtccccaggcctgccccagaggcctgccagcgctggggccatgctgggcggggacctgaacagcgccaatggagcctgccccagccctgtgggcaatggctacgtgtctgcccgggccagccctggcctgctgcctgtggccaacggcaacagcctgaacaaggtgatcccagccaagagccccccaccacccacccacagcacccagctgggcgcccccagcaggaagccagacctgcgggtcatcaccagccaggccggcaagggcctgatgcaccacctgacagaggaccacctggacctgaacaatgcccagaggctgggcgtgtcccagagcacccacagcctgaccacccctgtggtgtctgtggccacccccagcctgctgagccagggcctgcccttcagctccatgcccacagcctacaacacagactaccagctgaccagcgctgagctgagcagcctgcctgccttcagcagccctgggggcctgagcctgggcaatgtgacagcctggcagcagccccagcagccccagcagccccagcagccccagcccccccagcagcagcccccccagccccagcagccccagccccagcagccccagcagccccagcagcccccccagcagcagagccacctggtgcctgtgtccctgagcaacctgatccctggcagccccctgccccacgtgggcgccgccctgactgtgaccacccacccccacatcagcatcaagtctgagcctgtgagccccagccgggagaggagccctgcccctcctcctcctgctgtgtttcctgctgcccggcctgagcctggagatggcctgagcagccctgctgggggcagctatgaaacaggagacagagatgatggccgcggggactttggccccaccctgggcctgctgcggcctgcccctgagcctgaggccgagggcagcgctgtgaagaggatgaggctggacacctggaccctgaagtag

SEQ ID NO: 285978 - DNA, 1428 bp, Artificial Sequence
  derived and/or modified sequence
atgggcaggaagaagatccagatccagaggatcacagatgaaagaaaccggcaggtgaccttcaccaagaggaagtttggcctgatgaagaaggcctatgagctgtctgtgctgtgtgactgtgaaattgccctgatcatcttcaaccacagcaacaagctgttccagtatgccagcacagacatggacaaggtgctgctgaagtacacagagtacaatgagccccatgagagcaggaccaatgctgacatcatcgagagcacagtgcctgcccccaactttgccatgcctgtgacagtgcctgtgagcaaccagagcagcctgcagttcagcaaccccagcggcagcctggtgacccccagcctggtgaccagcagcctgacagacccccggctgctgagcccccagcagcctgccctgcagaggaacagcgtgtccccaggcctgccccagaggcctgccagcgctggggccatgctgggcggggacctgaacagcgccaacggggcctgccccagccctgtgggcaatggctacgtgtctgcccgggccagccctggcctgctgcctgtggccaatggaaacagcctgaacaaggtgatcccagccaagagccccccaccacccacccacagcacccagctgggcgcccccagcaggaagccagacctgcgggtcatcaccagccaggccggcaagggcctgatgcaccacctgacagaggaccacctggacctgaacaatgcccagaggctgggcgtgtcccagagcacccacagcctgaccacccctgtggtgtctgtggccacccccagcctgctgagccagggcctgcccttcagctccatgcccacagcctacaacacagactaccagctgaccagcgctgagctgagcagcctgcctgccttcagcagccctgggggcctgagcctgggcaatgtgacagcctggcagcagccccagcagccccagcagccccagcagccccagcccccccagcagcagcccccccagccccagcagccccagccccagcagccccagcagccccagcagcccccccagcagcagagccacctggtgcctgtgtccctgagcaacctgatccctggcagccccctgccccacgtgggcgccgccctgactgtgaccacccacccccacatcagcatcaagtctgagcctgtgagccccagccgggagaggagccctgcccctcctcctcctgctgtgtttcctgctgcccggcctgagcctggagatggcctgagcagccctgctgggggcagctatgagaccggggacagagatgatggccgcggggactttggccccaccctgggcctgctgcggcctgcccctgagcctgaggccgagggcagcgctgtgaagaggatgaggctggacacctggaccctgaagtag

SEQ ID NO: 285979 - DNA, 5868 bp, Artificial Sequence
  derived and/or modified sequence
atatcaacaacagccgaggcggctcaggcgctcggccccggttccccgcttgcctgccgcccgcctgctggcccccgcgcccacgacgggggcccaggcctcacggcgccgcccagggcccgcgcggacgccggcctcatttattattctccccgcccggagctgcggcttcccggtgttgaagatcccccggaccaggggcgagggctacccgctctttgccgtgacaacaccgttcccccagccgggctggaggctgtgcagaaggtatcctgcagaccatgaactgagcactgttcccagaccgttcatgagcacagtgtaaggtgtgccgagacccaccacccagcgagcccctcccctccgtagcactgaggacccccggagaagatggggaggaaaaagattcagatccagcgaatcaccgacgagcggaaccgacaggtgactttcaccaagcggaagtttggcctgatgaagaaggcgtatgagctgagcgtgctatgtgactgcgagatcgcactcatcatcttcaaccactccaacaagctgttccagtacgccagcaccgacatggacaaggtgctgctcaagtacacggagtacaatgagccacacgagagccgcaccaacgccgacatcatcgaggcgctgcacaagaagcacagggaatgtgagagccctgaggtggacgaggtgtttgccctgaccccccagacggaagagaaatataaaaagatagacgaggagtttgataaaatgatgcagagttatagactggcctcaactgtcccggcccccaactttgccatgcctgtcacggtgcccgtgtccaatcagagctcactgcagttcagcaatcccagcggctccctggtcaccccttccctggtgacatcatccctcacggacccgcggctcctgtccccccagcagccagcactacagaggaacagtgtgtctcctggcctgccccagcggccagctagtgcgggggccatgctggggggtgacctgaacagtgctaacggagcctgccccagccctgttgggaatggctacgtcagtgctcgggcttcccctggcctcctccctgtggccaatggcaacagcctaaacaaggtcatccctgccaagtctccacccccacctacccacagcacccagcttggagcccccagccgcaagcccgacctgcgagtcatcacttcccaggcaggaaaggggttaatgcatcacttgactgaggaccatttagatctgaacaatgcccagcgccttggggtctcccagtctactcattcgctcaccaccccagtggtttctgtggcaacgccgagtttactcagccagggcctccccttctcttccatgcccactgcctacaacacagattaccagttgaccagtgcagagctctcctccttaccagcctttagttcacctggggggctgtcgctaggcaatgtcactgcctggcaacagccacagcagccccagcagccgcagcagccacagcctccacagcagcagccaccgcagccacagcagccacagccacagcagcctcagcagccgcaacagccacctcagcaacagtcccacctggtccctgtatctctcagcaacctcatcccgggcagccccctgccccacgtgggtgctgccctcacagtcaccacccacccccacatcagcatcaagtcagaaccggtgtccccaagccgtgagcgcagccctgcgcctccccctccagctgtgttcccagctgcccgccctgagcctggcgatggtctcagcagcccagccgggggatcctatgagacgggagaccgggatgacggacggggggacttcgggcccacactgggcctgctgcgcccagccccagagcctgaggctgagggctcagctgtgaagaggatgcggcttgatacctggacattaaagtgacgattcccactcccctcctctcagcctccctgatgaagagttgacaatctcaccgcccgcccttccctgccccgggctcctcccgctcgacccccacttcctttcttgtgcttcgtgtcctgttgacggttacatttgtgtataattattatattattattattattattatattttttttaatttggattctcgctttggagagggggatgctctcatcccctctttctgtaccccccaccattttcactggctggggggctctctttttcgcgggaaggggggacactttgcacgttgtacacatatgctgcaggaagggggtggggggcccaataaggcctttgggaaaggacaggtgccgagccctgcatgtggagccctcccaccccacccccagatagagggaaataaccaaaaaactaccaaacaacagaaacccacactctagactgaaaccccaaagtgggcttgatgggtgggtttgtgtttcaaggggaaagtgaggcagaggttctgaaaagggtctctgtttttgtgttcatgtagccataggcacatggagcagaatacttaagcctggcccccaaatgcccctgcacacacacgtgccacacctgcgctgattcttgtgtgtgctgcacccccaaggtgtgtgggtgctggctgagctttgggccgggaaggcagcctgggaatctgaggctggagacaggggtttgaggtgggggcctctctggaagcacatttggagggaaagacaagagagccatgaggagagggctgaggagggcagaagggctaggcagggggcaaattgagcccctcccttccccagtttttctctaagatatacagtgcaatagctccccacccctcagttgacgccagccctgtaaagctggccacagtgtgcagggagaatggggagagggtcttcagtgaggtggctggggcgagagtcggcctggacttccctggggtgctccaggccagagctctttcattggggcgagtgtggtgaggggacgtccttggtcttgcacgcacactacctgggggagtcaacactgggatggtctgtggggtgggagggcctacggatgggtccgtagaggtcccacctccctcattcctccttggcccctctccctagcttctcctgttagctccttctgctcctgaccccacctccttgctcttggcgcccctattgtctctggctacctccttgtcccaccacctccaggctgcatcccaccttccctcttggctactgtaattgtaaatagcgacctttggaaaacgttagcggtgtaacagtccaggaaactgtttttttttgttgttgttgtattgatatgaaatgagattctatttttgtcaaagtatattgtaataataatgactcaaacggcccgtactgtacagacgagattcttctgctgttgttcttgctcccctcccctcctctgagtccgcccctccctgctgcctcctcagtggggcagtgggcaaggggcccaggggcagccgaagcacggggtcctgagacctcaggcaggattggagatcaaaccagagggggcaggcccccagcctgctctctaggatcaccccccgccctaaggggcctggcctggggtgacgtggccaggcagactgtctgccccactccttcacacaagcccagctcctctgcccaaggggtgcggcgcccccttggggtttcctcccagttggagagtagagttaagacaaggcccagttttgtgttagccgaccgtctttgcccacctctatgacccagcctcttgcagtattcccatacttgatgcagggaaggaaccagaagcagaggggcctctacgcaggtacacacgtgtacctgagtgtgttcatgagggcatctggtgtttatgtgtctgagtgtagctttgtatttatgtgtgtgtgtgtgtgtatgtctgattgcacgggtgtacttttgtatttatgtgtgtgtgtggttgcacgggtgtgcctctgtgtgtctctgaccctggctgggtgtgtgtgcaaatctgtgtgactggagctctaggggcatctctgtgtctgagtgtgcctggtgtgtgtttacaaagggagagttggctgctccagctccacagccctgggaccccaactcctgtcttccctgctcctttccctgtgttcaccctcagctctgacacattgaactgcagttggggggattggcagttagccctctgtgcttctccctgcagccctacctctgccaaggtctctccctccagggacctctgcttccacccacatatgtccacttagtcacccacacttgacacagttcctggagtaccctcttcccccaaccccagacctgctttcagagcaaaactcaagtccctcttcctccgtgaagcttctccctcagctgagcagtgatcacttactcactcttaaccccaatccgctgactgggtggggacagcacgtccagccttcccacctctcctgcaggcttctagacggagtttcaaaaactgatgagcctcgatccagggcttgaaagaagccagggtgtaatcttgttcatgcatgcgtccccagagcctcgcccagtgcctggcacatagtaggcactcaataaatgctgaatgggtgaatagttgaatgataggtgctcaataaatgaatgaatggccttcccttctcaggctattcccaccattagtctgcccacctttctaggctgggcttggccaccattaaacacggggtgggggtgagggcccctgcaattcacggtgcaatattcaccagttttgccctctgcctcataaaggcaaacctggcttttgattaccatgtgtggatgtttcagtgtcctttcttctctgtccctggggatggggtggtctgtgaatatgtgacatttctgcagttcagtatccgaaggtttctcttgggggtaggggctcctgggcggccagatgaatgggtccctgggaacccagacctcagatgaggacttaatgtcttcttcctctcaagccaaattcgcctccacccactccctctgaagaactgggcatttgccaaagtaaccactggagtcatctaatggccctccccctccccaggtttcccacagctttcagggacagtgggcaagaggacacccccccccaccacctcagtggaacacaccattctccccccctcaacagcacactcagtgcagcaagactgacccctgaccccctcccagccctccctaccttggacaggaaggaagtaatgcaccttctcttgctgattatttatttgtttggagagacagaaatgtaaaagtgtatctagaaatatctatatctctatatatttttaactgactctttggaatcccctggggtggggtgaggggtaagtttaggctttcgcggaggggaggagacatggagcctgggaactccttgttctcccctctgctgcctctccccaccccttaaagcagttggtagaaggaatggtatttgtatggggggagggaggctggaatggagaatctggattctctcctcttccccattctccagagggagggaggtggtgaggaagaggaagggaggggcaggatgggccatggaggtgccccacccccacacctgacaatcacccacactcctggggctcttcctgggtcctggggcagggcgagtccaagtgtgaggctgttgatttgttttcaatatttcttttcgtgctgtatggtgatgctttcttagtattctacacaataagaaaagacaaagtcctcgagattcttatgagttttgtttgaaaactctttcactatatttgttgtaaagaggtttactattaaaagaaaaagaatacacgtttctg

SEQ ID NO: 285980 - DNA, 5733 bp, Artificial Sequence
  derived and/or modified sequence
atatcaacaacagccgaggcggctcaggcgctcggccccggttccccgcttgcctgccgcccgcctgctggcccccgcgcccacgacgggggcccaggcctcacggcgccgcccagggcccgcgcggacgccggcctcatttattattctccccgcccggagctgcggcttcccggtgttgaagatcccccggaccaggggcgagggctacccgctctttgccgtgacaacaccgttcccccagccgggctggaggctgtgcagaaggtatcctgcagaccatgaactgagcactgttcccagaccgttcatgagcacagtgtaaggtgtgccgagacccaccacccagcgagcccctcccctccgtagcactgaggacccccggagaagatggggaggaaaaagattcagatccagcgaatcaccgacgagcggaaccgacaggtgactttcaccaagcggaagtttggcctgatgaagaaggcgtatgagctgagcgtgctatgtgactgcgagatcgcactcatcatcttcaaccactccaacaagctgttccagtacgccagcaccgacatggacaaggtgctgctcaagtacacggagtacaatgagccacacgagagccgcaccaacgccgacatcatcgagtcaactgtcccggcccccaactttgccatgcctgtcacggtgcccgtgtccaatcagagctcactgcagttcagcaatcccagcggctccctggtcaccccttccctggtgacatcatccctcacggacccgcggctcctgtccccccagcagccagcactacagaggaacagtgtgtctcctggcctgccccagcggccagctagtgcgggggccatgctggggggtgacctgaacagtgctaacggagcctgccccagccctgttgggaatggctacgtcagtgctcgggcttcccctggcctcctccctgtggccaatggcaacagcctaaacaaggtcatccctgccaagtctccacccccacctacccacagcacccagcttggagcccccagccgcaagcccgacctgcgagtcatcacttcccaggcaggaaaggggttaatgcatcacttgactgaggaccatttagatctgaacaatgcccagcgccttggggtctcccagtctactcattcgctcaccaccccagtggtttctgtggcaacgccgagtttactcagccagggcctccccttctcttccatgcccactgcctacaacacagattaccagttgaccagtgcagagctctcctccttaccagcctttagttcacctggggggctgtcgctaggcaatgtcactgcctggcaacagccacagcagccccagcagccgcagcagccacagcctccacagcagcagccaccgcagccacagcagccacagccacagcagcctcagcagccgcaacagccacctcagcaacagtcccacctggtccctgtatctctcagcaacctcatcccgggcagccccctgccccacgtgggtgctgccctcacagtcaccacccacccccacatcagcatcaagtcagaaccggtgtccccaagccgtgagcgcagccctgcgcctccccctccagctgtgttcccagctgcccgccctgagcctggcgatggtctcagcagcccagccgggggatcctatgagacgggagaccgggatgacggacggggggacttcgggcccacactgggcctgctgcgcccagccccagagcctgaggctgagggctcagctgtgaagaggatgcggcttgatacctggacattaaagtgacgattcccactcccctcctctcagcctccctgatgaagagttgacaatctcaccgcccgcccttccctgccccgggctcctcccgctcgacccccacttcctttcttgtgcttcgtgtcctgttgacggttacatttgtgtataattattatattattattattattattatattttttttaatttggattctcgctttggagagggggatgctctcatcccctctttctgtaccccccaccattttcactggctggggggctctctttttcgcgggaaggggggacactttgcacgttgtacacatatgctgcaggaagggggtggggggcccaataaggcctttgggaaaggacaggtgccgagccctgcatgtggagccctcccaccccacccccagatagagggaaataaccaaaaaactaccaaacaacagaaacccacactctagactgaaaccccaaagtgggcttgatgggtgggtttgtgtttcaaggggaaagtgaggcagaggttctgaaaagggtctctgtttttgtgttcatgtagccataggcacatggagcagaatacttaagcctggcccccaaatgcccctgcacacacacgtgccacacctgcgctgattcttgtgtgtgctgcacccccaaggtgtgtgggtgctggctgagctttgggccgggaaggcagcctgggaatctgaggctggagacaggggtttgaggtgggggcctctctggaagcacatttggagggaaagacaagagagccatgaggagagggctgaggagggcagaagggctaggcagggggcaaattgagcccctcccttccccagtttttctctaagatatacagtgcaatagctccccacccctcagttgacgccagccctgtaaagctggccacagtgtgcagggagaatggggagagggtcttcagtgaggtggctggggcgagagtcggcctggacttccctggggtgctccaggccagagctctttcattggggcgagtgtggtgaggggacgtccttggtcttgcacgcacactacctgggggagtcaacactgggatggtctgtggggtgggagggcctacggatgggtccgtagaggtcccacctccctcattcctccttggcccctctccctagcttctcctgttagctccttctgctcctgaccccacctccttgctcttggcgcccctattgtctctggctacctccttgtcccaccacctccaggctgcatcccaccttccctcttggctactgtaattgtaaatagcgacctttggaaaacgttagcggtgtaacagtccaggaaactgtttttttttgttgttgttgtattgatatgaaatgagattctatttttgtcaaagtatattgtaataataatgactcaaacggcccgtactgtacagacgagattcttctgctgttgttcttgctcccctcccctcctctgagtccgcccctccctgctgcctcctcagtggggcagtgggcaaggggcccaggggcagccgaagcacggggtcctgagacctcaggcaggattggagatcaaaccagagggggcaggcccccagcctgctctctaggatcaccccccgccctaaggggcctggcctggggtgacgtggccaggcagactgtctgccccactccttcacacaagcccagctcctctgcccaaggggtgcggcgcccccttggggtttcctcccagttggagagtagagttaagacaaggcccagttttgtgttagccgaccgtctttgcccacctctatgacccagcctcttgcagtattcccatacttgatgcagggaaggaaccagaagcagaggggcctctacgcaggtacacacgtgtacctgagtgtgttcatgagggcatctggtgtttatgtgtctgagtgtagctttgtatttatgtgtgtgtgtgtgtgtatgtctgattgcacgggtgtacttttgtatttatgtgtgtgtgtggttgcacgggtgtgcctctgtgtgtctctgaccctggctgggtgtgtgtgcaaatctgtgtgactggagctctaggggcatctctgtgtctgagtgtgcctggtgtgtgtttacaaagggagagttggctgctccagctccacagccctgggaccccaactcctgtcttccctgctcctttccctgtgttcaccctcagctctgacacattgaactgcagttggggggattggcagttagccctctgtgcttctccctgcagccctacctctgccaaggtctctccctccagggacctctgcttccacccacatatgtccacttagtcacccacacttgacacagttcctggagtaccctcttcccccaaccccagacctgctttcagagcaaaactcaagtccctcttcctccgtgaagcttctccctcagctgagcagtgatcacttactcactcttaaccccaatccgctgactgggtggggacagcacgtccagccttcccacctctcctgcaggcttctagacggagtttcaaaaactgatgagcctcgatccagggcttgaaagaagccagggtgtaatcttgttcatgcatgcgtccccagagcctcgcccagtgcctggcacatagtaggcactcaataaatgctgaatgggtgaatagttgaatgataggtgctcaataaatgaatgaatggccttcccttctcaggctattcccaccattagtctgcccacctttctaggctgggcttggccaccattaaacacggggtgggggtgagggcccctgcaattcacggtgcaatattcaccagttttgccctctgcctcataaaggcaaacctggcttttgattaccatgtgtggatgtttcagtgtcctttcttctctgtccctggggatggggtggtctgtgaatatgtgacatttctgcagttcagtatccgaaggtttctcttgggggtaggggctcctgggcggccagatgaatgggtccctgggaacccagacctcagatgaggacttaatgtcttcttcctctcaagccaaattcgcctccacccactccctctgaagaactgggcatttgccaaagtaaccactggagtcatctaatggccctccccctccccaggtttcccacagctttcagggacagtgggcaagaggacacccccccccaccacctcagtggaacacaccattctccccccctcaacagcacactcagtgcagcaagactgacccctgaccccctcccagccctccctaccttggacaggaaggaagtaatgcaccttctcttgctgattatttatttgtttggagagacagaaatgtaaaagtgtatctagaaatatctatatctctatatatttttaactgactctttggaatcccctggggtggggtgaggggtaagtttaggctttcgcggaggggaggagacatggagcctgggaactccttgttctcccctctgctgcctctccccaccccttaaagcagttggtagaaggaatggtatttgtatggggggagggaggctggaatggagaatctggattctctcctcttccccattctccagagggagggaggtggtgaggaagaggaagggaggggcaggatgggccatggaggtgccccacccccacacctgacaatcacccacactcctggggctcttcctgggtcctggggcagggcgagtccaagtgtgaggctgttgatttgttttcaatatttcttttcgtgctgtatggtgatgctttcttagtattctacacaataagaaaagacaaagtcctcgagattcttatgagttttgtttgaaaactctttcactatatttgttgtaaagaggtttactattaaaagaaaaagaatacacgtttctg

SEQ ID NO: 285981 - DNA, 1563 bp, Artificial Sequence
  derived and/or modified sequence
atgggccggaagaagatccagatccagcggatcaccgacgagcggaaccggcaggttacttttaccaaacggaagtttgggttgatgaaaaaagcttatgagctctcagttctgtgcgactgtgagattgctttgatcatatttaatcactccaataagttgttccaatatgcctctactgatatggataaagttctcttaaaatacacggaatacaacgagccacacgaaagtaggacgaatgcagatatcatagaagccttgcacaagaagcatagagagtgcgaatcacctgaggtcgacgaggtgttcgccttgactccgcagacagaagaaaagtacaagaagatcgacgaggaatttgataaaatgatgcaaagttatcggttagcctctaccgtcccagcaccaaacttcgctatgcccgtcaccgtgcccgtgagcaatcagtcttcccttcagttctcgaatccatcaggttccttagtgaccccgtcacttgtcaccagcagcctgaccgatcctcggttgcttagtcctcaacaacccgcccttcagcggaattccgtctcaccaggtttaccgcaaaggccagcttcagccggggcgatgctaggcggagatctgaactctgcaaatggcgcctgccccagtcccgttggcaacgggtacgtctccgctagggcctcgcctggactgctccctgtcgccaatggcaactcccttaataaggtgatccccgccaaaagcccacctcctcccactcactcgacacagctcggcgcccccagccgaaaaccagaccttcgtgtcattacgtctcaagctgggaagggtctcatgcaccacctgacggaggatcacctagatcttaacaacgcacaacggctgggagtctcgcaaagcactcactcactgactacacccgtagtctcagttgccacaccgtctctactttctcagggactgccgttttcttccatgccaacagcctacaacacagactaccagctaacttctgccgaactgagttccctaccagctttttcttctccaggagggctgtccttagggaatgtgaccgcatggcagcaaccacagcaacctcaacagccccaacagccacagcccccccagcagcaaccacctcagccacagcagccccagccccagcagccccaacagcctcagcagccacctcagcaacagagtcacctagtccctgtctccttgtctaaccttatcccgggaagtccactcccacatgtgggagccgccttgactgtaaccacccatccccatatctcgatcaaatctgaaccggtctcaccctcccgcgagcgctccccagcaccacccccccccgcagtttttcctgcagccagacctgagccaggagatggcttgtcctcacctgccggaggcagctacgaaacaggagacagagatgatggccgcggggacttcgggcctactctggggctgctgcgtcccgctccagaacccgaagctgaggggtctgccgtcaagcgcatgcgactcgatacgtggaccctcaagtag

SEQ ID NO: 285982 - DNA, 1428 bp, Artificial Sequence
  derived and/or modified sequence
atgggccggaagaagatccagatccagcggatcaccgacgagcggaacaggcaggtgacattcactaaacgtaaattcggattgatgaagaaggcctacgaattgtcagtgttatgcgactgtgagatcgccctaattatcttcaaccactccaataaacttttccagtatgcgagcacagacatggataaagtactgcttaagtatacagagtacaacgaaccgcacgaatcaagaaccaacgctgatattattgaaagcacggtccctgcgcccaacttcgccatgcccgtgacagtgccggtgtcaaaccaatcatccctgcagttctctaacccaagtggtagcctggttactcctagccttgtgacatcgtcgctgacagaccctcgcctgctttccccgcagcaacccgccctgcagcgaaattctgtctcacccggcctgccacagcggcctgcttcagcaggggcgatgctgggaggcgatctgaactccgccaatggcgcctgcccttccccagtcgggaacggctatgttagcgccagggcgtccccagggctcttgccagtggctaacggtaacagcctgaataaggtcatcccagccaagagcccacctccacccactcattccacacagctgggagccccatcaagaaagcccgatctccgggtgattacttcccaggccgggaagggcctgatgcatcatttaacggaagaccacttggatctcaacaatgctcaaaggctaggcgtatcgcagagtacacactccttaactaccccggtggtgagtgtagccactccatccctactgtcacagggcctgcctttctctagtatgcctacagcatacaacactgattaccagctaacttccgctgagctgtcgtcacttcccgcgttcagcagccccgggggcctatccttgggaaacgtcacagcctggcagcagccacaacaacctcagcagcctcaacaaccccagcccccccagcaacagcctccccagccacagcagccccagccacagcaaccccaacagcctcagcagccccctcagcaacagtcacaccttgtcccggtcagcctcagcaatttgatccccgggtcgccattaccccatgtgggggctgcccttacggtgactacacaccctcacatctctatcaagagcgagcccgtgagtccctcacgtgagaggagtcctgccccacccccacccgcagtgtttcctgcggcaaggcccgagcccggcgacggactcagttccccagccggtggctcttacgaaacaggcgatcgggacgatgggagaggagactttggtcctacgctcggacttctccggccagcccctgagcccgaagccgaaggtagcgctgttaaaaggatgagacttgacacctggactttaaagtag

SEQ ID NO: 285983 - DNA, 1563 bp, Artificial Sequence
  derived and/or modified sequence
atgggacgcaaaaaaattcagattcagagaataaccgacgagagaaatcggcaggtgacctttaccaagcgtaagtttggcctcatgaaaaaagcctacgaactgtctgtactatgtgactgtgaaatcgctttgatcatcttcaatcattccaataaattgtttcagtatgcctcgactgacatggacaaggtcttgctaaagtacacagaatataatgagccacacgagtcacgcaccaacgctgacattatcgaggccctccataaaaaacacagggagtgtgagagccctgaggtggatgaggtgttcgccctgaccccacagacagaagaaaagtacaagaaaatcgacgaagaattcgacaagatgatgcaatcataccgcctggcctccacagtgccggctcctaatttcgcgatgcccgtgacagtccccgtgagtaaccaatcatccctccagttctctaatcccagtggaagccttgtgacaccatcactcgttactagctcacttaccgatcccaggcttctgtcaccacagcagcctgcactgcagcggaattcagtctcccccggactgccacagagacctgccagcgccggagccatgcttgggggtgatctcaatagtgcaaatggggcttgtccctcccccgtcgggaatggctatgtaagtgctagagcctcccctggactcttaccagtggccaacggcaatagtcttaacaaagtgataccagcaaagtcacctcctccacccacgcactcaacacaactaggggctcccagtagaaagccagatttacgcgttattacctcgcaagcgggaaaggggctgatgcaccatctgaccgaggatcacctggatctgaacaacgcacagagacttggcgtatctcaaagtacccactctctaactacccccgttgtgagtgtggctacaccctcactgctgtcacagggcctgccttttagttcgatgccgactgcctacaacaccgactaccagcttacttcagccgaactgagtagccttcccgcatttagttcacctggcggtctgtctctgggaaacgtgacagcttggcagcagccccagcagccacagcaaccccagcagcctcagccacctcaacagcagcctccccagcctcagcagccacaaccccaacagccccagcagccccaacagccgccacagcagcagtcacatctggtgccagtctctctatccaatttaatccctggatccccgctgccacacgtgggcgcagcgctgacggtgactacccacccgcatatttcaattaagagcgagccagtgagtccgagccgcgagcggagtccagccccaccccctccggcagtattccccgcagcccgtccagaacccggagacggcctgagttcacctgcgggtgggtcctatgagactggagatcgagatgacggcaggggcgacttcggtcccacacttggcctgttgaggcctgctcctgagccagaagcagaagggtccgcggtgaaaaggatgcggctggatacttggactctaaagtag

SEQ ID NO: 285984 - DNA, 1428 bp, Artificial Sequence
  derived and/or modified sequence
atggggaggaagaaaatacagatccagcgaataaccgatgagcgcaatagacaggtcaccttcaccaagcgaaagtttggcctgatgaagaaagcctacgagttgtcagtgctgtgcgattgcgagatcgccctcatcatcttcaatcactccaataaattgttccaatacgcctccacagatatggacaaggtcctactgaagtacactgagtataacgagccccacgaaagtcggaccaatgccgatatcattgagagtacggttcccgcacccaactttgcaatgcccgtgaccgtgcctgtgtctaaccaatccagcctccagttttcaaacccttctgggtccctagtcactccctcgctggtcaccagctccctgaccgatccaaggctgctatcgccacagcaacctgctttacagaggaattctgtatcgcccggactgccccagcggcctgcctccgcgggtgcaatgctgggcggagacctgaattccgccaacggtgcctgtcctagccctgttggcaacggctatgtttcagcccgtgcctcacccggattactccccgtggctaacggaaactctctcaacaaggtgattcccgcaaaaagtccacccccacccacccattcaacacaactcggagcaccttcgcgcaaaccagatctccgcgtcataacatcccaggctgggaagggcctgatgcatcacctgacagaggatcacctcgacctcaacaatgcccaacgtctcggggtgagtcagtccacccactctctaacaactcctgtcgtctccgtcgcaacacctagtctccttagccagggactgcccttctcttcgatgcctaccgcttataatactgactaccaactcaccagtgccgaactgtccagcctgccagccttttctagcccgggtggtctcagcctgggaaacgtgacagcctggcagcagccacagcaacctcagcagccacagcaaccacagccccctcaacagcagccccctcagccccagcagcctcagccacaacagccccagcagcctcaacagcctccacagcaacaaagtcacctagtgcctgtaagcctcagcaacctgattcctgggtcccctctcccacatgttggcgcagccctcaccgtaactacacatcctcacataagcattaagtctgaacccgtgtctcctagcagggagcgttcgccggctccaccaccaccagccgtttttccagctgcacgtcccgaacccggtgatggactgtcctcacccgcaggagggagctatgaaaccggagaccgggacgacggtaggggcgatttcggccctacattaggtctcctgcgacccgcaccagagcctgaggcagagggatcggccgttaagcgcatgagattagacacctggactctcaagtag

SEQ ID NO: 285985 - DNA, 1563 bp, Artificial Sequence
  derived and/or modified sequence
atgggcagaaagaagatccagatccagagaatcaccgacgagagaaacagacaggtgaccttcaccaagagaaagttcggcctgatgaagaaggcctacgagctgagcgtgctgtgcgactgcgagatcgccctgatcatcttcaaccacagcaacaagctgttccagtacgccagcaccgacatggacaaggtgctgctgaagtacaccgagtacaacgagccccacgagagcagaaccaacgccgacatcatcgaggccctgcacaagaagcacagagagtgcgagagccccgaggtggacgaggtgttcgccctgaccccccagaccgaggagaagtacaagaagatcgacgaggagttcgacaagatgatgcagagctacagactggccagcaccgtgcccgcccccaacttcgccatgcccgtgaccgtgcccgtgagcaaccagagcagcctgcagttcagcaaccccagcggcagcctggtgacccccagcctggtgaccagcagcctgaccgaccccagactgctgagcccccagcagcccgccctgcagagaaacagcgtgagccccggcctgccccagagacccgccagcgccggcgccatgctgggcggcgacctgaacagcgccaacggcgcctgccccagccccgtgggcaacggctacgtgagcgccagagccagccccggcctgctgcccgtggccaacggcaacagcctgaacaaggtgatccccgccaagagcccccccccccccacccacagcacccagctgggcgcccccagcagaaagcccgacctgagagtgatcaccagccaggccggcaagggcctgatgcaccacctgaccgaggaccacctggacctgaacaacgcccagagactgggcgtgagccagagcacccacagcctgaccacccccgtggtgagcgtggccacccccagcctgctgagccagggcctgcccttcagcagcatgcccaccgcctacaacaccgactaccagctgaccagcgccgagctgagcagcctgcccgccttcagcagccccggcggcctgagcctgggcaacgtgaccgcctggcagcagccccagcagccccagcagccccagcagccccagcccccccagcagcagcccccccagccccagcagccccagccccagcagccccagcagccccagcagcccccccagcagcagagccacctggtgcccgtgagcctgagcaacctgatccccggcagccccctgccccacgtgggcgccgccctgaccgtgaccacccacccccacatcagcatcaagagcgagcccgtgagccccagcagagagagaagccccgccccccccccccccgccgtgttccccgccgccagacccgagcccggcgacggcctgagcagccccgccggcggcagctacgagaccggcgacagagacgacggcagaggcgacttcggccccaccctgggcctgctgagacccgcccccgagcccgaggccgagggcagcgccgtgaagagaatgagactggacacctggaccctgaagtag

SEQ ID NO: 285986 - DNA, 1428 bp, Artificial Sequence
  derived and/or modified sequence
atgggcagaaagaagatccagatccagagaatcaccgacgagagaaacagacaggtgaccttcaccaagagaaagttcggcctgatgaagaaggcctacgagctgagcgtgctgtgcgactgcgagatcgccctgatcatcttcaaccacagcaacaagctgttccagtacgccagcaccgacatggacaaggtgctgctgaagtacaccgagtacaacgagccccacgagagcagaaccaacgccgacatcatcgagagcaccgtgcccgcccccaacttcgccatgcccgtgaccgtgcccgtgagcaaccagagcagcctgcagttcagcaaccccagcggcagcctggtgacccccagcctggtgaccagcagcctgaccgaccccagactgctgagcccccagcagcccgccctgcagagaaacagcgtgagccccggcctgccccagagacccgccagcgccggcgccatgctgggcggcgacctgaacagcgccaacggcgcctgccccagccccgtgggcaacggctacgtgagcgccagagccagccccggcctgctgcccgtggccaacggcaacagcctgaacaaggtgatccccgccaagagcccccccccccccacccacagcacccagctgggcgcccccagcagaaagcccgacctgagagtgatcaccagccaggccggcaagggcctgatgcaccacctgaccgaggaccacctggacctgaacaacgcccagagactgggcgtgagccagagcacccacagcctgaccacccccgtggtgagcgtggccacccccagcctgctgagccagggcctgcccttcagcagcatgcccaccgcctacaacaccgactaccagctgaccagcgccgagctgagcagcctgcccgccttcagcagccccggcggcctgagcctgggcaacgtgaccgcctggcagcagccccagcagccccagcagccccagcagccccagcccccccagcagcagcccccccagccccagcagccccagccccagcagccccagcagccccagcagcccccccagcagcagagccacctggtgcccgtgagcctgagcaacctgatccccggcagccccctgccccacgtgggcgccgccctgaccgtgaccacccacccccacatcagcatcaagagcgagcccgtgagccccagcagagagagaagccccgccccccccccccccgccgtgttccccgccgccagacccgagcccggcgacggcctgagcagccccgccggcggcagctacgagaccggcgacagagacgacggcagaggcgacttcggccccaccctgggcctgctgagacccgcccccgagcccgaggccgagggcagcgccgtgaagagaatgagactggacacctggaccctgaagtag

SEQ ID NO: 285987 - protein, 514 aa, Artificial Sequence
  derived and/or modified sequence
MGRKKIQIQRITDERNRQVTFTKRKFGLMKKAYELSVLCDCEIALIIFNHSNKLFQYASTDMDKVLLKYTEYNEPHESRTNADIIETLRKKGFNGCDSPEPDGEDSLEQSPLLEDKYRRASEELDGLFRRYGSTVPAPNFAMPVTVPVSNQSSLQFSNPSGSLVTPSLVTSSLTDPRLLSPQQPALQRNSVSPGLPQRPASAGAMLGGDLNSANGACPSPVGNGYVSARASPGLLPVANGNSLNKVIPAKSPPPPTHSTQLGAPSRKPDLRVITSQAGKGLMHHLNNAQRLGVSQSTHSLTTPVVSVATPSLLSQGLPFSSMPTAYNTDYQLTSAELSSLPAFSSPGGLSLGNVTAWQQPQQPQQPQQPQPPQQQPPQPQQPQPQQPQQPQQPPQQQSHLVPVSLSNLIPGSPLPHVGAALTVTTHPHISIKSEPVSPSRERSPAPPPPAVFPAARPEPGDGLSSPAGGSYETGDRDDGRGDFGPTLGLLRPAPEPEAEGSAVKRMRLDTWTLK

SEQ ID NO: 285988 - protein, 139 aa, Artificial Sequence
  derived and/or modified sequence
MGRKKIQIQRITDERNRQVTFTKRKFGLMKKAYELSVLCDCEIALIIFNHSNKLFQYASTDMDKVLLKYTEYNEPHESRTNADIIETLRKKGFNGCDSPEPDGEDSLEQSPLLEDKYRRASEELDGLFRRYGGPCWGVT

SEQ ID NO: 285989 - DNA, 1545 bp, Artificial Sequence
  derived and/or modified sequence
atgggtaggaagaaaatccaaattcaaagaatcacagacgaaaggaataggcaggtgacttttaccaaacgaaaattcggactaatgaagaaagcctatgagttgagcgtcctgtgtgattgcgagatagccctgataatcttcaaccacagtaacaagctgtttcagtatgccagcacggatatggataaagtactactgaagtacaccgagtataatgaaccacatgaaagcagaaccaatgctgacattattgaaactctgagaaagaaagggttcaatggttgtgacagcccagaaccggacggcgaggattctctagaacaaagcccgttgcttgaggacaagtacaggcgcgcctcagaagaattggatgggctgttccgaaggtacgggtctacggttcccgctccaaacttcgcaatgcctgtcacagtgcccgtgagcaaccagagtagcctacagttcagtaatccctcgggctcactggtgacaccctcactggtgacttcttcactgaccgatcctcggctactcagcccacaacagccagcattgcaacggaatagcgtctctcctggactccctcagcgccctgctagtgccggcgccatgctggggggggacctgaactcagccaatggcgcctgcccttcccctgtgggaaacggatatgtctcagcaagggccagccccgggctgctgcctgtagcaaatggtaacagccttaacaaggtaattcctgctaagagccccccacctcctacccactcaactcagctgggcgcaccatcgcgaaagcctgacctccgcgtcataacctcacaggctggcaaaggacttatgcaccatctcaataacgctcagcgcctgggtgttagccagtctacccatagccttactactcccgtcgtctctgtggctaccccttccttgttaagccagggtctccccttcagctctatgccaaccgcatataatacggactaccagctgaccagcgcggagctttcaagtctgcctgccttcagtagccctggcggccttagtctgggtaatgtcacggcttggcaacaacctcagcagcctcaacaaccccaacaaccccagccgccccaacagcagcccccacagcctcagcagccacaaccacagcagcctcagcagccccaacagcctccacagcaacaatctcacctggtgcccgtcagcctctcgaaccttatacccggatctcccttaccacatgttggagctgctctaacagtcaccacacacccacatatttcaatcaagtccgagccagtcagcccgtcccgcgagaggagcccagccccgccaccccctgcagttttcccggccgcaagacccgaacctggcgacggactctccagcccggcaggcggatcctatgaaactggagacagagacgatggccgcggcgactttggacccacactaggtctgctcagacccgcgcccgagcccgaagctgagggttcagcagtcaaacggatgcggctggacacctggacgctgaaatag

SEQ ID NO: 285990 - DNA, 1545 bp, Artificial Sequence
  derived and/or modified sequence
atgggtcggaagaaaatccagattcagaggatcaccgacgagagaaatagacaagtgactttcacaaaaagaaagttcggcctgatgaaaaaagcctacgagctttccgtactatgtgactgcgaaattgctctgattatctttaaccattccaacaagctcttccagtacgcatctacagatatggacaaggttcttttaaaatacaccgagtataacgagccgcatgagtcccgcacaaacgctgacatcatagagactctacgcaagaaaggattcaacggatgtgattctcctgaacccgacggtgaagatagtctggaacagtcgcctttacttgaggataagtacagacgcgcctcagaggagctcgatggattgttccgacgttacggctcaaccgtccctgctcccaactttgcgatgcccgtgaccgtgccagtgagcaatcagagttccttgcagttctccaacccaagcggaagtctcgtcactccaagcctagttacatcctcccttacagaccctcgactgctcagccctcaacagcccgccctccagcgcaactccgttagccctggtcttccccaacgtcccgcttcagccggggctatgctgggcggagacctgaactccgcaaatggagcctgtccatctcccgtggggaatggatacgtttccgcacgggcctcccctggacttctacctgtcgcaaacgggaattctctgaataaggttatcccagccaagtcgccaccaccacctactcatagcacacaactgggtgcgcctagtcggaaaccggacctcagggtcatcactagccaagcaggtaaaggtctgatgcaccatctgaataacgcacagaggttgggagtatctcagtcaactcacagtctgacaacacccgtggtgtcagtggccactccctcccttttgtcccagggcctgccttttagtagcatgccgaccgcatataacactgattaccagctgacgtccgctgagctgtcaagcctccccgccttttcatcacctgggggattgtctcttggaaatgtgaccgcttggcagcagccacagcagccccaacagcctcagcagccccagcctccccaacagcagcctcctcagcctcagcagccgcagccacaacaaccccagcagccccagcagccgccacagcagcagtcacatctggtgcccgtgtccctgtccaatttgatccctgggtccccccttcctcatgtgggagccgccttaacagttactacacacccccacatttccataaaaagtgagcccgtttcgccatcccgggaacgaagtcccgcgccaccaccacccgctgtcttcccagcggcccgccctgaaccaggcgacgggctttcctctccagcgggcggaagctatgagacaggcgatagggacgatggacggggtgactttggaccgacgctcgggctgcttcggccggccccggaacccgaggcggaaggatccgcagtgaagcggatgaggctggacacctggactctcaagtag

SEQ ID NO: 285991 - DNA, 1545 bp, Artificial Sequence
  derived and/or modified sequence
atgggcaggaagaagatccagatccagaggatcacagatgaaagaaaccggcaggtgaccttcaccaagaggaagtttggcctgatgaagaaggcctatgagctgtctgtgctgtgtgactgtgaaattgccctgatcatcttcaaccacagcaacaagctgttccagtatgccagcacagacatggacaaggtgctgctgaagtacacagagtacaatgagccccatgagagcaggaccaatgctgacatcatcgagaccctgaggaagaagggcttcaacggctgtgacagccctgagccagatggagaggacagcctggagcagagccccctgctggaggacaagtaccgccgggccagcgaggagctggatggcctcttcagaagatatggcagcacagtgcctgcccccaactttgccatgcctgtgacagtgcctgtgagcaaccagagcagcctgcagttcagcaaccccagcggcagcctggtgacccccagcctggtgaccagcagcctgacagacccccggctgctgagcccccagcagcctgccctgcagaggaacagcgtgtccccaggcctgccccagaggcctgccagcgctggggccatgctgggcggggacctgaacagcgccaacggggcctgccccagccctgtgggcaatggctacgtgtctgcccgggccagccctggcctgctgcctgtggccaatggaaacagcctgaacaaggtgatcccagccaagagccccccaccacccacccacagcacccagctgggcgcccccagcaggaagccagacctgcgggtcatcaccagccaggccggcaagggcctgatgcaccacctgaacaatgcccagaggctgggcgtgtcccagagcacccacagcctgaccacccctgtggtgtctgtggccacccccagcctgctgagccagggcctgcccttcagctccatgcccacagcctacaacacagactaccagctgaccagcgctgagctgagcagcctgcctgccttcagcagccctgggggcctgagcctgggcaatgtgacagcctggcagcagccccagcagccccagcagccccagcagccccagcccccccagcagcagcccccccagccccagcagccccagccccagcagccccagcagccccagcagcccccccagcagcagagccacctggtgcctgtgtccctgagcaacctgatccctggcagccccctgccccacgtgggcgccgccctgactgtgaccacccacccccacatcagcatcaagtctgagcctgtgagccccagccgggagaggagccctgcccctcctcctcctgctgtgtttcctgctgcccggcctgagcctggagatggcctgagcagccctgctgggggcagctatgaaacaggagacagagatgatggccgcggggactttggccccaccctgggcctgctgcggcctgcccctgagcctgaggccgagggcagcgctgtgaagaggatgaggctggacacctggaccctgaagtag

SEQ ID NO: 285992 - DNA, 3194 bp, Artificial Sequence
  derived and/or modified sequence
ggggcctgagaccacccctgccctaggcccagctttcctggactgcctgcccccacaaaccaacagcccgcccccaggtccccagtcgaaggtatcctgcagaccatgaactgagcactgttcccagaccgttcatgagcacagtgtaaggtgtgccgagacccaccacccagcgagcccctcccctccgtagcactgaggacccccggagaagatggggaggaaaaagattcagatccagcgaatcaccgacgagcggaaccgacaggtgactttcaccaagcggaagtttggcctgatgaagaaggcgtatgagctgagcgtgctatgtgactgcgagatcgcactcatcatcttcaaccactccaacaagctgttccagtacgccagcaccgacatggacaaggtgctgctcaagtacacggagtacaatgagccacacgagagccgcaccaacgccgacatcatcgagaccctgaggaagaagggcttcaacggctgcgacagccccgagcccgacggggaggactcgctggaacagagccccctgctggaggacaagtaccgacgcgccagcgaggagctcgacgggctcttccggcgctatgggtcaactgtcccggcccccaactttgccatgcctgtcacggtgcccgtgtccaatcagagctcactgcagttcagcaatcccagcggctccctggtcaccccttccctggtgacatcatccctcacggacccgcggctcctgtccccccagcagccagcactacagaggaacagtgtgtctcctggcctgccccagcggccagctagtgcgggggccatgctggggggtgacctgaacagtgctaacggagcctgccccagccctgttgggaatggctacgtcagtgctcgggcttcccctggcctcctccctgtggccaatggcaacagcctaaacaaggtcatccctgccaagtctccacccccacctacccacagcacccagcttggagcccccagccgcaagcccgacctgcgagtcatcacttcccaggcaggaaaggggttaatgcatcacttgaacaatgcccagcgccttggggtctcccagtctactcattcgctcaccaccccagtggtttctgtggcaacgccgagtttactcagccagggcctccccttctcttccatgcccactgcctacaacacagattaccagttgaccagtgcagagctctcctccttaccagcctttagttcacctggggggctgtcgctaggcaatgtcactgcctggcaacagccacagcagccccagcagccgcagcagccacagcctccacagcagcagccaccgcagccacagcagccacagccacagcagcctcagcagccgcaacagccacctcagcaacagtcccacctggtccctgtatctctcagcaacctcatcccgggcagccccctgccccacgtgggtgctgccctcacagtcaccacccacccccacatcagcatcaagtcagaaccggtgtccccaagccgtgagcgcagccctgcgcctccccctccagctgtgttcccagctgcccgccctgagcctggcgatggtctcagcagcccagccgggggatcctatgagacgggagaccgggatgacggacggggggacttcgggcccacactgggcctgctgcgcccagccccagagcctgaggctgagggctcagctgtgaagaggatgcggcttgatacctggacattaaagtgacgattcccactcccctcctctcagcctccctgatgaagagttgacaatctcaccgcccgcccttccctgccccgggctcctcccgctcgacccccacttcctttcttgtgcttcgtgtcctgttgacggttacatttgtgtataattattatattattattattattattatattttttttaatttggattctcgctttggagagggggatgctctcatcccctctttctgtaccccccaccattttcactggctggggggctctctttttcgcgggaaggggggacactttgcacgttgtacacatatgctgcaggaagggggtggggggcccaataaggcctttgggaaaggacaggtgccgagccctgcatgtggagccctcccaccccacccccagatagagggaaataaccaaaaaactaccaaacaacagaaacccacactctagactgaaaccccaaagtgggcttgatgggtgggtttgtgtttcaaggggaaagtgaggcagaggttctgaaaagggtctctgtttttgtgttcatgtagccataggcacatggagcagaatacttaagcctggcccccaaatgcccctgcacacacacgtgccacacctgcgctgattcttgtgtgtgctgcacccccaaggtgtgtgggtgctggctgagctttgggccgggaaggcagcctgggaatctgaggctggagacaggggtttgaggtgggggcctctctggaagcacatttggagggaaagacaagagagccatgaggagagggctgaggagggcagaagggctaggcagggggcaaattgagcccctcccttccccagtttttctctaagatatacagtgcaatagctccccacccctcagttgacgccagccctgtaaagctggccacagtgtgcagggagaatggggagagggtcttcagtgaggtggctggggcgagagtcggcctggacttccctggggtgctccaggccagagctctttcattggggcgagtgtggtgaggggacgtccttggtcttgcacgcacactacctgggggagtcaacactgggatggtctgtggggtgggagggcctacggatgggtccgtagaggtcccacctccctcattcctccttggcccctctccctagcttctcctgttagctccttctgctcctgaccccacctccttgctcttggcgcccctattgtctctggctacctccttgtcccaccacctccaggctgcatcccaccttccctcttggctactgtaattgtaaatagcgacctttggaaaacgttagcggtgtaacagtccaggaaactgtttttttttgttgttgttgtattgatatgaaatgagattctatttttgtcaaagtatattgtaataataatgactcaaacggcccgtactgtacagacga

SEQ ID NO: 285993 - DNA, 5850 bp, Artificial Sequence
  derived and/or modified sequence
atatcaacaacagccgaggcggctcaggcgctcggccccggttccccgcttgcctgccgcccgcctgctggcccccgcgcccacgacgggggcccaggcctcacggcgccgcccagggcccgcgcggacgccggcctcatttattattctccccgcccggagctgcggcttcccggtgttgaagatcccccggaccaggggcgagggctacccgctctttgccgtgacaacaccgttcccccagccgggctggaggctgtgcagaaggtatcctgcagaccatgaactgagcactgttcccagaccgttcatgagcacagtgtaaggtgtgccgagacccaccacccagcgagcccctcccctccgtagcactgaggacccccggagaagatggggaggaaaaagattcagatccagcgaatcaccgacgagcggaaccgacaggtgactttcaccaagcggaagtttggcctgatgaagaaggcgtatgagctgagcgtgctatgtgactgcgagatcgcactcatcatcttcaaccactccaacaagctgttccagtacgccagcaccgacatggacaaggtgctgctcaagtacacggagtacaatgagccacacgagagccgcaccaacgccgacatcatcgagaccctgaggaagaagggcttcaacggctgcgacagccccgagcccgacggggaggactcgctggaacagagccccctgctggaggacaagtaccgacgcgccagcgaggagctcgacgggctcttccggcgctatgggtcaactgtcccggcccccaactttgccatgcctgtcacggtgcccgtgtccaatcagagctcactgcagttcagcaatcccagcggctccctggtcaccccttccctggtgacatcatccctcacggacccgcggctcctgtccccccagcagccagcactacagaggaacagtgtgtctcctggcctgccccagcggccagctagtgcgggggccatgctggggggtgacctgaacagtgctaacggagcctgccccagccctgttgggaatggctacgtcagtgctcgggcttcccctggcctcctccctgtggccaatggcaacagcctaaacaaggtcatccctgccaagtctccacccccacctacccacagcacccagcttggagcccccagccgcaagcccgacctgcgagtcatcacttcccaggcaggaaaggggttaatgcatcacttgaacaatgcccagcgccttggggtctcccagtctactcattcgctcaccaccccagtggtttctgtggcaacgccgagtttactcagccagggcctccccttctcttccatgcccactgcctacaacacagattaccagttgaccagtgcagagctctcctccttaccagcctttagttcacctggggggctgtcgctaggcaatgtcactgcctggcaacagccacagcagccccagcagccgcagcagccacagcctccacagcagcagccaccgcagccacagcagccacagccacagcagcctcagcagccgcaacagccacctcagcaacagtcccacctggtccctgtatctctcagcaacctcatcccgggcagccccctgccccacgtgggtgctgccctcacagtcaccacccacccccacatcagcatcaagtcagaaccggtgtccccaagccgtgagcgcagccctgcgcctccccctccagctgtgttcccagctgcccgccctgagcctggcgatggtctcagcagcccagccgggggatcctatgagacgggagaccgggatgacggacggggggacttcgggcccacactgggcctgctgcgcccagccccagagcctgaggctgagggctcagctgtgaagaggatgcggcttgatacctggacattaaagtgacgattcccactcccctcctctcagcctccctgatgaagagttgacaatctcaccgcccgcccttccctgccccgggctcctcccgctcgacccccacttcctttcttgtgcttcgtgtcctgttgacggttacatttgtgtataattattatattattattattattattatattttttttaatttggattctcgctttggagagggggatgctctcatcccctctttctgtaccccccaccattttcactggctggggggctctctttttcgcgggaaggggggacactttgcacgttgtacacatatgctgcaggaagggggtggggggcccaataaggcctttgggaaaggacaggtgccgagccctgcatgtggagccctcccaccccacccccagatagagggaaataaccaaaaaactaccaaacaacagaaacccacactctagactgaaaccccaaagtgggcttgatgggtgggtttgtgtttcaaggggaaagtgaggcagaggttctgaaaagggtctctgtttttgtgttcatgtagccataggcacatggagcagaatacttaagcctggcccccaaatgcccctgcacacacacgtgccacacctgcgctgattcttgtgtgtgctgcacccccaaggtgtgtgggtgctggctgagctttgggccgggaaggcagcctgggaatctgaggctggagacaggggtttgaggtgggggcctctctggaagcacatttggagggaaagacaagagagccatgaggagagggctgaggagggcagaagggctaggcagggggcaaattgagcccctcccttccccagtttttctctaagatatacagtgcaatagctccccacccctcagttgacgccagccctgtaaagctggccacagtgtgcagggagaatggggagagggtcttcagtgaggtggctggggcgagagtcggcctggacttccctggggtgctccaggccagagctctttcattggggcgagtgtggtgaggggacgtccttggtcttgcacgcacactacctgggggagtcaacactgggatggtctgtggggtgggagggcctacggatgggtccgtagaggtcccacctccctcattcctccttggcccctctccctagcttctcctgttagctccttctgctcctgaccccacctccttgctcttggcgcccctattgtctctggctacctccttgtcccaccacctccaggctgcatcccaccttccctcttggctactgtaattgtaaatagcgacctttggaaaacgttagcggtgtaacagtccaggaaactgtttttttttgttgttgttgtattgatatgaaatgagattctatttttgtcaaagtatattgtaataataatgactcaaacggcccgtactgtacagacgagattcttctgctgttgttcttgctcccctcccctcctctgagtccgcccctccctgctgcctcctcagtggggcagtgggcaaggggcccaggggcagccgaagcacggggtcctgagacctcaggcaggattggagatcaaaccagagggggcaggcccccagcctgctctctaggatcaccccccgccctaaggggcctggcctggggtgacgtggccaggcagactgtctgccccactccttcacacaagcccagctcctctgcccaaggggtgcggcgcccccttggggtttcctcccagttggagagtagagttaagacaaggcccagttttgtgttagccgaccgtctttgcccacctctatgacccagcctcttgcagtattcccatacttgatgcagggaaggaaccagaagcagaggggcctctacgcaggtacacacgtgtacctgagtgtgttcatgagggcatctggtgtttatgtgtctgagtgtagctttgtatttatgtgtgtgtgtgtgtgtatgtctgattgcacgggtgtacttttgtatttatgtgtgtgtgtggttgcacgggtgtgcctctgtgtgtctctgaccctggctgggtgtgtgtgcaaatctgtgtgactggagctctaggggcatctctgtgtctgagtgtgcctggtgtgtgtttacaaagggagagttggctgctccagctccacagccctgggaccccaactcctgtcttccctgctcctttccctgtgttcaccctcagctctgacacattgaactgcagttggggggattggcagttagccctctgtgcttctccctgcagccctacctctgccaaggtctctccctccagggacctctgcttccacccacatatgtccacttagtcacccacacttgacacagttcctggagtaccctcttcccccaaccccagacctgctttcagagcaaaactcaagtccctcttcctccgtgaagcttctccctcagctgagcagtgatcacttactcactcttaaccccaatccgctgactgggtggggacagcacgtccagccttcccacctctcctgcaggcttctagacggagtttcaaaaactgatgagcctcgatccagggcttgaaagaagccagggtgtaatcttgttcatgcatgcgtccccagagcctcgcccagtgcctggcacatagtaggcactcaataaatgctgaatgggtgaatagttgaatgataggtgctcaataaatgaatgaatggccttcccttctcaggctattcccaccattagtctgcccacctttctaggctgggcttggccaccattaaacacggggtgggggtgagggcccctgcaattcacggtgcaatattcaccagttttgccctctgcctcataaaggcaaacctggcttttgattaccatgtgtggatgtttcagtgtcctttcttctctgtccctggggatggggtggtctgtgaatatgtgacatttctgcagttcagtatccgaaggtttctcttgggggtaggggctcctgggcggccagatgaatgggtccctgggaacccagacctcagatgaggacttaatgtcttcttcctctcaagccaaattcgcctccacccactccctctgaagaactgggcatttgccaaagtaaccactggagtcatctaatggccctccccctccccaggtttcccacagctttcagggacagtgggcaagaggacacccccccccaccacctcagtggaacacaccattctccccccctcaacagcacactcagtgcagcaagactgacccctgaccccctcccagccctccctaccttggacaggaaggaagtaatgcaccttctcttgctgattatttatttgtttggagagacagaaatgtaaaagtgtatctagaaatatctatatctctatatatttttaactgactctttggaatcccctggggtggggtgaggggtaagtttaggctttcgcggaggggaggagacatggagcctgggaactccttgttctcccctctgctgcctctccccaccccttaaagcagttggtagaaggaatggtatttgtatggggggagggaggctggaatggagaatctggattctctcctcttccccattctccagagggagggaggtggtgaggaagaggaagggaggggcaggatgggccatggaggtgccccacccccacacctgacaatcacccacactcctggggctcttcctgggtcctggggcagggcgagtccaagtgtgaggctgttgatttgttttcaatatttcttttcgtgctgtatggtgatgctttcttagtattctacacaataagaaaagacaaagtcctcgagattcttatgagttttgtttgaaaactctttcactatatttgttgtaaagaggtttactattaaaagaaaaagaatacacgtttctg

SEQ ID NO: 285994 - DNA, 1545 bp, Artificial Sequence
  derived and/or modified sequence
atgggccggaagaagatccagatccagcggatcaccgacgagcggaatcgtcaggtcactttcacaaaaaggaaatttggcctcatgaagaaagcctacgaattgtcagtgttatgtgactgtgagattgccctgatcatttttaatcacagcaacaaactgtttcagtatgctagcacagatatggacaaagtgctgctgaagtatactgaatataacgagccacacgaaagtaggacgaacgctgatatcatagaaaccctcagaaaaaagggtttcaacggctgtgactctcctgagccagacggtgaggattcacttgagcaaagccccctccttgaagacaagtataggcgagcatctgaggaactggatggcttgtttagaagatacgggtctaccgtcccagctcctaatttcgcaatgcctgtcaccgttccggtgtctaaccagtcgagtctgcaattttccaatcctagcgggtcccttgtgactcccagcctggtgacctcaagcctgacagatccacggcttctcagtcctcagcagccagcactgcagagaaacagcgtgagtcccggcctgccgcagagacccgcctccgctggagccatgctcggcggagacctgaatagcgctaatggggcctgccctagccctgtgggcaatggatatgtgtccgcacgcgcttcacccggcttactgcccgtggccaacggcaactcattaaacaaagtgatcccagcaaagagcccccctccccccactcactccacacagctgggggcaccttcaagaaagcccgacctgcgggtgattacgtcacaggcggggaaagggctcatgcatcacttaaacaacgcccaacggttgggcgtttcccagagtacacattctttgacaacacctgtcgtgtcagtcgccactccatccttgttgagtcaggggttgcctttttcttctatgcccaccgcgtataacactgattaccagcttacaagcgctgaattgagcagccttcccgccttcagctcccccggtgggctgagtctggggaatgttactgcgtggcagcaaccacagcagccccagcaaccacaacagccacagcccccacagcaacagcctccccagccacagcagccgcagccccaacagcctcagcagccccagcagccgcctcagcagcagtctcatctcgtgcctgttagtctaagtaacctcatcccagggagtcccctcccgcatgtcggtgcagctctcaccgttaccacacaccctcacataagcataaagagcgagcctgtgtccccatcccgtgagagaagtcccgctccaccacctccagccgtctttccagccgccaggcctgagccaggcgatggcctttcctctccggcgggaggatcctacgaaaccggggatcgggatgatggacgaggcgattttggcccaaccctaggactgctacgcccagcccctgagcctgaggctgagggcagcgccgtgaagcgcatgaggttggacacttggacacttaagtag

SEQ ID NO: 285995 - DNA, 1545 bp, Artificial Sequence
  derived and/or modified sequence
atgggccggaagaagatccagatccagcggatcaccgacgagcggaaccggcaggtcacgttcacgaagagaaagtttggccttatgaagaaggcctatgagctctctgttctctgcgactgcgagattgctttgataatcttcaatcatagcaataagctgtttcagtatgccagcacagatatggataaggtcctgttgaagtacactgagtacaacgaaccccacgagagccgcactaatgctgatattatcgaaaccctccgcaagaagggctttaatggatgtgattcccccgagcccgatggcgaggacagcctggagcagagccctttactggaggataagtaccgacgcgcgtccgaagaactagatggtctgtttaggaggtacggcagcactgtgcctgccccaaactttgcaatgccggttacagtccctgtcagtaaccagagtagcctccaattctccaacccttccggttctctcgttactccgtccctggtgacctcttccttaacagaccctcgtttactctcccctcaacagccggctttgcagcgtaactccgtgagtcctggactgccccagaggcccgcaagcgccggggcgatgctgggcggtgacctcaactctgctaatggtgcctgccccagccctgtggggaatgggtacgtctccgcgcgcgcttcccccggcctcctgcctgtagccaatggtaattcactgaacaaggtcataccagcaaagtcacctccaccaccaacacacagcacccagcttggggcccctagcaggaagcccgatctgcgagtgattacaagtcaggcaggtaaaggcctcatgcaccacctcaacaatgcccagagactgggggtttcccagtctacccattctctgactactcccgtggtttccgtggcaaccccatcactcctcagccaggggctgccgttcagcagtatgcctacggcatacaacaccgactatcagttgacttctgcagagttgtctagtcttccggcgtttagctcgcctggtggcctgtctctaggaaatgtgactgcttggcagcaacctcagcaacctcagcaacctcaacaacctcagccccctcaacagcagccgccccagccccagcagcctcagccccaacagccgcagcagcctcagcaacccccccagcaacaatcccacctggtcccagtgagcctgagcaatctcattccaggcagtcccctcccccatgtgggcgctgccctcacagtgaccacgcatccccatatttctattaagagcgagcccgtctccccatctagggaacgcagcccagccccaccacccccagccgtcttccccgccgctaggccagagccaggagacggattatcaagtcccgccggaggcagctacgagaccggggaccgggatgacgggagaggcgattttggacctactctcggactcctgagacctgcgcccgaacccgaagccgagggtagcgcggtcaaaaggatgcggctggacacatggacgttgaagtag

SEQ ID NO: 285996 - DNA, 1545 bp, Artificial Sequence
  derived and/or modified sequence
atgggcaggaaaaaaattcaaatccagcggatcacagacgaaaggaatagacaagtgacgttcacaaagcgcaagtttggtcttatgaaaaaggcctacgagctcagtgttctgtgcgattgcgagattgcccttatcatattcaaccactccaacaagctgttccagtacgcttcaacagatatggacaaagtgctcttaaaatatactgagtacaatgaacctcatgagtccaggacaaatgcggatataattgagacacttcggaagaagggcttcaacggctgtgattcgccagaacctgacggcgaagattccttggaacagtccccactgctggaagataaatacaggcgggcatctgaggaactcgacggacttttccgtaggtacggcagcaccgtgccagcacccaatttcgccatgcctgttactgtccctgtcagtaaccaaagtagtcttcagttctcaaatcctagtgggagcctggtgaccccatctttggtgacttcctccctgactgatccacgcttgctctctcctcaacagcccgctttgcagcgtaatagcgtgtcgccagggctgccccaaagacccgctagtgctggagccatgttgggcggagatctgaacagtgcgaatggtgcctgtccgtcacctgtgggtaatggatacgtctcagccagagcctcccccggactgctgccagtagctaatgggaactctctcaacaaagttattcccgctaagagcccccctcccccaacacattccacacaactcggtgccccatcacgaaagcccgacttaagagtaataaccagccaggctggcaagggactgatgcaccatctgaataatgcacagagacttggggtgagccagtctacacatagtttaaccacacccgtcgtgtctgtggccactcctagccttctctcacaggggctgccctttagttctatgcccactgcttacaacactgactaccaattgacttctgcggaattatcttccttgcctgcctttagcagcccaggtggcttgtcgctaggcaacgtcactgcctggcagcagcctcagcaaccacagcaaccacagcagcctcagcccccacagcaacagcctcctcaacctcagcagccacagccccagcaaccacagcagccacagcagccccctcagcagcaaagccatctggtgccagtgtcactcagtaacttaataccaggctcaccgcttcctcatgtgggcgctgcgctcactgtaaccacgcaccctcatatctctattaagagcgagcccgtgagcccatcacgcgagcgttctcccgctcctccacctcccgctgtgttccctgcagctcgccctgaacccggagacggactcagttctccagctggtggatcttacgagaccggagatcgtgacgatggcaggggcgacttcggaccgaccctggggctgctgagacctgctccagagccagaggccgaggggagtgcggtgaagcgtatgagactggacacttggactctgaagtag

SEQ ID NO: 285997 - DNA, 1545 bp, Artificial Sequence
  derived and/or modified sequence
atggggaggaaaaaaatacagatccagcggataactgatgagagaaatagacaggtaactttcactaaaagaaagttcggcttaatgaagaaggcatatgaactgtctgtgctgtgtgactgcgaaattgctcttatcatatttaatcactcaaataaactgtttcaatacgcgagtacagatatggataaagttctgctcaaatacaccgagtataacgaaccccatgagtcacgcacaaatgcggacatcattgagacccttaggaagaaaggattcaacggttgcgattcccccgaacccgatggcgaggattccctcgaacaatccccgctgctggaagataaatataggagagccagcgaggaactagacggcttatttcggagatacggaagcacagtacctgcaccaaattttgcaatgccagtcactgtccccgtcagcaatcagtctagcctacagttctcgaacccctccggcagtctcgtaaccccaagtctcgttacaagctcattgacagacccccgtcttctgagtcctcagcagcccgcattgcagcggaatagtgtgagccccggacttccacagaggccggcttctgccggtgcgatgctgggtggcgacttgaattcagctaacggcgcttgtccatcccctgtcgggaatggatatgtgtccgctcgggcttcgccaggcctgctccctgtggcaaacggaaattccctgaacaaagttatccctgccaaaagtccacctccaccaacccatagtactcaattgggtgctccgtcaagaaaacctgatcttagggtcatcaccagtcaggcagggaaaggcttgatgcatcacctgaataacgcccagcgattaggcgtctcacagtcaacacatagcttgacaactcctgtcgtctctgtggcaaccccttccctcctctcccagggcctcccgttttccagcatgccgacagcctataacaccgactatcaattaacgtcggccgaactctcctctcttcccgcattctccagccctggcggtctatccctgggcaacgtcaccgcttggcagcagccccagcagccccagcaaccccagcagcctcaacctccacaacagcaacctcctcaacctcagcaaccgcagcctcaacagccacagcagccacagcaaccaccgcagcagcagagccatctcgtgccagtaagcctgagcaacttaatccccggatccccacttccccacgtcggtgctgctctgactgtaaccacccatcctcatatcagtattaagtcagaacccgtttcgcccagccgggagcggagtcctgcaccgcctcctcctgccgtgtttcctgccgctcggcctgaaccaggagatggactgagtagtcctgcgggtgggtcttacgagaccggtgaccgcgacgacgggaggggcgactttgggccaaccttgggcctcctgaggccagccccagagccggaggctgagggctcagcggttaagcgcatgcgactcgatacatggacactgaagtag

SEQ ID NO: 285998 - DNA, 1545 bp, Artificial Sequence
  derived and/or modified sequence
atgggcagaaagaagatccagatccagagaatcaccgacgagagaaacagacaggtgaccttcaccaagagaaagttcggcctgatgaagaaggcctacgagctgagcgtgctgtgcgactgcgagatcgccctgatcatcttcaaccacagcaacaagctgttccagtacgccagcaccgacatggacaaggtgctgctgaagtacaccgagtacaacgagccccacgagagcagaaccaacgccgacatcatcgagaccctgagaaagaagggcttcaacggctgcgacagccccgagcccgacggcgaggacagcctggagcagagccccctgctggaggacaagtacagaagagccagcgaggagctggacggcctgttcagaagatacggcagcaccgtgcccgcccccaacttcgccatgcccgtgaccgtgcccgtgagcaaccagagcagcctgcagttcagcaaccccagcggcagcctggtgacccccagcctggtgaccagcagcctgaccgaccccagactgctgagcccccagcagcccgccctgcagagaaacagcgtgagccccggcctgccccagagacccgccagcgccggcgccatgctgggcggcgacctgaacagcgccaacggcgcctgccccagccccgtgggcaacggctacgtgagcgccagagccagccccggcctgctgcccgtggccaacggcaacagcctgaacaaggtgatccccgccaagagcccccccccccccacccacagcacccagctgggcgcccccagcagaaagcccgacctgagagtgatcaccagccaggccggcaagggcctgatgcaccacctgaacaacgcccagagactgggcgtgagccagagcacccacagcctgaccacccccgtggtgagcgtggccacccccagcctgctgagccagggcctgcccttcagcagcatgcccaccgcctacaacaccgactaccagctgaccagcgccgagctgagcagcctgcccgccttcagcagccccggcggcctgagcctgggcaacgtgaccgcctggcagcagccccagcagccccagcagccccagcagccccagcccccccagcagcagcccccccagccccagcagccccagccccagcagccccagcagccccagcagcccccccagcagcagagccacctggtgcccgtgagcctgagcaacctgatccccggcagccccctgccccacgtgggcgccgccctgaccgtgaccacccacccccacatcagcatcaagagcgagcccgtgagccccagcagagagagaagccccgccccccccccccccgccgtgttccccgccgccagacccgagcccggcgacggcctgagcagccccgccggcggcagctacgagaccggcgacagagacgacggcagaggcgacttcggccccaccctgggcctgctgagacccgcccccgagcccgaggccgagggcagcgccgtgaagagaatgagactggacacctggaccctgaagtag

SEQ ID NO: 285999 - protein, 510 aa, Artificial Sequence
  derived and/or modified sequence
MGRKKIQIQRITDERNRQVTFTKRKFGLMKKAYELSVLCDCEIALIIFNHSNKLFQYASTDMDKVLLKYTEYNEPHESRTNADIIEALHKKHRECESPEVDEVFALTPQTEEKYKKIDEEFDKMMQSYRLASTVPAPNFAMPVTVPVSNQSSLQFSNPSGSLVTPSLVTSSLTDPRLLSPQQPALQRNSVSPGLPQRPASAGAMLGGDLNSANGACPSPVGNGYVSARASPGLLPVANGNSLNKVIPAKSPPPPTHSTQLGAPSRKPDLRVITSQAGKGLMHHLNNAQRLGVSQSTHSLTTPVVSVATPSLLSQGLPFSSMPTAYNTDYQLTSAELSSLPAFSSPGGLSLGNVTAWQQPQQPQQPQQPQPPQQQPPQPQQPQPQQPQQPQQPPQQQSHLVPVSLSNLIPGSPLPHVGAALTVTTHPHISIKSEPVSPSRERSPAPPPPAVFPAARPEPGDGLSSPAGGSYETGDRDDGRGDFGPTLGLLRPAPEPEAEGSAVKRMRLDTW

SEQ ID NO: 286000 - DNA, 390 bp, Artificial Sequence
  derived and/or modified sequence
atggccgccgccacctgggacaaggagagcaagtgcagactgagcagaggccactgccaccacagaagacaccagagcctgcccgtgggcctgaccctgagatacagcgcccccgccagccaccagcccaagtgcttcaccagcaagcacggcaccagacccagccagagaaagcccagcctgagagtgagcggccactacagcccccacagcctgttccccggccacggcagaagaggcgcctgcgtggccagaagcagaagattcgccggccacatgcagctgacctggaagctgaagagaaagaagcccggcagaaccgccagcagcgaggagcacaagaagcagggcagaggctgcgccggcagaagactgatcaagagcacctag

SEQ ID NO: 286001 - DNA, 1533 bp, Artificial Sequence
  derived and/or modified sequence
atgggaaggaagaaaatccagatccagcgaatcacagatgaacgtaacaggcaggtgacatttactaaaaggaaatttggcttgatgaagaaggcctatgagctgtctgtgctgtgcgattgcgaaattgcgctcatcatctttaaccactcgaacaaactgtttcagtatgcctccactgatatggataaagtcctgcttaagtacacagagtacaacgaaccccacgaatcccggaccaacgctgacataatcgaggctctccacaaaaaacaccgggaatgcgaatcacccgaagtggacgaggtgttcgcactgactccccagacagaagagaaatacaagaaaatcgacgaagaatttgacaagatgatgcagtcatacagattagcctctaccgttcccgccccaaactttgctatgccagtcactgttcccgtcagcaaccagtcaagtctgcagtttagcaacccctccgggtctctggtgactccttcacttgtcaccagctccctcactgacccccgcctcctgtcaccacagcagcctgcactccaaagaaactcagtgtctcccggtctgccccagcggcccgcaagcgccggcgcaatgctagggggcgatctaaactcggccaatggcgcatgtccaagtccagtcggcaatgggtacgtgtctgcccgcgctagccctggcctgctgcccgttgctaatggaaatagcctgaataaggtcataccagcaaaatcccccccccctcctacgcacagcacccaactcggagccccatcgcggaaacctgatcttcgggtgattacctcccaggcaggtaagggccttatgcaccatttgaacaacgcacagcggctcggtgtcagccagtctacccactctctgacaacaccagtcgtgagcgtcgcaacccccagccttttgagccaggggctgcctttttccagcatgcccaccgcgtacaatacggattatcaactaaccagcgcggaactgagctcgctgcccgctttttctagccccggcggcctgtcactagggaacgtgactgcctggcaacagccccagcaacctcagcaaccccaacagcctcaaccacctcagcaacaaccaccccagccacagcagccacaacctcagcaacctcagcagccccagcagcctccgcagcagcagtcccatctggtacccgtgtcgctcagtaatctgattcctggctcacctttaccccacgtcggagccgccttaaccgtgacaacacatccccatatctctatcaagagtgaaccagttagtccaagccgggagcgcagcccagcgccgcccccacctgctgtcttccccgccgcaagacccgaacctggcgacggattgtcttctcctgctggtgggagttacgagactggagacagggacgatgggagaggagatttcggcccaactctggggctgttgcggcccgctcccgagccagaggctgagggctctgctgtgaagcggatgcgattggacacttggtag

SEQ ID NO: 286002 - DNA, 1533 bp, Artificial Sequence
  derived and/or modified sequence
atgggcaggaagaagatccagatccagaggatcacagatgaaagaaaccggcaggtgaccttcaccaagaggaagtttggcctgatgaagaaggcctatgagctgtctgtgctgtgtgactgtgaaattgccctgatcatcttcaaccacagcaacaagctgttccagtatgccagcacagacatggacaaggtgctgctgaagtacacagagtacaatgagccccatgagagcaggaccaatgctgacatcatcgaggccctgcacaagaagcaccgggagtgtgagagccctgaggtggatgaggtgtttgccctgaccccccagacagaggagaagtacaagaagattgatgaggagtttgacaagatgatgcagagctaccgcctggccagcacagtgcctgcccccaactttgccatgcctgtgacagtgcctgtgagcaaccagagcagcctgcagttcagcaaccccagcggcagcctggtgacccccagcctggtgaccagcagcctgacagacccccggctgctgagcccccagcagcctgccctgcagagaaattctgtgtccccaggcctgccccagaggcctgccagcgctggggccatgctgggcggggacctgaacagcgccaatggagcctgccccagccctgtgggcaatggctacgtgtctgcccgggccagccctggcctgctgcctgtggccaacggcaacagcctgaacaaggtgatcccagccaagagccccccaccacccacccacagcacccagctgggcgcccccagcaggaagccagacctgcgggtcatcaccagccaggccggcaagggcctgatgcaccacctgaacaatgcccagaggctgggcgtgtcccagagcacccacagcctgaccacccctgtggtgtctgtggccacccccagcctgctgagccagggcctgcccttcagctccatgcccacagcctacaacacagactaccagctgaccagcgctgagctgagcagcctgcctgccttcagcagccctgggggcctgagcctgggcaatgtgacagcctggcagcagccccagcagccccagcagccccagcagccccagcccccccagcagcagcccccccagccccagcagccccagccccagcagccccagcagccccagcagcccccccagcagcagagccacctggtgcctgtgtccctgagcaacctgatccctggcagccccctgccccacgtgggcgccgccctgactgtgaccacccacccccacatcagcatcaagtctgagcctgtgagccccagccgggagaggagccctgcccctcctcctcctgctgtgtttcctgctgcccggcctgagcctggagatggcctgagcagccctgctgggggcagctatgagaccggggacagagatgatggccgcggggactttggccccaccctgggcctgctgcggcctgcccctgagcctgaggccgagggcagcgctgtgaagaggatgaggctggacacctggtag

SEQ ID NO: 286003 - DNA, 1668 bp, Artificial Sequence
  derived and/or modified sequence
gaggctgtgcagaaggtatcctgcagaccatgaactgagcactgttcccagaccgttcatgagcacagtgtaaggtgtgccgagacccaccacccagcgagcccctcccctccgtagcactgaggacccccggagaagatggggaggaaaaagattcagatccagcgaatcaccgacgagcggaaccgacaggtgactttcaccaagcggaagtttggcctgatgaagaaggcgtatgagctgagcgtgctatgtgactgcgagatcgcactcatcatcttcaaccactccaacaagctgttccagtacgccagcaccgacatggacaaggtgctgctcaagtacacggagtacaatgagccacacgagagccgcaccaacgccgacatcatcgaggcgctgcacaagaagcacagggaatgtgagagccctgaggtggacgaggtgtttgccctgaccccccagacggaagagaaatataaaaagatagacgaggagtttgataaaatgatgcagagttatagactggcctcaactgtcccggcccccaactttgccatgcctgtcacggtgcccgtgtccaatcagagctcactgcagttcagcaatcccagcggctccctggtcaccccttccctggtgacatcatccctcacggacccgcggctcctgtccccccagcagccagcactacagaggaacagtgtgtctcctggcctgccccagcggccagctagtgcgggggccatgctggggggtgacctgaacagtgctaacggagcctgccccagccctgttgggaatggctacgtcagtgctcgggcttcccctggcctcctccctgtggccaatggcaacagcctaaacaaggtcatccctgccaagtctccacccccacctacccacagcacccagcttggagcccccagccgcaagcccgacctgcgagtcatcacttcccaggcaggaaaggggttaatgcatcacttgaacaatgcccagcgccttggggtctcccagtctactcattcgctcaccaccccagtggtttctgtggcaacgccgagtttactcagccagggcctccccttctcttccatgcccactgcctacaacacagattaccagttgaccagtgcagagctctcctccttaccagcctttagttcacctggggggctgtcgctaggcaatgtcactgcctggcaacagccacagcagccccagcagccgcagcagccacagcctccacagcagcagccaccgcagccacagcagccacagccacagcagcctcagcagccgcaacagccacctcagcaacagtcccacctggtccctgtatctctcagcaacctcatcccgggcagccccctgccccacgtgggtgctgccctcacagtcaccacccacccccacatcagcatcaagtcagaaccggtgtccccaagccgtgagcgcagccctgcgcctccccctccagctgtgttcccagctgcccgccctgagcctggcgatggtctcagcagcccagccgggggatcctatgagacgggagaccgggatgacggacggggggacttcgggcccacactgggcctgctgcgcccagccccagagcctgaggctgagggctcagctgtgaagaggatgcggcttgatacctgg

SEQ ID NO: 286004 - DNA, 1533 bp, Artificial Sequence
  derived and/or modified sequence
atgggccggaagaagatccagatccagcggatcaccgacgagcggaatagacaggtgactttcaccaagagaaagttcggcctgatgaaaaaagcctatgagcttagcgtattgtgcgattgcgaaatcgcactgatcatatttaaccactctaacaaattgtttcagtacgcatccacagacatggacaaagtgctgcttaagtacaccgagtacaacgagccccatgaaagtcgcactaacgccgacatcatcgaagcgttgcacaagaagcatagggaatgcgagagtccagaggtggatgaggtgttcgctctgaccccacaaactgaggaaaagtacaaaaagatagacgaggaattcgataagatgatgcagtcttacagattggcgtcaactgttccagctccgaattttgcaatgccggtgactgttcccgtctcaaatcagtcttctttgcagtttagcaacccatctgggtccttggtgaccccctcgctggtgacctcttcgctaaccgacccgcgcttactgagccctcaacagccagcccttcagcggaactcagtgtccccaggtctcccgcagaggccggctagtgccggagctatgctggggggggatttaaactccgcaaatggtgcatgccctagtcctgttggtaacgggtatgtgagcgcacgcgcgagccccgggctccttccagtcgcgaatgggaactctctgaacaaagtaataccggctaaaagccccccgccaccgacacatagcacacagctgggtgctccgagtagaaagcctgatctcagagtaattaccagccaggcaggaaaaggccttatgcaccatcttaacaatgcccagagactgggagtatctcaatctacacactccctgaccacgccagtggtaagcgtcgccactccttccttactgagtcaaggcctgcccttctcatctatgccgacagcctacaacacagattatcaactgacctccgcggagctcagcagcctgcccgccttctcctcgcctggagggctgtccctgggtaacgtgaccgcctggcagcagccgcaacaacctcaacagccccaacagccgcagccccctcagcaacagcctccacaacctcagcagccacagccccagcagccgcagcaaccccagcagccccctcagcagcaatcccatctggttcccgtctcgctgtctaacttaatcccaggatctcccctgccccacgtgggcgcagctttgacggttactacacaccctcatatatctatcaaaagtgaacctgtgtctcctagtagggagcgctctcccgccccgcctcctcccgccgtgtttccagcagctaggcctgagccaggcgacgggctgtcttcgcctgccggtggctcctacgaaaccggcgatagggacgatgggcggggagacttcggacctactctaggcctgttgagacctgcccccgagccggaagcagagggcagcgccgtgaaaaggatgcggctcgatacttggtag

SEQ ID NO: 286005 - DNA, 1533 bp, Artificial Sequence
  derived and/or modified sequence
atggggcgaaagaaaatccagattcagcgtataacagacgaacgtaatcggcaggttaccttcaccaaacgcaaattcgggttaatgaaaaaggcctatgaactctccgttctttgcgattgcgagatcgccctgatcatctttaaccacagtaacaagttgtttcagtacgcttccacagatatggacaaagtgcttctgaaatacactgagtacaacgaaccacacgagtccagaaccaacgccgatatcattgaagcactccacaagaagcatcgagagtgcgagagcccggaggtggacgaggtcttcgctctgacacctcagacagaggaaaagtacaaaaagattgatgaagagtttgataagatgatgcagagctaccgcctcgcgtcaaccgttcctgcacctaactttgccatgccggtgacggtgccagtgtcaaatcagagctctctgcagtttagcaacccctctggcagcctggtcactccaagcttggtgacttcttccctgactgacccccgactattgtcaccccagcagccagccttgcagcgaaatagcgtcagtccagggttgccccaacgtccagccagtgctggcgcaatgctgggcggagatttgaatagcgcgaacggggcatgtccctctccagtagggaatgggtacgtgtccgccagagcctctcccggattactccctgttgcgaatggcaatagcctgaataaagtgatccctgcgaagagcccccctccacccacgcacagcacacagctgggcgcaccatctaggaagccggatttacgcgttattaccagtcaggccggtaagggcctgatgcaccatctgaataatgcacagcgcttaggcgtcagccagagtactcattcactcaccactcctgtggtctccgttgccacaccatccctgctctcccaggggctgccattttcttcaatgccaacagcctataacaccgattaccagttaactagcgccgaactgtctagtctgcccgcttttagttccccgggaggcctgtcattgggcaacgtgaccgcctggcagcagccccaacagccacaacaacctcagcagccacagccacctcaacagcagccacctcagccccagcagccgcaacctcagcagccccagcagccgcaacagccccctcagcaacagagccatctggtgcccgtctctctgagcaacttaattccaggatctccactcccgcacgtgggtgccgcactgactgtcacaacacacccacatatttctatcaaatcagaacccgtttcaccaagtagggagcgcagccctgcgccacctcctcccgcagtgtttcccgctgcacgacctgaacctggcgatggtctgagcagccccgcaggagggtcttacgagactggtgacagggatgacggtagaggggattttggaccgacattggggttgctccggcctgccccagagccggaggcagagggctccgcagtgaaaagaatgcgcttggacacatggtag

SEQ ID NO: 286006 - DNA, 1533 bp, Artificial Sequence
  derived and/or modified sequence
atgggcagaaagaagatccagatccagagaatcaccgacgagagaaacagacaggtgaccttcaccaagagaaagttcggcctgatgaagaaggcctacgagctgagcgtgctgtgcgactgcgagatcgccctgatcatcttcaaccacagcaacaagctgttccagtacgccagcaccgacatggacaaggtgctgctgaagtacaccgagtacaacgagccccacgagagcagaaccaacgccgacatcatcgaggccctgcacaagaagcacagagagtgcgagagccccgaggtggacgaggtgttcgccctgaccccccagaccgaggagaagtacaagaagatcgacgaggagttcgacaagatgatgcagagctacagactggccagcaccgtgcccgcccccaacttcgccatgcccgtgaccgtgcccgtgagcaaccagagcagcctgcagttcagcaaccccagcggcagcctggtgacccccagcctggtgaccagcagcctgaccgaccccagactgctgagcccccagcagcccgccctgcagagaaacagcgtgagccccggcctgccccagagacccgccagcgccggcgccatgctgggcggcgacctgaacagcgccaacggcgcctgccccagccccgtgggcaacggctacgtgagcgccagagccagccccggcctgctgcccgtggccaacggcaacagcctgaacaaggtgatccccgccaagagcccccccccccccacccacagcacccagctgggcgcccccagcagaaagcccgacctgagagtgatcaccagccaggccggcaagggcctgatgcaccacctgaacaacgcccagagactgggcgtgagccagagcacccacagcctgaccacccccgtggtgagcgtggccacccccagcctgctgagccagggcctgcccttcagcagcatgcccaccgcctacaacaccgactaccagctgaccagcgccgagctgagcagcctgcccgccttcagcagccccggcggcctgagcctgggcaacgtgaccgcctggcagcagccccagcagccccagcagccccagcagccccagcccccccagcagcagcccccccagccccagcagccccagccccagcagccccagcagccccagcagcccccccagcagcagagccacctggtgcccgtgagcctgagcaacctgatccccggcagccccctgccccacgtgggcgccgccctgaccgtgaccacccacccccacatcagcatcaagagcgagcccgtgagccccagcagagagagaagccccgccccccccccccccgccgtgttccccgccgccagacccgagcccggcgacggcctgagcagccccgccggcggcagctacgagaccggcgacagagacgacggcagaggcgacttcggccccaccctgggcctgctgagacccgcccccgagcccgaggccgagggcagcgccgtgaagagaatgagactggacacctggtag

SEQ ID NO: 286007 - protein, 255 aa, Artificial Sequence
  derived and/or modified sequence
MEQYANNLEELVEERTQAYLEEKRKAEALLYQILPHSVAEQLKRGETVQAEAFDSVTIYFSDIVGFTALSAESTPMQVVTLLNDLYTCFDAVIDNFDVYKVETIGDAYMVVSGLPVRNGRLHACEVARMALALLDAVRSFRIRHRPQEQLRLRIGIHTGPVCAGVVGLKMPRYCLFGDTVNTASRMESNGEALKIHLSSETKAVLEEFGGFELELRGDVEMKVEGEASALPTFWGPRGSYPSQAANATPIPKALI

SEQ ID NO: 286008 - DNA, 1674 bp, Artificial Sequence
  derived and/or modified sequence
aatgtgggcttggagtcacattcagagcctctgaggcagaggggtgcctgcggtctgttcccagggagccgggcctagggtctgttcctgggaaggatctgttccgtggggcccgctggagccgcgttttcaatatgcaaagtgccggtgctgtgcagacctcggtggtggtggttttgcatgcagaagtgaaattcagaaggccgcgtgtgagcacgtggttttgagtatccgaggagcccaggaggaggaacccacagacccccagctgatgcggctggacaacatgctgttagcggaaggcgtggcggggcctgagaagggcggagggtcggcggcagcggcggcagcggcggcggcttctggaggggcaggttcagacaactcagtggagcattcagattacagagccaaactctcacagatcagacaaatctaccatacggagctggagaaatacgagcaggcctgcaacgagttcaccacccacgtgatgaatctcctgcgagagcaaagccggaccaggcccatctccccaaaggagattgagcggatggtcagcatcatccaccgcaagttcagctccatccagatgcagctcaagcagagcacgtgcgaggcggtgatgatcctgcgttcccgatttctggatgcgcggcggaagagacggaatttcaacaagcaagcgacagaaatcctgaatgaatatttctattcccatctcagcaacccttaccccagtgaggaagccaaagaggagttagccaagaagtgtggcatcacagtctcccaggtatcaaactggtttggaaataagcgaatccggtacaagaagaacataggtaaatttcaagaggaagccaatatttatgctgccaaaacagctgtcactgctaccaatgtgtcagcccatggaagccaagctaactcgccctcaactcccaactcggctggttcttccagttcttttaacatgtcaaactctggagatttgttcatgagcgtgcagtcactcaatggggattcttaccaaggggcccaggttggagccaacgtgcaatcacaggtggatacccttcgccatgttatcagccagacaggaggatacagtgatggactcgcagccagtcagatgtacagtccgcagggcatcagtgctaatggaggttggcaggatgctactaccccttcatcagtgacctcccctacagaaggccctggcagtgttcactctgatacctccaactgatctcccagcaatcgcatcccggctgaccctgtgccccagttggggcaggggcaggagggagggtttctctcccaacgctgaagcggtcagactggaggtcgaagcaatcagcaaacacaataagagtctccttctcttctcttctttgggatgctatttcagccaatctggacacttctttatactctcttcccttttttttctgggtagaagccacccttccctgcctccagctgtcagcctggttttcgtcatcttccctgcccctgtgcctctgtcctagactcccggggtccccgccctctctcatatcactgaaggatattttcaacaattagaggaatttaaagaggaaaaaaattacaaagaaaataataaaagtgtttgtacgttttcatgctggtggtttgaggagccaaatttac

SEQ ID NO: 286009 - DNA, 1804 bp, Artificial Sequence
  derived and/or modified sequence
agagtactctcctctgcttctacctccgggaaccccgttaccccccagcccacacaccaccaccccagttttgggtggggagaaggcaaagagtgggaagataagaacacatgtagagatgataaaatgtcattggctccaagagacaagcttccgaaatccatggtggttgaagaacatcaaagaggagcaattatttcagtcattagggcagttccacctgttctaattgaacatttttaggatgtagaagatgcatcatacattggtatctattcagaaggtggggacatctgctgtctgtcatgtatctgggagatgtttatctcaacaggaggcaataataatatgttttgagtatccgaggagcccaggaggaggaacccacagacccccagctgatgcggctggacaacatgctgttagcggaaggcgtggcggggcctgagaagggcggagggtcggcggcagcggcggcagcggcggcggcttctggaggggcaggttcagacaactcagtggagcattcagattacagagccaaactctcacagatcagacaaatctaccatacggagctggagaaatacgagcaggcctgcaacgagttcaccacccacgtgatgaatctcctgcgagagcaaagccggaccaggcccatctccccaaaggagattgagcggatggtcagcatcatccaccgcaagttcagctccatccagatgcagctcaagcagagcacgtgcgaggcggtgatgatcctgcgttcccgatttctggatgcgcggcggaagagacggaatttcaacaagcaagcgacagaaatcctgaatgaatatttctattcccatctcagcaacccttaccccagtgaggaagccaaagaggagttagccaagaagtgtggcatcacagtctcccaggtatcaaactggtttggaaataagcgaatccggtacaagaagaacataggtaaatttcaagaggaagccaatatttatgctgccaaaacagctgtcactgctaccaatgtgtcagcccatggaagccaagctaactcgccctcaactcccaactcggctggttcttccagttcttttaacatgtcaaactctggagatttgttcatgagcgtgcagtcactcaatggggattcttaccaaggggcccaggttggagccaacgtgcaatcacaggtggatacccttcgccatgttatcagccagacaggaggatacagtgatggactcgcagccagtcagatgtacagtccgcagggcatcagtgctaatggaggttggcaggatgctactaccccttcatcagtgacctcccctacagaaggccctggcagtgttcactctgatacctccaactgatctcccagcaatcgcatcccggctgaccctgtgccccagttggggcaggggcaggagggagggtttctctcccaacgctgaagcggtcagactggaggtcgaagcaatcagcaaacacaataagagtctccttctcttctcttctttgggatgctatttcagccaatctggacacttctttatactctcttcccttttttttctgggtagaagccacccttccctgcctccagctgtcagcctggttttcgtcatcttccctgcccctgtgcctctgtcctagactcccggggtccccgccctctctcatatcactgaaggatattttcaacaattagaggaatttaaagaggaaaaaaattacaaagaaaataataaaagtgtttgtacgttttcatgctggtggtttgaggagccaaatttac

SEQ ID NO: 286010 - protein, 368 aa, Artificial Sequence
  derived and/or modified sequence
ARGGSGRCVARAMTGNAGEWCLMESDPGVFTELIKGFGCRGAQVEEIWSLEPENFEKLKPVHGLIFLFKWQPGEEPAGSVVQDSRLDTIFFAKQVINNACATQAIVSVLLNCTHQDVHLGETLSEFKEFSQSFDAAMKGLALSNSDVIRQVHNSFARQQMFEFDTKTSAKEEDAFHFVSYVPVNGRLYELDGLREGPIDLGACNQDDWISAVRPVIEKRIQKDGFSPCCPGWSQTPELKPSACLDLPKWYSEGEIRFNLMAIVSDRKMIYEQKIAELQRQLAEEEPMDTDQGNSMLSAIQSEVAKNQMLIEEEVQKLKRYKIENIRRKHNYLPFIMELLKTLAEHQQLIPLVEKAKEKQNAKKAQETK

SEQ ID NO: 286011 - protein, 165 aa, Artificial Sequence
  derived and/or modified sequence
MVRPGLARMSLPRCWFRYPGWTGAEAGRGRAIVSRRLPSLNPWDAGERHGGLVRICASLGPHKRLPAGLPQCPHLYLAADPLDPQRRQEKSCAALGNDKRRQPDGQRQPQQQQQPHCRRGFQAPALPNPLRVLQGLGRVSMSLGWLERPPALSRAAGCRGAQVEE

SEQ ID NO: 286012 - DNA, 498 bp, Artificial Sequence
  derived and/or modified sequence
atggtgagacccggcctggccagaatgagcctgcccagatgctggttcagataccccggctggaccggcgccgaggccggcagaggcagagccatcgtgagcagaagactgcccagcctgaacccctgggacgccggcgagagacacggcggcctggtgagaatctgcgccagcctgggcccccacaagagactgcccgccggcctgccccagtgcccccacctgtacctggccgccgaccccctggacccccagagaagacaggagaagagctgcgccgccctgggcaacgacaagagaagacagcccgacggccagagacagccccagcagcagcagcagccccactgcagaagaggcttccaggcccccgccctgcccaaccccctgagagtgctgcagggcctgggcagagtgagcatgagcctgggctggctggagagaccccccgccctgagcagagccgccggctgcagaggcgcccaggtggaggagtag

SEQ ID NO: 286013 - DNA, 498 bp, Artificial Sequence
  derived and/or modified sequence
atggtgcgcccaggcctagccagaatgtctctgccacgttgctggtttcgctatcccggctggaccggagctgaagctggtcgcgggagagccatcgtgtcaaggcggctgccctcccttaatccttgggacgcaggcgagcgccatgggggccttgtgcgtatctgtgcatcccttgggccgcataaacgcctgccagcaggtctgcctcagtgtccccatctgtatttagcagcagatcctctcgacccacagagacgtcaggagaagtcttgcgctgctcttgggaacgacaaacgccggcagcccgacgggcaacgtcagccccagcagcagcagcagccacactgccgacgaggctttcaggctcccgcactccctaaccctctgagagtgttgcaaggcctgggccgggtatcgatgtctctggggtggttggaaaggcctcccgccctcagccgcgcggcggggtgcagaggcgcacaggttgaagaatag

SEQ ID NO: 286014 - DNA, 498 bp, Artificial Sequence
  derived and/or modified sequence
atggtgcggcccggcctggccaggatgagcctgccccgctgctggttccgctacccaggctggacaggagctgaggccggccggggccgggccatcgtgtcccggcggctgcccagcctgaacccctgggatgctggggagagacatggaggcctggtgcgcatctgtgccagcctgggcccccacaagaggctgcctgctggcctgccccagtgcccccacctgtacctggccgctgaccccctggacccccagaggcggcaggagaagagctgtgccgccctgggcaatgacaagaggcggcagccagatggccagaggcagccccagcagcagcagcagccccactgccggcggggcttccaggccccagccctgcccaaccccctgcgggtgctgcagggcctgggccgggtgtccatgagcctgggctggctggagcggcccccagccctgagcagagctgctggctgccgcggggcccaggtggaggagtag

SEQ ID NO: 286015 - DNA, 498 bp, Artificial Sequence
  derived and/or modified sequence
atggtgcggcccggcctggcccggatgagcctgccccggtgctggtttcgttaccccgggtggacaggcgctgaagcgggcagagggagggcgatcgtcagtcgacgccttccctccctgaatccttgggacgccggggagcgccacggaggcctggtgaggatctgcgcgtcactcggccctcacaaacgccttcccgccggcctgccccagtgtccccacctctatctggctgccgatcctcttgaccctcagcgtcgccaagagaagtcatgtgctgccctcggaaacgataagcgccgacagccagatggacagaggcagccccagcagcaacagcaacctcactgtcggcggggtttccaggctcccgccctccccaatcctctgagagttttacagggccttggtcgcgtgagcatgagcctggggtggctagaacgaccacctgcgctgagccgcgctgcaggctgtagaggagcccaggtcgaggagtag

SEQ ID NO: 286016 - DNA, 498 bp, Artificial Sequence
  derived and/or modified sequence
atggttaggcccggactggcaaggatgtccctgccaaggtgctggttccggtaccccggatggacaggcgctgaggctgggaggggccgtgcaattgtaagtagaagactcccttcccttaacccttgggatgccggagagaggcatggcggactcgtgagaatctgcgcgagcctaggccctcacaagcggctgccagctggtttgccacaatgtccacacctgtatttggcggctgatcccttggatccccagcgcagacaggaaaagagctgcgccgcactaggaaatgataagcggaggcagccggatggccagcggcagccccagcagcagcagcaaccacactgccgcaggggattccaggccccagcgttgcctaatcccctccgggtgctacagggacttggacgcgtgagtatgagcctcggctggctggagcgccctcccgctttgagccgggctgccggttgtcgaggcgcacaggttgaggaatag

SEQ ID NO: 286017 - DNA, 577 bp, Artificial Sequence
  derived and/or modified sequence
aggccctctcgacgtcggcctgtggggagcgatgccgacaagcaggagcggtcccggcttcggaaagggcccaccctgaggaatggtccggccgggcctagcgaggatgtccctaccgcgatgctggttccgttacccagggtggacaggcgcggaagcgggacggggaagagcgatagtttcgcggcgtttgcccagcctcaacccctgggatgcgggtgagagacatggaggactggtcagaatttgcgcgtccctggggccgcacaaaaggctcccagccggcctcccgcaatgtcctcacctgtacctggcagccgaccccctggatccgcagcgccgccaggagaagtcctgcgcagcgctgggaaacgacaaaagaaggcagcctgacgggcagcgacagccacagcaacagcaacagccccactgccgccggggattccaggccccagcccttccgaatccgctacgggtgctgcaaggcctgggaagagtttcgatgtctctagggtggctagagcgtcctcccgcgctcagtcgcgctgcaggttgccgaggagcccaagtagaagaa

SEQ ID NO: 286018 - protein, 350 aa, Artificial Sequence
  derived and/or modified sequence
MEVPNVKDFQWKRLAPLPSRRVYCSLLETGGQVYAIGGCDDNGVPMDCFEVYSPEADQWTALPRLPTARAGVAVTALGKRIMVIGGVGTNQLPLKVVEMYNIDEGKWKKRSMLREAAMGISVTAKDYRVYAAGGMGLDLRPHNHLQHYDMLKDMWVSLAPMPTPRYAATSFLRGSKIYVLGGRQSKYAVNAFEVFDIETRSWTKFPNIPYKRAFSSFVTLDNHLYSLGGLRQGRLYRQPKFLRTMDVFDMEQGGWLKMERSFFLKKRRADFVAGSLSGRVIVAGGLGNQPTVLETAEAFHPGKNKWEILPAMPTPRCACSSIVVKNCLLAVGGVNQGLSDAVEALCVSDS

SEQ ID NO: 286019 - protein, 237 aa, Artificial Sequence
  derived and/or modified sequence
MIAGCRSFSLQSDYRVYAAGGMGLDLRPHNHLQHYDMLKDMWVSLAPMPTPRYAATSFLRGSKIYVLGGRQSKYAVNAFEVFDIETRSWTKFPNIPYKRAFSSFVTLDNHLYSLGGLRQGRLYRQPKFLRTMDVFDMEQGGWLKMERSFFLKKRRADFVAGSLSGRVIVAGGLGNQPTVLETAEAFHPGKNKWEILPAMPTPRCACSSIVVKNCLLAVGGVNQGLSDAVEALCVSDS

SEQ ID NO: 286020 - DNA, 1053 bp, Artificial Sequence
  derived and/or modified sequence
atggaggtgcccaacgtgaaggacttccagtggaagagactggcccccctgcccagcagaagagtgtactgcagcctgctggagaccggcggccaggtgtacgccatcggcggctgcgacgacaacggcgtgcccatggactgcttcgaggtgtacagccccgaggccgaccagtggaccgccctgcccagactgcccaccgccagagccggcgtggccgtgaccgccctgggcaagagaatcatggtgatcggcggcgtgggcaccaaccagctgcccctgaaggtggtggagatgtacaacatcgacgagggcaagtggaagaagagaagcatgctgagagaggccgccatgggcatcagcgtgaccgccaaggactacagagtgtacgccgccggcggcatgggcctggacctgagaccccacaaccacctgcagcactacgacatgctgaaggacatgtgggtgagcctggcccccatgcccacccccagatacgccgccaccagcttcctgagaggcagcaagatctacgtgctgggcggcagacagagcaagtacgccgtgaacgccttcgaggtgttcgacatcgagaccagaagctggaccaagttccccaacatcccctacaagagagccttcagcagcttcgtgaccctggacaaccacctgtacagcctgggcggcctgagacagggcagactgtacagacagcccaagttcctgagaaccatggacgtgttcgacatggagcagggcggctggctgaagatggagagaagcttcttcctgaagaagagaagagccgacttcgtggccggcagcctgagcggcagagtgatcgtggccggcggcctgggcaaccagcccaccgtgctggagaccgccgaggccttccaccccggcaagaacaagtgggagatcctgcccgccatgcccacccccagatgcgcctgcagcagcatcgtggtgaagaactgcctgctggccgtgggcggcgtgaaccagggcctgagcgacgccgtggaggccctgtgcgtgagcgacagctag

SEQ ID NO: 286021 - DNA, 714 bp, Artificial Sequence
  derived and/or modified sequence
atgatcgccggctgcagaagcttcagcctgcagagcgactacagagtgtacgccgccggcggcatgggcctggacctgagaccccacaaccacctgcagcactacgacatgctgaaggacatgtgggtgagcctggcccccatgcccacccccagatacgccgccaccagcttcctgagaggcagcaagatctacgtgctgggcggcagacagagcaagtacgccgtgaacgccttcgaggtgttcgacatcgagaccagaagctggaccaagttccccaacatcccctacaagagagccttcagcagcttcgtgaccctggacaaccacctgtacagcctgggcggcctgagacagggcagactgtacagacagcccaagttcctgagaaccatggacgtgttcgacatggagcagggcggctggctgaagatggagagaagcttcttcctgaagaagagaagagccgacttcgtggccggcagcctgagcggcagagtgatcgtggccggcggcctgggcaaccagcccaccgtgctggagaccgccgaggccttccaccccggcaagaacaagtgggagatcctgcccgccatgcccacccccagatgcgcctgcagcagcatcgtggtgaagaactgcctgctggccgtgggcggcgtgaaccagggcctgagcgacgccgtggaggccctgtgcgtgagcgacagctag

SEQ ID NO: 286022 - DNA, 1053 bp, Artificial Sequence
  derived and/or modified sequence
atggaagtgcccaacgtgaaagactttcagtggaagaggctggccccgcttccctcccgtcgagtctattgttctctgctggagacaggcggacaggtctacgctattggggggtgtgatgacaatggagttcccatggactgctttgaagtttattccccagaagcggaccagtggaccgcccttcctagactccccactgctcgcgccggggtcgctgtgaccgccctcggtaaaagaattatggtgattgggggcgtcggaaccaatcaattgcctctgaaagtggtggaaatgtacaatatcgacgagggcaagtggaaaaagaggagcatgctgagggaagcagccatggggatatcagtgacagctaaggattacagggtctatgctgccggcgggatgggattagacctcagacctcacaatcacctccagcactacgacatgcttaaggatatgtgggtctccttggccccgatgccaacccctcgctacgctgccaccagcttcctgcgcggcagcaaaatctacgtgcttggcgggcggcaaagcaagtacgctgtgaatgcctttgaggtgtttgacattgaaactaggtcttggacaaagtttccaaacattccatataagagggctttttctagttttgtgacattggataatcacctttactctcttgggggtctgagacaaggaagactctatcgtcagcccaagtttctgagaactatggatgtttttgacatggaacagggtggatggctaaaaatggaacgtagctttttcctcaagaagcgccgggcggatttcgtcgccggtagcctcagcggaagggtgattgtcgctggcggactgggaaaccagcccacagtgttggaaaccgctgaggcttttcacccggggaagaacaagtgggagatcttaccagctatgcctacccctcgctgcgcctgttcaagcatcgttgtgaaaaattgccttctggctgtgggcggtgtaaatcaaggactgagtgacgcggtcgaggcactatgtgtgtctgactcatag

SEQ ID NO: 286023 - DNA, 1053 bp, Artificial Sequence
  derived and/or modified sequence
atggaggtgcccaacgtgaaggactttcagtggaagcgccttgctccattacccagtcgacgcgtatattgctcacttctagaaacaggcggacaggtttacgccatcggtggatgcgacgacaacggtgtgccgatggattgtttcgaggtctactctccagaagccgatcagtggacagcccttccacgactccctaccgctagagcaggggtggctgtaactgcgctcggaaagcgcatcatggtgataggcggtgtgggtacgaaccaactccctctcaaagtcgtcgagatgtataacatcgatgaggggaagtggaaaaagaggtcgatgctgcgcgaggcagctatgggaatttccgtcaccgcaaaggattatagggtttatgctgcgggtggaatgggactggacctgcggccacataaccacctgcagcactatgacatgttaaaggatatgtgggtttccctggctccgatgccgactccccggtacgctgccacttctttccttcgtggcagtaagatctacgttctggggggacgccagagcaaatatgccgtgaacgccttcgaggtgttcgatatagagaccaggtcgtggacaaagttccccaatattccctacaaacgcgcgttttcctctttcgttaccctggacaatcacctgtattcactcgggggcctccggcaggggcgcttatatagacaaccaaagttcctgagaacgatggacgtgtttgatatggaacaggggggctggctcaagatggaacgaagttttttcctcaagaagcggagagctgatttcgtggccggttctctgtctggcagggtgatcgtggccggggggctaggaaaccagcccactgtcctggaaacagccgaggcatttcatcctggcaagaacaagtgggaaatcctcccagcgatgcccactccccggtgtgcctgttcctctattgttgtgaagaactgtcttcttgccgtcgggggagtcaatcaggggttatccgatgccgtggaagccctttgtgtctccgactcctag

SEQ ID NO: 286024 - DNA, 714 bp, Artificial Sequence
  derived and/or modified sequence
atgatagcagggtgtcggtctttcagcctgcagtctgactacagggtatacgccgctggcggtatgggcctcgatctgcgccctcataatcacctgcagcactatgatatgctgaaagacatgtgggttagcctggccccgatgcctacccctcgatacgccgcaacttcattccttagagggagcaaaatctatgtcctgggaggtaggcagtctaaatacgctgtgaatgcctttgaggtgtttgacatcgaaacacggagttggacgaagttccctaatatcccatataagcgggcatttagcagcttcgtcaccctcgacaatcacctctatagcctaggaggattaaggcaagggaggctgtataggcaaccgaagttccttaggaccatggacgtgtttgatatggaacaagggggctggcttaagatggaacgcagctttttcttgaaaaagagaagagctgatttcgtggcggggtccttgtccgggcgggttatcgtcgctgggggtctgggaaaccagccaactgtgctcgaaacagccgaggcatttcatcctggcaagaacaaatgggaaattctgccagctatgcctactcctcgctgtgcatgcagttctatcgtagtgaagaattgcctgctggcggttggaggtgtgaatcaggggctttccgatgccgttgaagccctgtgcgtctcagactcttag

SEQ ID NO: 286025 - DNA, 1053 bp, Artificial Sequence
  derived and/or modified sequence
atggaagtacctaacgtgaaggattttcagtggaagcgcctcgctcccctcccgtccagaagggtgtattgctctttactggaaacaggaggtcaggtttatgccatcggggggtgtgatgacaacggcgttccaatggactgcttcgaggtgtattctccagaggccgatcaatggactgcactgccacgattgcctacggccagggccggagtcgcagtgacagcgcttggcaaacgcatcatggtgattggtggggttgggacaaaccagctgcccctgaaagtcgtggagatgtacaatatcgatgagggtaaatggaagaaacgcagtatgttacgagaagctgccatgggtatcagcgtcactgctaaggactaccgcgtctatgcagcagggggaatggggctggacctgaggcctcataaccacctacagcattatgacatgctcaaagacatgtgggtgtcattggcacccatgccaaccccccggtacgcagccacaagctttctgagaggctcaaaaatttacgtacttggaggccggcagagtaagtatgctgtgaacgcctttgaagtgttcgatatcgaaacacgatcctggactaagttcccaaatatcccgtacaagcgcgctttctcatcctttgtgactctggacaatcacctgtactcccttggtggcctgagacagggtcgcctttatcgacagcctaagttcttgaggactatggatgtatttgacatggagcagggtgggtggcttaagatggagcgtagcttcttcctgaagaagcgacgcgctgattttgtggccggctccttatcagggcgggtgattgttgcaggcggacttggaaatcagcccactgtcctcgagaccgccgaagcttttcatccagggaagaacaaatgggaaattctgcccgcgatgccaacaccccggtgtgcgtgctccagcatagtggttaaaaactgtttactggccgttggcggcgtcaaccaggggctgtcagacgccgtcgaggccctttgcgtcagtgactcctag

SEQ ID NO: 286026 - DNA, 1053 bp, Artificial Sequence
  derived and/or modified sequence
atggaggtgcccaacgtgaaggacttccagtggaagaggctggcccccctgcccagccggcgggtgtactgcagcctgctggagactggaggccaggtgtatgccatcggcggctgtgatgacaacggggtgcccatggactgctttgaggtgtacagccctgaggccgaccagtggacagccctgccccggctgcccacagcccgggccggcgtggccgtgacagccctgggcaagaggatcatggtgattggaggagtgggcaccaaccagctgcccctgaaggtggtggagatgtacaacattgatgagggcaagtggaagaagaggtccatgctgcgggaggccgccatgggcatctctgtgacagccaaggactacagagtgtatgctgctgggggcatgggcctggacctgcggccccacaaccacctgcagcactatgacatgctgaaggacatgtgggtgtccctggcccccatgcccacccccaggtatgctgccaccagcttcctgcggggcagcaagatctacgtgctgggcggccggcagagcaaatatgctgtgaatgcctttgaggtgtttgatattgagaccaggtcctggaccaagttccccaacatcccctacaagagggccttcagcagctttgtgaccctggacaaccacctgtacagcctgggcggcctgcggcagggccgcctgtaccggcagcccaagttcctgcggaccatggatgtgtttgacatggagcagggcggctggctgaagatggagaggagcttcttcctgaagaagagaagagctgactttgtggccggcagcctgagcggccgggtgattgtggccggcggcctgggcaaccagcccaccgtgctggagacagctgaggccttccaccctgggaagaacaagtgggagatcctgcctgccatgcccaccccccgctgtgcctgcagcagcatcgtggtgaagaactgcctgctggccgtgggcggcgtgaaccagggcctgagtgatgctgtggaggccctgtgtgtgtctgacagctag

SEQ ID NO: 286027 - DNA, 714 bp, Artificial Sequence
  derived and/or modified sequence
atgattgctggctgccgctccttcagcctgcagagcgactacagagtgtatgctgctgggggcatgggcctggacctgcggccccacaaccacctgcagcactatgacatgctgaaggacatgtgggtgtccctggcccccatgcccacccccaggtatgctgccaccagcttcctgcggggcagcaagatctacgtgctgggcggccggcagagcaaatatgctgtgaatgcctttgaggtgtttgacatcgagaccaggtcctggaccaagttccccaacatcccctacaagagggccttcagcagctttgtgaccctggacaaccacctgtacagcctgggcggcctgcggcagggccgcctgtaccggcagcccaagttcctgcggaccatggatgtgtttgacatggagcagggcggctggctgaagatggagaggagcttcttcctgaagaagagaagagctgactttgtggccggcagcctgagcggccgggtcatcgtggccggcggcctgggcaaccagcccaccgtgctggagacagctgaggccttccaccctgggaagaacaagtgggagatcctgcctgccatgcccaccccccgctgtgcctgcagcagcatcgtggtgaagaactgcctgctggccgtgggcggcgtgaaccagggcctgagtgatgctgtggaggccctgtgtgtgtctgacagctag

SEQ ID NO: 286028 - DNA, 2928 bp, Artificial Sequence
  derived and/or modified sequence
ctttgcagctgagactgggtggagggagaggcgcggagacactggggctctgacgagctggctgaggccctctcagtaggggggtcacgcctcctggaactcagggaccccaagtttctgtgcattcagggcggggctggccccatgccctgtgcataggggcctggctgcatcccagtcgatcagccagaggcagcagcagtggactcatcaattgtggaggaagccctggggaccctggggaccttgccgactctattcccagccagctcctaggacaagcctcagagccaacacccgctcgaccctctcccggcccctccccttctttgtcttttgcagatgatcgccgggtgtcgatccttttccctccagtcagggccaggcgtggacgccgccggaccgctgagactcggggcacggtgaagcactggccggggtctggctgggtccggcgctcgggagccagatggaggtggcgataggggccgtgggagccggcgccaagtagccggtggacccccgcgctcgcacctctcccggcgcccgggcgctccccaaggctgccatggaggtgcctaacgtcaaggacttccagtggaagcgcctggcgccactgcccagccgccgggtctactgctccctgctggagaccgggggccaggtctatgccatcgggggatgtgacgacaacggcgtccccatggactgcttcgaggtctactccccggaggccgaccagtggaccgccttgccccggctgcccacagcccgggcgggggtggccgtcaccgccctggggaagcggatcatggtgattgggggcgtgggcaccaatcagctgcccctgaaggtcgtggagatgtacaacatcgatgagggcaagtggaagaagaggagcatgctgcgtgaggccgccatgggcatttctgtcacggccaaagattaccgagtatatgcggcaggcgggatgggcctggacctacgtccacacaaccacctccaacactatgacatgctgaaggacatgtgggtgtccctagcacccatgcccaccccgagatatgctgccacctccttcctccgaggctccaagatctacgtgctggggggacgacagtccaagtacgcggtcaacgctttcgaggtctttgacatcgagactcgctcctggaccaagtttcccaacattccctataagcgggccttctccagctttgtgaccctggacaaccacttgtacagcctaggaggcctgcggcaaggtcgcctctaccggcagcccaagttcctgcggacgatggacgtgttcgacatggaacaggggggatggctgaagatggaacgatcgttcttcctcaagaagcggcgggcagattttgtggctggctctctgagtggacgggtcatagtggctgggggacttgggaatcaacccactgtcctggagacggcggaagcattccacccagggaagaacaaatgggagatcctccctgccatgcccacaccccgctgtgcctgctccagcatagtcgtcaagaactgcctcctcgccgtgggaggtgtcaaccagggtctgagtgacgcagtggaggccctgtgtgtctctgactcctagctgtctctgggctcagtacctttgccctggaccatatcacttcactcttaacatgaggaatgatcttgtccaagcagtcggggctacttccaagaatgtcagctcctgttagcaaccagtggagtctggccttggggctctaagttgacctctctatagctccaaatcctaccaatctcagaaaactgtaagaggcacagatgactccaccagctgcagagctgactctgaagagagtcttcacttactgcacaggcaaagaaaggcacaggaatatttcctacctctccctcctgtgagtcccacctccccccacccccatctccaggaggcaggtagagcagttctgaccgagaggatagactgctgttgctgtctttccccagctctgaactagttttaaggtagcttaggatgaaaaatggagaatgattgggggttccaaaccactttcttctcccttggcttatatctcttcaccatttggtggtcaactgtgggcctaccctggacctcatctactcagcgagaattggacatgaagctagaggcagctgccttggaagggaagtcaggctcacttggacagcccaggccatggcaggaagaatcccttcctcttggggtccttgatgggcatgtgtgatggggaaggagcagtctcccagccctgggtctgctccccacatctctcctaattccacttcaccttttgccaccccctccccaccagaggcctagcccttttgtcaccgaaggcccccagagtgtttctgtgtgaaaccctctcatttacactgtggcatcaaaatccacaaaagatggattaattgcactctggttaatagcagcagcacaatgattaaaatctatattcctatcttctctagcaccctggtgtggggatggggcggaagggtgtcttgaggggcagggaggaccccataaaacaatccctcctgcattctcaggctaaatagggcccccagtgactacctgttcttggctgtcccctctgaagagctctgccttctcacagccaccaccagttgccccactcccaggaaaacagcacatgttcttcttctcctgccttgagactgcgtgttagtcttccattcataactcatcagcagctcagtccttcttatgtctagtctcagttcattcagccaaagctcatttttgtcctatccaaagtagaaagggttcttttagaaaacttgaagaatgtgcctcctcttagcatctgtttctgactcccagttatttttaaaataaatgatgaataaaatgcctgccctgaa

SEQ ID NO: 286029 - DNA, 3177 bp, Artificial Sequence
  derived and/or modified sequence
ttctctcccatctggcagaggagtccggctccctaaatcttctttttgttgatgatcgccgggtgtcgatccttttccctccagtcagatgaggacactcagattcaaggacataagtgactggtgcataatcacacagctaggaggtggctgcaccaggattcagatgcagcctgtctgatgctgaccacatggtctgtggggtgctgcagaaagaaaactgcataaagaaggtgatcctggcctcggggagttcctggtgtgtgcctccagccagcgtggtaccctgcagagggcactccgacaaggtgagcgcttccgcggcggggcttctgtacagaggtcacagcacgctgtgtcccgggacgcacgcggattcctgcacaggtgtggtggctgcggatggggacggagcggagcaggctcgccggcctcctccccggcggcggctccgcttctccttcctgctgttcacttcatctcctcatctgcatgtgtgacagcggcgcgcggactggggaaggacagagcgccctctccccggctcccgtgcagcggggcgggggctccgggctccccagtgatgcgtcgtctgcgcctcgccgccgcgctccccgggcctggcagcggccaggcgtggacgccgccggaccgctgagactcggggcacggtgaagcactggccggggtctggctgggtccggcgctcgggagccagatggaggtggcgataggggccgtgggagccggcgccaagtagccggtggacccccgcgctcgcacctctcccggcgcccgggcgctccccaaggctgccatggaggtgcctaacgtcaaggacttccagtggaagcgcctggcgccactgcccagccgccgggtctactgctccctgctggagaccgggggccaggtctatgccatcgggggatgtgacgacaacggcgtccccatggactgcttcgaggtctactccccggaggccgaccagtggaccgccttgccccggctgcccacagcccgggcgggggtggccgtcaccgccctggggaagcggatcatggtgattgggggcgtgggcaccaatcagctgcccctgaaggtcgtggagatgtacaacatcgatgagggcaagtggaagaagaggagcatgctgcgtgaggccgccatgggcatttctgtcacggccaaagattaccgagtatatgcggcaggcgggatgggcctggacctacgtccacacaaccacctccaacactatgacatgctgaaggacatgtgggtgtccctagcacccatgcccaccccgagatatgctgccacctccttcctccgaggctccaagatctacgtgctggggggacgacagtccaagtacgcggtcaacgctttcgaggtctttgacatcgagactcgctcctggaccaagtttcccaacattccctataagcgggccttctccagctttgtgaccctggacaaccacttgtacagcctaggaggcctgcggcaaggtcgcctctaccggcagcccaagttcctgcggacgatggacgtgttcgacatggaacaggggggatggctgaagatggaacgatcgttcttcctcaagaagcggcgggcagattttgtggctggctctctgagtggacgggtcatagtggctgggggacttgggaatcaacccactgtcctggagacggcggaagcattccacccagggaagaacaaatgggagatcctccctgccatgcccacaccccgctgtgcctgctccagcatagtcgtcaagaactgcctcctcgccgtgggaggtgtcaaccagggtctgagtgacgcagtggaggccctgtgtgtctctgactcctagctgtctctgggctcagtacctttgccctggaccatatcacttcactcttaacatgaggaatgatcttgtccaagcagtcggggctacttccaagaatgtcagctcctgttagcaaccagtggagtctggccttggggctctaagttgacctctctatagctccaaatcctaccaatctcagaaaactgtaagaggcacagatgactccaccagctgcagagctgactctgaagagagtcttcacttactgcacaggcaaagaaaggcacaggaatatttcctacctctccctcctgtgagtcccacctccccccacccccatctccaggaggcaggtagagcagttctgaccgagaggatagactgctgttgctgtctttccccagctctgaactagttttaaggtagcttaggatgaaaaatggagaatgattgggggttccaaaccactttcttctcccttggcttatatctcttcaccatttggtggtcaactgtgggcctaccctggacctcatctactcagcgagaattggacatgaagctagaggcagctgccttggaagggaagtcaggctcacttggacagcccaggccatggcaggaagaatcccttcctcttggggtccttgatgggcatgtgtgatggggaaggagcagtctcccagccctgggtctgctccccacatctctcctaattccacttcaccttttgccaccccctccccaccagaggcctagcccttttgtcaccgaaggcccccagagtgtttctgtgtgaaaccctctcatttacactgtggcatcaaaatccacaaaagatggattaattgcactctggttaatagcagcagcacaatgattaaaatctatattcctatcttctctagcaccctggtgtggggatggggcggaagggtgtcttgaggggcagggaggaccccataaaacaatccctcctgcattctcaggctaaatagggcccccagtgactacctgttcttggctgtcccctctgaagagctctgccttctcacagccaccaccagttgccccactcccaggaaaacagcacatgttcttcttctcctgccttgagactgcgtgttagtcttccattcataactcatcagcagctcagtccttcttatgtctagtctcagttcattcagccaaagctcatttttgtcctatccaaagtagaaagggttcttttagaaaacttgaagaatgtgcctcctcttagcatctgtttctgactcccagttatttttaaaataaatgatgaataaaatgcctgccctgaa

SEQ ID NO: 286030 - DNA, 1442 bp, Artificial Sequence
  derived and/or modified sequence
attcagggcggggctggccccatgccctgtgcataggggcctggctgcatcccagtcgatcagccagaggcagcagcagtggactcatcaattgtggaggaagccctggggaccctggggaccttgccgactctattcccagccagctcctaggacaagcctcagagccaacacccgctcgaccctctcccggcccctccccttctttgtcttttgcagatgatcgccgggtgtcgatccttttccctccagtcagattaccgagtatatgcggcaggcgggatgggcctggacctacgtccacacaaccacctccaacactatgacatgctgaaggacatgtgggtgtccctagcacccatgcccaccccgagatatgctgccacctccttcctccgaggctccaagatctacgtgctggggggacgacagtccaagtacgcggtcaacgctttcgaggtctttgacatcgagactcgctcctggaccaagtttcccaacattccctataagcgggccttctccagctttgtgaccctggacaaccacttgtacagcctaggaggcctgcggcaaggtcgcctctaccggcagcccaagttcctgcggacgatggacgtgttcgacatggaacaggggggatggctgaagatggaacgatcgttcttcctcaagaagcggcgggcagattttgtggctggctctctgagtggacgggtcatagtggctgggggacttgggaatcaacccactgtcctggagacggcggaagcattccacccagggaagaacaaatgggagatcctccctgccatgcccacaccccgctgtgcctgctccagcatagtcgtcaagaactgcctcctcgccgtgggaggtgtcaaccagggtctgagtgacgcagtggaggccctgtgtgtctctgactcctagctgtctctgggctcagtacctttgccctggaccatatcacttcactcttaacatgaggaatgatcttgtccaagcagtcggggctacttccaagaatgtcagctcctgttagcaaccagtggagtctggccttggggctctaagttgacctctctatagctccaaatcctaccaatctcagaaaactgtaagaggcacagatgactccaccagctgcagagctgactctgaagagagtcttcacttactgcacaggcaaagaaaggcacaggaatatttcctacctctccctcctgtgagtcccacctccccccacccccatctccaggaggcaggtagagcagttctgaccgagaggatagactgctgttgctgtctttccccagctctgaactagttttaaggtagcttaggatgaaaaatggagaatgattgggggttccaaaccactttcttctcccttggcttatatctcttcaccatttggtggtcaactgtgggcctaccct

SEQ ID NO: 286031 - DNA, 2169 bp, Artificial Sequence
  derived and/or modified sequence
agtgatgcgtcgtctgcgcctcgccgccgcgctccccgggcctggcagcggccaggcgtggacgccgccggaccgctgagactcggggcacggtgaagcactggccggggtctggctgggtccggcgctcgggagccagatggaggtggcgataggggccgtgggagccggcgccaagtagccggtggacccccgcgctcgcacctctcccggcgcccgggcgctccccaaggctgccatggaggtgcctaacgtcaaggacttccagtggaagcgcctggcgccactgcccagccgccgggtctactgctccctgctggagaccgggggccaggtctatgccatcgggggatgtgacgacaacggcgtccccatggactgcttcgaggtctactccccggaggccgaccagtggaccgccttgccccggctgcccacagcccgggcgggggtggccgtcaccgccctggggaagcggatcatggtgattgggggcgtgggcaccaatcagctgcccctgaaggtcgtggagatgtacaacatcgatgagggcaagtggaagaagaggagcatgctgcgtgaggccgccatgggcatttctgtcacggccaaagattaccgagtatatgcggcaggcgggatgggcctggacctacgtccacacaaccacctccaacactatgacatgctgaaggacatgtgggtgtccctagcacccatgcccaccccgagatatgctgccacctccttcctccgaggctccaagatctacgtgctggggggacgacagtccaagtacgcggtcaacgctttcgaggtctttgacatcgagactcgctcctggaccaagtttcccaacattccctataagcgggccttctccagctttgtgaccctggacaaccacttgtacagcctaggaggcctgcggcaaggtcgcctctaccggcagcccaagttcctgcggacgatggacgtgttcgacatggaacaggggggatggctgaagatggaacgatcgttcttcctcaagaagcggcgggcagattttgtggctggctctctgagtggacgggtcatagtggctgggggacttgggaatcaacccactgtcctggagacggcggaagcattccacccagggaagaacaaatgggagatcctccctgccatgcccacaccccgctgtgcctgctccagcatagtcgtcaagaactgcctcctcgccgtgggaggtgtcaaccagggtctgagtgacgcagtggaggccctgtgtgtctctgactcctagctgtctctgggctcagtacctttgccctggaccatatcacttcactcttaacatgaggaatgatcttgtccaagcagtcggggctacttccaagaatgtcagctcctgttagcaaccagtggagtctggccttggggctctaagttgacctctctatagctccaaatcctaccaatctcagaaaactgtaagaggcacagatgactccaccagctgcagagctgactctgaagagagtcttcacttactgcacaggcaaagaaaggcacaggaatatttcctacctctccctcctgtgagtcccacctccccccacccccatctccaggaggcaggtagagcagttctgaccgagaggatagactgctgttgctgtctttccccagctctgaactagttttaaggtagcttaggatgaaaaatggagaatgattgggggttccaaaccactttcttctcccttggcttatatctcttcaccatttggtggtcaactgtgggcctaccctggacctcatctactcagcgagaattggacatgaagctagaggcagctgccttggaagggaagtcaggctcacttggacagcccaggccatggcaggaagaatcccttcctcttggggtccttgatgggcatgtgtgatggggaaggagcagtctcccagccctgggtctgctccccacatctctcctaattccacttcaccttttgccaccccctccccaccagaggcctagcccttttgtcaccgaaggcccccagagtgtttctgtgtgaaaccctctcatttacactgtggcatcaaaatccacaaaagatggattaattgcactctggttaatagcagcagcacaatgattaaaatctatattcc

SEQ ID NO: 286032 - DNA, 1053 bp, Artificial Sequence
  derived and/or modified sequence
atggaggtgcccaacgtgaaggacttccagtggaagcggctggcccccctgcccagtaggcgggtatactgttccctcctcgaaactggtgggcaggtgtacgcgataggaggatgtgatgataatggggtgccaatggactgcttcgaggtatactccccagaagctgatcagtggactgctctccctcgcctgccaaccgctcgcgccggcgtggctgtgacagccctgggaaaacgcatcatggtcattggaggcgtgggtactaatcaactgccactgaaggttgtggaaatgtataacatcgacgagggaaagtggaagaagagaagcatgttaagggaggctgctatggggatatcagtgactgctaaggactaccgtgtatacgccgccggaggcatgggattagacctacgcccccataaccaccttcaacactacgacatgttgaaggacatgtgggtctctcttgccccaatgcctaccccaagatatgctgctacctccttccttagagggtcaaaaatctacgtgctaggcgggcgccagtcaaagtacgccgtgaacgcatttgaggtgttcgacattgaaaccaggtcttggacgaaatttccaaatataccatataagagggctttcagcagctttgtgacattggataaccatctgtactcactaggcgggctccgccagggcaggctgtacagacagccaaaatttctccggactatggatgtgttcgatatggagcaggggggctggcttaagatggagcggagctttttcctgaagaagcggagggctgattttgtagccggatcactttctggtcgggtgatagtggcgggcgggttgggaaaccagcctaccgttttggagacagctgaagccttccatcccgggaaaaataaatgggagattctgccggcaatgcctacaccaagatgtgcctgttcctctatcgttgtgaaaaactgtttgcttgcagtcggcggcgtgaatcagggtttgtctgacgctgtcgaagcactttgcgtaagcgacagctag

SEQ ID NO: 286033 - DNA, 1053 bp, Artificial Sequence
  derived and/or modified sequence
atggaggtgcccaacgtgaaggacttccagtggaagcggctggcccctttaccttctagacgcgtttactgctccctgctcgaaaccggcggacaagtctacgctattggagggtgtgatgataacggcgtccccatggattgcttcgaggtgtactcacccgaggcagaccagtggacagcactcccacggctgcccaccgcccgggctggtgtggctgtgaccgcactcggtaaacggatcatggtcattggaggggtggggactaaccaacttccgctgaaagtcgtggagatgtacaatatagacgagggtaaatggaaaaagcggagcatgctgagagaagctgccatgggcatctcagttaccgccaaggactatcgtgtgtatgctgccggggggatgggtttggacctgcggcctcacaatcacttacagcattatgatatgctaaaggacatgtgggtcagcctcgctcctatgccaactccacgttacgccgcaacttccttcttgcgaggcagcaagatatatgtgctcggtggcagacagtccaaatacgctgtgaacgcgtttgaggtatttgatatcgaaactcggtcatggacgaagttccccaatattccttataagcgtgcctttagttcttttgttaccctggacaatcatctgtactccctgggtgggctgcgccagggacggctgtaccgtcaacctaagtttcttagaacaatggatgtgtttgatatggagcagggaggctggctgaagatggagagatcattctttctaaaaaaaaggagggccgacttcgtggctggctcacttagtggacgtgtcatcgtggccgggggtctgggaaaccagccaacagtgctggaaacagccgaggcatttcatccggggaaaaataaatgggagattctccctgcaatgccaacccccagatgtgcctgcagctccattgtggttaaaaattgcctacttgcggttggtggggtgaatcagggtctgagtgatgccgtagaagccctgtgtgtcagtgactcatag

SEQ ID NO: 286034 - DNA, 714 bp, Artificial Sequence
  derived and/or modified sequence
atgatcgccggctgccggagcttcagcctgcagagcgactaccgggtatatgccgcggggggaatgggcttggatctgcggccccacaaccacctgcagcattatgacatgttaaaggacatgtgggtgtctctggcgcccatgccgaccccaaggtacgctgccacaagctttctgagagggagtaaaatctatgtcctgggtggccgccagagcaaatacgcagtgaatgccttcgaggtgttcgatattgagacgcggtcatggacaaaattccccaacattccgtacaagagagccttctcgagtttcgtgaccctggacaaccacctctattccttgggaggccttaggcaggggcgactttaccggcaacctaaatttttgaggaccatggacgtgttcgacatggaacaaggaggctggctcaagatggaaagaagcttcttcctcaagaagaggcgagctgatttcgtcgctgggagccttagtggtagagtgattgtggctggcggtctggggaaccagcctacggtgcttgaaacagcggaagcgttccatcccggaaaaaacaagtgggagatcctgcccgccatgcccacacctcggtgtgcttgttcttctatcgtcgtgaaaaactgtctactcgcagtaggtggcgtaaaccagggactgtcagatgcggtggaggcgctgtgtgtgtcagattcttag

SEQ ID NO: 286035 - DNA, 1053 bp, Artificial Sequence
  derived and/or modified sequence
atggaggtgcccaacgtgaaggacttccagtggaagcggctggccccactgccgagccgccgcgtgtattgtagcctacttgaaactggcggtcaagtgtacgcaattggagggtgtgatgacaacggagtcccaatggactgttttgaggtctattctcctgaagctgatcaatggacagcgctgccgcgcttgccaactgcccgggccggagttgctgttactgccctcggaaagcggatcatggttataggcggggtcggcaccaatcaactgcccttgaaagtggtggagatgtataacatcgatgagggcaaatggaaaaagagatctatgctgcgtgaagccgcgatggggatcagcgtgacggcaaaagactaccgggtctacgctgccgggggaatgggactagatctgaggccacataaccacctgcagcattatgatatgctcaaagatatgtgggtatccctcgcgccaatgccgacacccagatacgccgcaacaagcttcctgaggggctctaagatctacgtgctcggcggccgtcagtctaagtatgcggttaacgcttttgaagtgttcgacattgagacacgctcctggacaaaattccccaacatcccatataagcgagcttttagttcattcgtgaccctcgacaaccacctgtattcattaggcgggctccggcagggacgtctgtatcggcaaccgaagtttctgcgcaccatggacgtgttcgatatggagcagggcggatggctgaaaatggagcgctccttcttcttgaagaaaagaagggccgattttgtggccgggtccctctcgggaagggtaatagtcgctgggggcttgggtaaccagcctaccgtgctagaaactgccgaagccttccacccaggcaaaaataagtgggagattctgccggctatgcccactccccgatgtgcctgcagttccattgtggttaagaattgtctgctggccgtaggaggggtgaatcaggggcttagcgacgctgtcgaagccctctgcgtgagcgacagttag

SEQ ID NO: 286036 - DNA, 1053 bp, Artificial Sequence
  derived and/or modified sequence
atggaagtgcccaacgtgaaggactttcaatggaagcgcctggccccactgccgtcacgccgtgtttattgttctctgctggagactggcggacaggtctatgcaattggcggatgcgatgataatggcgtgccaatggattgtttcgaggtttatagtcctgaggcagaccagtggacagcacttccaagactgcccacggcgcgtgctggggtcgctgtgacagctcttggcaaacggattatggttattgggggagtgggcactaaccagctcccgcttaaggttgtggagatgtacaacatagacgaagggaagtggaagaaacggtctatgttgcgcgaggctgctatgggcatatcggtgacagctaaggattatagagtttatgccgcaggcggaatgggtctagatctgcggccacataatcacctgcaacattacgatatgctgaaggatatgtgggtgagcctcgccccaatgccaacgcctcgatatgctgccacgagtttcctcaggggatccaagatttatgtgctgggtggaagacaatccaagtatgcagtcaacgcatttgaggtgtttgatatcgaaacccgctcctggacaaagtttccaaacatcccctataaaagggcgttctcctcgttcgtgactctggataatcacctgtatagcctgggcggactgaggcagggccgactgtacaggcaaccaaagtttctacgtactatggacgtctttgatatggaacagggaggttggctgaaaatggaaaggtccttttttctaaaaaagagacgggctgacttcgtagccggttcactgagcggccgagtcatcgtggccggaggtctaggcaatcaaccaacagtcctcgagacagccgaagcttttcatcctggaaagaacaaatgggaaattctgccggcaatgccaactcctagatgcgcctgtagctctattgtcgtgaagaactgtctcttggccgtcggcggagtaaaccagggactcagtgatgcggtcgaggccttatgcgtcagcgactcttag

SEQ ID NO: 286037 - DNA, 1053 bp, Artificial Sequence
  derived and/or modified sequence
atggaagtccctaatgttaaagatttccagtggaagcgtttggcccctcttccatcgcgccgagtctattgtagtctgcttgaaacggggggacaagtctatgctattggcggatgcgatgataatggagttccaatggattgctttgaggtctacagtccagaagcagaccagtggaccgccctacctcggctgccaacagccagagcaggtgttgctgtaacggcacttgggaagcgcattatggtgattggaggagtgggaacaaaccagctccctctgaaagttgtggaaatgtacaacatcgacgagggtaaatggaagaagcgtagcatgcttagggaggcggctatggggattagcgtgaccgctaaagattaccgtgtctatgcagcagggggaatgggtctggacctgcgaccgcacaaccacctgcagcactacgacatgttgaaagatatgtgggtgtcactggcccctatgcctacaccccgatacgccgcaacttcatttcttaggggcagcaaaatctacgttctcggcggaaggcagtcgaagtacgcggttaacgcatttgaggtcttcgacattgagacccgctcttggacaaaattccctaacatcccgtacaaaagagcctttagctctttcgtgacgctcgacaatcacctttactctttggggggtctgagacaaggtcgcctgtatcgacagccaaagtttttgcggacgatggatgtcttcgacatggagcagggtgggtggctcaagatggaacgctctttctttctgaagaagagacgggcagattttgtcgccggtagccttagcggcagagtcatcgtggccggtggtcttgggaatcaacctacagtacttgaaaccgcggaggcattccacccaggtaaaaacaagtgggagatcctgccagccatgccgacaccgagatgtgcatgctcttcaattgtggtcaaaaattgcttgctcgcggttggaggggtgaaccagggcctgtctgatgccgtggaagcgttgtgtgtgtctgactcctag

SEQ ID NO: 286038 - DNA, 714 bp, Artificial Sequence
  derived and/or modified sequence
atgatcgctgggtgtaggtcttttagcctgcagagcgattacagagtttacgcagccggaggcatgggacttgatctgaggccccataatcacttgcagcactacgacatgctgaaagacatgtgggtgagccttgccccaatgcctacgccaaggtacgctgcaacctcattcctgcggggatccaagatctatgtgctgggcggaagacagtctaaatatgccgtaaatgcctttgaggtgtttgacattgaaaccaggtcatggacaaaattcccaaatatcccatataaaagagcattttccagctttgtcactttggacaatcacctctattcattggggggactgcggcagggtaggctgtacagacaacccaagttccttagaaccatggacgtgttcgacatggagcaagggggttggcttaagatggaaagaagctttttcctgaagaagagacgcgcagactttgtggctggctctctctccggtcgcgtcatcgtagctggagggctcggcaaccagcccacagtgctggaaaccgccgaagccttccatcccggaaaaaataagtgggaaattctaccagctatgcccacaccacgatgcgcatgctcctcgatcgtggtcaaaaactgcctacttgcagttgggggtgttaatcaggggttatcggacgcagtggaagcactctgcgtctctgactcctag

SEQ ID NO: 286039 - DNA, 1053 bp, Artificial Sequence
  derived and/or modified sequence
atggaagtgcccaacgtgaaagactttcaatggaaacgcctcgcccctttgccatctcgtagagtgtattgttccctccttgagactggcggacaggtgtacgcaatcggcggttgcgatgataacggggtgcccatggattgttttgaggtgtactctcctgaggctgatcagtggacagctctgcctcgccttcctaccgcgagagcaggggtggccgtgaccgcactgggtaaaagaattatggtaataggaggggtagggactaaccagctgcctttgaaagtggtcgaaatgtacaacatcgatgagggtaaatggaagaagcgttccatgctgagggaagccgctatgggcatatctgtgactgccaaagactatagagtgtatgcagcagggggtatggggctcgacttgagaccacacaatcaccttcaacattatgatatgttgaaagatatgtgggtcagcctggccccaatgcccacccctaggtatgcagcaacaagttttctgaggggctctaaaatctatgtgctcgggggtcgacagtctaaatacgccgtcaatgcgtttgaggtgttcgacatcgagacccgcagttggactaagtttcccaacattccttacaagagagcatttagctctttcgtgacactagataaccatctgtactccctcggtggtttgcggcagggcagactgtatcgtcagccaaagttcctgaggaccatggacgtgtttgatatggagcagggcggttggctcaagatggaacggtccttctttttgaaaaaacgacgggcagattttgtggccggtagcctgtctggcagggtgattgtggcaggcggattgggcaaccagccaacagttttggaaacggcagaagcctttcacccaggaaagaacaaatgggagatcctgcccgctatgccaactccacgctgtgcttgcagttcaatcgtggtgaagaattgccttttggccgtcggaggcgtgaaccaaggattgtcagatgccgttgaagccctgtgtgtcagcgacagttag

SEQ ID NO: 286040 - protein, 240 aa, Artificial Sequence
  derived and/or modified sequence
MGDALGSVVVVITAIIFYVLPLKSEDPCNWQCYIDPSLTVLMVIIILSSAFPLIKETAAILLQMVPKGVNMEELMSKLSAVPGISSVHEVHIWELVSGKIIATLHIKYPKDRGYQDASTKIREIFHHAGIHNVTIQFENVDLKEPLEQKDLLLLCNSPCISKGCAKQLCCPPGALPLAHVNGCAEHNGGPSLDTYGSDGLSRRDAREVAIEVSLDSCLSDHGQSLNKTQEDQCYVNRTHF

SEQ ID NO: 286041 - DNA, 898 bp, Artificial Sequence
  derived and/or modified sequence
cttcaatgttcttaactatgtcatcttcttggactgctgttactgcgcagcacccaagccccagggagacatggaagcaggtgattccttcaacacccagaatgagccagaagacatgatgaaaaaagagaaaaagtctgaagctctgaatatcagaggtgtacttttgcatgtgatgggagatgccctggggtccgtggttgtggtcatcacggccatcatattctatgtgcttcccctgaagagtgaggacccgtgtaactggcagtgttacattgaccccagcctgactgtcctcatggtcatcatcattttgtcatctgccttcccgcttatcaaggagaccgctgccattctgctacagatggtcccaaaaggagtcaacatggaagagctgatgagtaaactctctgctgtgcctggaattagcagtgtacatgaagtgcacatctgggaacttgtaagtggaaagattattgccaccctgcacatcaagtatcctaaggacaggggatatcaagatgccagcacaaaaattcgagaaatcttccaccatgcgggaatccacaatgtgaccatccagtttgaaaatgtggacttgaaggaacccctggagcagaaggacttactgttgctctgcaactcaccctgcatctccaagggctgtgctaagcagctgtgttgtccccccggggcactgcctctggctcacgtcaatggctgtgctgagcacaatggtgggccctctctagacacatacggaagtgatggcctcagtagaagagacgcaagagaagtggctattgaagtgtctttggatagctgtctgagtgaccacggacaaagtcttaacaaaactcaggaggaccaatgttatgtcaacagaacgcatttttaa

SEQ ID NO: 286042 - protein, 430 aa, Artificial Sequence
  derived and/or modified sequence
MEWGKQWLVWLLLGHMVVSQMATLLARKHRPWILMLYGMWACWCVLGTPGVAMVLLHTTISFCVAQFRSQLLTWLCSLLLLSTLRLQGVEEVKRRWYKTENEYYLLQFTLTVRCLYYTSFSLELCWQQLPAASTSYSFPWMLAYVFYYPVLHNGPILSFSEFIKQMQQQEHDSLKASLCVLALGLGRLLCWWWLAELMAHLMYMHAIYSSIPLLETVSCWTLGGLALAQVLFFYVKYLVLFGVPALLMRLDGLTPPALPRCVSTMFSFTGMWRYFDVGLHNFLIRYVYIPVGGSQHGLLGTLFSTAMTFAFVSYWHGGYDYLWCWAALNWLGVTVENGVRRLVETPCIQDSLARYFSPQARRRFHAALASCSTSMLILSNLVFLGGNEVGKTYWNRIFIQGWPWVTLSVLGFLYCYSHVGIAWAQTYATD

SEQ ID NO: 286043 - DNA, 3594 bp, Artificial Sequence
  derived and/or modified sequence
aaagggcagctccgggggaaagagggtggcgtcccggggaagcccgcagccgccgccgatgtcgctgggactcggaagtgccgaaagaggggtgttgggaactcgcggcgcgcgtgaacgttgccgtcgccgccgcccgggacagcccggagaaactctcagcgtaggcatcgggaaccttcgtgccaaggagccatgctgccccgatgggaactggcactttacctacttgcctcactaggcttccacttctattccttctatgaagtttacaaagtctccagagaacacgaagaggagctggaccaggaatttgagctggagactgacactttatttggaggattaaagaaggatgcgaccgactttgagtggagcttctggatggaatgggggaagcagtggctggtgtggcttctccttggccacatggtagtgtctcaaatggccacactgctggcaagaaagcacagaccctggattctcatgctctatgggatgtgggcctgctggtgtgtgctggggacccctggtgtggctatggttttgctccataccaccatctctttctgcgtggcccagttccggtctcagctcctgacgtggctctgttctctcctcctcctctccacactgaggctgcagggtgtggaagaagttaagagaaggtggtacaagacagaaaacgagtactacctgctgcagttcacgctgaccgttcgctgcctgtactacaccagcttcagcctggagctctgctggcagcagctgcctgctgcatcgacctcctactcctttccctggatgctggcctatgtcttttattatccagtcttacacaatgggcccatcctcagcttctcggagttcatcaaacagatgcagcagcaggagcatgactccctgaaggccagcctgtgtgtcctggccctggggctgggccgccttctttgctggtggtggctggccgagctgatggctcacctgatgtacatgcatgccatctacagcagcatccccctcctggagactgtctcttgttggaccttaggaggactggcgttagcccaggtgctctttttctacgtgaagtacttggtgctctttggcgtgcctgctctgctcatgcgcctggatggactcactccacccgccctcccccgctgcgtgagcaccatgttcagtttcaccgggatgtggaggtattttgatgttggactgcataatttcttaatcaggtatgtgtacattccagtgggcgggtcccagcatggcctgctggggacactgttttccacggcgatgacatttgcatttgtgagctactggcatggcggctacgactacctctggtgctgggcagcgctcaactggctgggagtcactgtggagaatggagtccggaggctggtggagactccctgcatccaggacagtctggcccgatacttctccccacaagctcgccgtcgattccacgctgcccttgcttcttgttccacctcgatgctgatcctgtccaacctggtatttcttgggggcaatgaggttgggaaaacctactggaataggatcttcatacaaggctggccttgggtgaccctctctgtcctgggattcctgtactgctactcccacgtgggcattgcctgggcccagacctacgccacggactaatgctgttgggcccaggccagtccttgttgctggcctccaaggcaaatagtgcttcaccctgacctctcactccaggacagcctctaagggatttgatctgctcatcttcagttgaatgccctcactccaagactggatgctggatctcatagaaaattcacagccagacaatcttctaatctggagtctttgagatcttctaccccaactcatcattttcctattgaggaaacgggtccagggcagtcgtgtgtcttacccagctacacagggtgacattttggtctagaacctagtctcatgagccctttgcattctttccccttaagcaagaatagaatgtagtggaaatttattgattgagacacagaaatcctgattagtgataggcctgtcttctgggcaatatttctaaaatatttgagtgacattgatgtttaagtgacctccttcatcacatcctgcagtatctccagaagcagcactagggtttgagtttcatacttcagcccctctgtaggaatgagaccaagccacagctgtcttttgaattacgtagtcgaagaagacggtagcagccctgtagcattctaaggcatctatacccaaggagtcctgtgatttgagcttcagcagggtgatctacatttgggtgcttgtttctgagatttgcagagaagtataacatggtagttcctctaccttacagttaatcgtttcttaataaagaagcagaatttagaaaccacaggatagtgtacccacagatgggtgttatcaaggccagtcatgaggatggtgtcctggagtcttgtccaccctctccatacaagtctcaaaagtcatcctcctactcagtgattcacgtttagtggtttatattattaaggtttgattcaaacagagccttttctgtcctgtagataatctacatgtttgtagaattattttgaatatgtttgaggaaaatgtttaaaatctaaatatactcacataacttgattattcactcctctgaaaagatgctggataggctaccaaagttcccaagtggtagataattcagaagacttgtttgaatttggattttttttttttttggagtggggaagggtataaaggaggcttaaaatttgaatccataatatatctaattacaggagaatttacaacatctcaagtacgtaaattaagttgtcattgagtgaaaggttcacttggacctagtgctgcctcctgtttattacatagcatggcccttatgtcttgagttgaggttatcatctcaatgaggcttaagctcctagagtacaggaccattttgttgattgtctttcttcatagcttctctgcttggcaaagagatgggagggggccagatactgactacctggggtaggcacattatgtgttaaagcaagacagaggccagagaggggcaggtagacctgcatagcagcagcctcagcagctgtcttggtaaaggagagagagagacatggggccagtaattccggggtgctcagaagttttaggagggaatgagcctcagggaggagtgagcacctaaatgaacgcagtaaaccttcatggaccaacagtgattgaggatttgtgggcagccagagggagtctgactgaagtttacttggaaagaaagggcttgctaagaaaaaagggagtaaaaatgatgatagggaagtgtctaatgtatgtgcacatataagtaatacaaaagttttgagctcttccaagtataccatttatatacaaacaaataggtttattcattcattaaactactttggaagcgtcagtggatatatttgaaagtggtaatcctgaatctcttttaaactattatatgattcataatggttctcaggaattaataaatgattactgtgtttagctctg

SEQ ID NO: 286044 - DNA, 3626 bp, Artificial Sequence
  derived and/or modified sequence
agtgcgcccgggcaaaggcggggatctaggcgccgggacaagtccgcgcacggccctgcccacgtcctctctccttggcttcgtccccagcttccggaactgctgcggggagttgcgaactctggtcctcttggcagtatcggcggtgcgcctgcctgcctgctgtgactccagggactctaaaaaactctcagcgtaggcatcgggaaccttcgtgccaaggagccatgctgccccgatgggaactggcactttacctacttgcctcactaggcttccacttctattccttctatgaagtttacaaagtctccagagaacacgaagaggagctggaccaggaatttgagctggagactgacactttatttggaggattaaagaaggatgcgaccgactttgagtggagcttctggatggaatgggggaagcagtggctggtgtggcttctccttggccacatggtagtgtctcaaatggccacactgctggcaagaaagcacagaccctggattctcatgctctatgggatgtgggcctgctggtgtgtgctggggacccctggtgtggctatggttttgctccataccaccatctctttctgcgtggcccagttccggtctcagctcctgacgtggctctgttctctcctcctcctctccacactgaggctgcagggtgtggaagaagttaagagaaggtggtacaagacagaaaacgagtactacctgctgcagttcacgctgaccgttcgctgcctgtactacaccagcttcagcctggagctctgctggcagcagctgcctgctgcatcgacctcctactcctttccctggatgctggcctatgtcttttattatccagtcttacacaatgggcccatcctcagcttctcggagttcatcaaacagatgcagcagcaggagcatgactccctgaaggccagcctgtgtgtcctggccctggggctgggccgccttctttgctggtggtggctggccgagctgatggctcacctgatgtacatgcatgccatctacagcagcatccccctcctggagactgtctcttgttggaccttaggaggactggcgttagcccaggtgctctttttctacgtgaagtacttggtgctctttggcgtgcctgctctgctcatgcgcctggatggactcactccacccgccctcccccgctgcgtgagcaccatgttcagtttcaccgggatgtggaggtattttgatgttggactgcataatttcttaatcaggtatgtgtacattccagtgggcgggtcccagcatggcctgctggggacactgttttccacggcgatgacatttgcatttgtgagctactggcatggcggctacgactacctctggtgctgggcagcgctcaactggctgggagtcactgtggagaatggagtccggaggctggtggagactccctgcatccaggacagtctggcccgatacttctccccacaagctcgccgtcgattccacgctgcccttgcttcttgttccacctcgatgctgatcctgtccaacctggtatttcttgggggcaatgaggttgggaaaacctactggaataggatcttcatacaaggctggccttgggtgaccctctctgtcctgggattcctgtactgctactcccacgtgggcattgcctgggcccagacctacgccacggactaatgctgttgggcccaggccagtccttgttgctggcctccaaggcaaatagtgcttcaccctgacctctcactccaggacagcctctaagggatttgatctgctcatcttcagttgaatgccctcactccaagactggatgctggatctcatagaaaattcacagccagacaatcttctaatctggagtctttgagatcttctaccccaactcatcattttcctattgaggaaacgggtccagggcagtcgtgtgtcttacccagctacacagggtgacattttggtctagaacctagtctcatgagccctttgcattctttccccttaagcaagaatagaatgtagtggaaatttattgattgagacacagaaatcctgattagtgataggcctgtcttctgggcaatatttctaaaatatttgagtgacattgatgtttaagtgacctccttcatcacatcctgcagtatctccagaagcagcactagggtttgagtttcatacttcagcccctctgtaggaatgagaccaagccacagctgtcttttgaattacgtagtcgaagaagacggtagcagccctgtagcattctaaggcatctatacccaaggagtcctgtgatttgagcttcagcagggtgatctacatttgggtgcttgtttctgagatttgcagagaagtataacatggtagttcctctaccttacagttaatcgtttcttaataaagaagcagaatttagaaaccacaggatagtgtacccacagatgggtgttatcaaggccagtcatgaggatggtgtcctggagtcttgtccaccctctccatacaagtctcaaaagtcatcctcctactcagtgattcacgtttagtggtttatattattaaggtttgattcaaacagagccttttctgtcctgtagataatctacatgtttgtagaattattttgaatatgtttgaggaaaatgtttaaaatctaaatatactcacataacttgattattcactcctctgaaaagatgctggataggctaccaaagttcccaagtggtagataattcagaagacttgtttgaatttggattttttttttttttggagtggggaagggtataaaggaggcttaaaatttgaatccataatatatctaattacaggagaatttacaacatctcaagtacgtaaattaagttgtcattgagtgaaaggttcacttggacctagtgctgcctcctgtttattacatagcatggcccttatgtcttgagttgaggttatcatctcaatgaggcttaagctcctagagtacaggaccattttgttgattgtctttcttcatagcttctctgcttggcaaagagatgggagggggccagatactgactacctggggtaggcacattatgtgttaaagcaagacagaggccagagaggggcaggtagacctgcatagcagcagcctcagcagctgtcttggtaaaggagagagagagacatggggccagtaattccggggtgctcagaagttttaggagggaatgagcctcagggaggagtgagcacctaaatgaacgcagtaaaccttcatggaccaacagtgattgaggatttgtgggcagccagagggagtctgactgaagtttacttggaaagaaagggcttgctaagaaaaaagggagtaaaaatgatgatagggaagtgtctaatgtatgtgcacatataagtaatacaaaagttttgagctcttccaagtataccatttatatacaaacaaataggtttattcattcattaaactactttggaagcgtcagtggatatatttgaaagtggtaatcctgaatctcttttaaactattatatgattcataatggttctcaggaattaataaatgattactgtgtttagctctg

SEQ ID NO: 286045 - DNA, 3575 bp, Artificial Sequence
  derived and/or modified sequence
ctcttggctcaggcttggaggcctccgagcagcaacatcgtcccaattataccccgttggagcatcttcagatcttccactcttttcacaacgcaatcaaaatcttcgtacccattttgcagtagtgatctctaaactctcagcgtaggcatcgggaaccttcgtgccaaggagccatgctgccccgatgggaactggcactttacctacttgcctcactaggcttccacttctattccttctatgaagtttacaaagtctccagagaacacgaagaggagctggaccaggaatttgagctggagactgacactttatttggaggattaaagaaggatgcgaccgactttgagtggagcttctggatggaatgggggaagcagtggctggtgtggcttctccttggccacatggtagtgtctcaaatggccacactgctggcaagaaagcacagaccctggattctcatgctctatgggatgtgggcctgctggtgtgtgctggggacccctggtgtggctatggttttgctccataccaccatctctttctgcgtggcccagttccggtctcagctcctgacgtggctctgttctctcctcctcctctccacactgaggctgcagggtgtggaagaagttaagagaaggtggtacaagacagaaaacgagtactacctgctgcagttcacgctgaccgttcgctgcctgtactacaccagcttcagcctggagctctgctggcagcagctgcctgctgcatcgacctcctactcctttccctggatgctggcctatgtcttttattatccagtcttacacaatgggcccatcctcagcttctcggagttcatcaaacagatgcagcagcaggagcatgactccctgaaggccagcctgtgtgtcctggccctggggctgggccgccttctttgctggtggtggctggccgagctgatggctcacctgatgtacatgcatgccatctacagcagcatccccctcctggagactgtctcttgttggaccttaggaggactggcgttagcccaggtgctctttttctacgtgaagtacttggtgctctttggcgtgcctgctctgctcatgcgcctggatggactcactccacccgccctcccccgctgcgtgagcaccatgttcagtttcaccgggatgtggaggtattttgatgttggactgcataatttcttaatcaggtatgtgtacattccagtgggcgggtcccagcatggcctgctggggacactgttttccacggcgatgacatttgcatttgtgagctactggcatggcggctacgactacctctggtgctgggcagcgctcaactggctgggagtcactgtggagaatggagtccggaggctggtggagactccctgcatccaggacagtctggcccgatacttctccccacaagctcgccgtcgattccacgctgcccttgcttcttgttccacctcgatgctgatcctgtccaacctggtatttcttgggggcaatgaggttgggaaaacctactggaataggatcttcatacaaggctggccttgggtgaccctctctgtcctgggattcctgtactgctactcccacgtgggcattgcctgggcccagacctacgccacggactaatgctgttgggcccaggccagtccttgttgctggcctccaaggcaaatagtgcttcaccctgacctctcactccaggacagcctctaagggatttgatctgctcatcttcagttgaatgccctcactccaagactggatgctggatctcatagaaaattcacagccagacaatcttctaatctggagtctttgagatcttctaccccaactcatcattttcctattgaggaaacgggtccagggcagtcgtgtgtcttacccagctacacagggtgacattttggtctagaacctagtctcatgagccctttgcattctttccccttaagcaagaatagaatgtagtggaaatttattgattgagacacagaaatcctgattagtgataggcctgtcttctgggcaatatttctaaaatatttgagtgacattgatgtttaagtgacctccttcatcacatcctgcagtatctccagaagcagcactagggtttgagtttcatacttcagcccctctgtaggaatgagaccaagccacagctgtcttttgaattacgtagtcgaagaagacggtagcagccctgtagcattctaaggcatctatacccaaggagtcctgtgatttgagcttcagcagggtgatctacatttgggtgcttgtttctgagatttgcagagaagtataacatggtagttcctctaccttacagttaatcgtttcttaataaagaagcagaatttagaaaccacaggatagtgtacccacagatgggtgttatcaaggccagtcatgaggatggtgtcctggagtcttgtccaccctctccatacaagtctcaaaagtcatcctcctactcagtgattcacgtttagtggtttatattattaaggtttgattcaaacagagccttttctgtcctgtagataatctacatgtttgtagaattattttgaatatgtttgaggaaaatgtttaaaatctaaatatactcacataacttgattattcactcctctgaaaagatgctggataggctaccaaagttcccaagtggtagataattcagaagacttgtttgaatttggattttttttttttttggagtggggaagggtataaaggaggcttaaaatttgaatccataatatatctaattacaggagaatttacaacatctcaagtacgtaaattaagttgtcattgagtgaaaggttcacttggacctagtgctgcctcctgtttattacatagcatggcccttatgtcttgagttgaggttatcatctcaatgaggcttaagctcctagagtacaggaccattttgttgattgtctttcttcatagcttctctgcttggcaaagagatgggagggggccagatactgactacctggggtaggcacattatgtgttaaagcaagacagaggccagagaggggcaggtagacctgcatagcagcagcctcagcagctgtcttggtaaaggagagagagagacatggggccagtaattccggggtgctcagaagttttaggagggaatgagcctcagggaggagtgagcacctaaatgaacgcagtaaaccttcatggaccaacagtgattgaggatttgtgggcagccagagggagtctgactgaagtttacttggaaagaaagggcttgctaagaaaaaagggagtaaaaatgatgatagggaagtgtctaatgtatgtgcacatataagtaatacaaaagttttgagctcttccaagtataccatttatatacaaacaaataggtttattcattcattaaactactttggaagcgtcagtggatatatttgaaagtggtaatcctgaatctcttttaaactattatatgattcataatggttctcaggaattaataaatgattactgtgtttagctctg

SEQ ID NO: 286046 - protein, 372 aa, Artificial Sequence
  derived and/or modified sequence
FVFKAYMYLNEGQKLLKTLKKDKSWSQTFESATFYSLKGEVCFNMGQIVLAKKMLRKALKLLNRIFPYNLISLFLHIHVEKNRHFHYVNRQAQESPPPGKKRLAQLYRQTVCLSLLWRIYSYSYLFHCKYYAHLAVMMQMNTALETQNCFQIIKAYLDYSLYHHLAGYKGVWFKYEVMAMEHIFNLPLKGEGIEIVAYVAETLVFNKLIMGHLDLAIELGSRALQMWALLQNPNRHYQSLCRLSRCLLLNSRYPQLIQVLGRLWELSVTQEHIFSKAFFYFVCLDILLYSGFVYRTFEECLEFIHQYENNRILKFHSGLLLGLYSSVAIWECEAGVGRRLHTSRDPGMPDFRNGTTFTNFPIELKIFCQEEP

SEQ ID NO: 286047 - protein, 2969 aa, Artificial Sequence
  derived and/or modified sequence
MDPRNTAMLGLGSDSEGFSRKSPSAISTGTLVSKREVELEKNTKEEEDLRKRNRERNIEAGKDDGLTDAQQQFSVKETNFSEGNLKLKIGLQAKRTKKPPKNLENYVCRPAIKTTIKHPRKALKSGKMTDEKNEHCPSKRDPSKLYKKADDVAAIECQSEEVIRLHSQGENNPLSKKLSPVHSEMADYINATPSTLLGSRDPDLKDRALLNGGTSVTEKLAQLIATCPPSKSSKTKPKKLGTGTTAGLVSKDLIRKAGVGSVAGIIHKDLIKKPTISTAVGLVTKDPGKKPVFNAAVGLVNKDSVKKLGTGTTAVFINKNLGKKPGTITTVGLLSKDSGKKLGIGIVPGLVHKESGKKLGLGTVVGLVNKDLGKKLGSTVGLVAKDCAKKIVASSAMGLVNKDIGKKLMSCPLAGLISKDAINLKAEALLPTQEPLKASCSTNINNQESQELSESLKDSATSKTFEKNVVRQNKESILEKFSVRKEIINLEKEMFNEGTCIQQDSFSSSEKGSYETSKHEKQPPVYCTSPDFKMGGASDVSTAKSPFSAVGESNLPSPSPTVSVNPLTRSPPETSSQLAPNPLLLSSTTELIEEISESVGKNQFTSESTHLNVGHRSVGHSISIECKGIDKEVNDSKTTHIDIPRISSSLGKKPSLTSESSIHTITPSVVNFTSLFSNKPFLKLGAVSASDKHCQVAESLSTSLQSKPLKKRKGRKPRWTKVVARSTCRSPKGLELERSELFKNVSCSSLSNSNSEPAKFMKNIGPPSFVDHDFLKRRLPKLSKSTAPSLALLADSEKPSHKSFATHKLSSSMCVSSDLLSDIYKPKRGRPKSKEMPQLEGPPKRTLKIPASKVFSLQSKEEQEPPILQPEIEIPSFKQGLSVSPFPKKRGRPKRQMRSPVKMKPPVLSVAPFVATESPSKLESESDNHRSSSDFFESEDQLQDPDDLDDSHRPSVCSMSDLEMEPDKKITKRNNGQLMKTIIRKINKMKTLKRKKLLNQILSSSVESSNKGKVQSKLHNTVSSLAATFGSKLGQQINVSKKGTIYIGKRRGRKPKTVLNGILSGSPTSLAVLEQTAQQAAGSALGQILPPLLPSSASSSEILPSPICSQSSGTSGGQSPVSSDAGFVEPSSVPYLHLHSRQGSMIQTLAMKKASKGRRRLSPPTLLPNSPSHLSELTSLKEATPSPISESHSDETIPSDSGIGTDNNSTSDRAEKFCGQKKRRHSFEHVSLIPPETSTVLSSLKEKHKHKCKRRNHDYLSYDKMKRQKRKRKKKYPQLRNRQDPDFIAELEELISRLSEIRITHRSHHFIPRDLLPTIFRINFNSFYTHPSFPLDPLHYIRKPDLKKKRGRPPKMREAMAEMPFMHSLSFPLSSTGFYPSYGMPYSPSPLTAAPIGLGYYGRYPPTLYPPPPSPSFTTPLPPPSYMHAGHLLLNPAKYHKKKHKLLRQEAFLTTSRTPLLSMSTYPSVPPEMAYGWMVEHKHRHRHKHREHRSSEQPQVSMDTGSSRSVLESLKRYRFGKDAVGERYKHKEKHRCHMSCPHLSPSKSLINREEQWVHREPSESSPLALGLQTPLQIDCSESSPSLSLGGFTPNSEPASSDEHTNLFTSAIGSCRVSNPNSSGRKKLTDSPGLFSAQDTSLNRLHRKESLPSNERAVQTLAGSQPTSDKPSQRPSESTNCSPTRKRSSSESTSSTVNGVPSRSPRLVASGDDSVDSLLQRMVQNEDQEPMEKSIDAVIATASAPPSSSPGRSHSKDRTLGKPDSLLVPAVTSDSCNNSISLLSEKLTSSCSPHHIKRSVVEAMQRQARKMCNYDKILATKKNLDHVNKILKAKKLQRQARTGNNFVKRRPGRPRKCPLQAVVSMQAFQAAQFVNPELNRDEEGAALHLSPDTVTDVIEAVVQSVNLNPEHKKGLKRKGWLLEEQTRKKQKPLPEEEEQENNKSFNEAPVEIPSPSETPAKPSEPESTLQPVLSLIPREKKPPRPPKKKYQKAGLYSDVYKTTDPKSRLIQLKKEKLEYTPGEHEYGLFPAPIHVVFFVSGKYLRQKRIDFQLPYDILWQWKHNQLYKKPDVPLYKKIRSNVYVDVKPLSGYEATTCNCKKPDDDTRKGCVDDCLNRMIFAECSPNTCPCGEQCCNQRIQRHEWVQCLERFRAEEKGWGIRTKEPLKAGQFIIEYLGEVVSEQEFRNRMIEQYHNHSDHYCLNLDSGMVIDSYRMGNEARFINHSCDPNCEMQKWSVNGVYRIGLYALKDMPAGTELTYDYNFHSFNVEKQQLCKCGFEKCRGIIGGKSQRVNGLTSSKNSQPMATHKKSGRSKEKRKSKHKLKKRRGHLSEEPSENINTPTRLTPQLQMKPMSNRERNFVLKHHVFLVRNWEKIRQKQEEVKHTSDNIHSASLYTRWNGICRDDGNIKSDVFMTQFSALQTARSVRTRRLAAAEENIEVARAARLAQIFKEICDGIISYKDSSRQALAAPLLNLPPKKKNADYYEKISDPLDLITIEKQILTGYYKTVEAFDADMLKVFRNAEKYYGRKSPVGRDVCRLRKAYYNARHEASAQIDEIVGETASEADSSETSVSEKENGHEKDDDVIRCICGLYKDEGLMIQCDKCMVWQHCDCMGVNSDVEHYLCEQCDPRPVDREVPMIPRPHYAQPGCVYFICLLRDDLLLRQGDCVYLMRDSRRTPDGHPVRQSYRLLSHINRDKLDIFRIEKLWKNEKEERFAFGHHYFRPHETHHSPSRRFYHNELFRVPLYEIIPLEAVVGTCCVLDLYTYCKGRPKGVKEQDVYICDYRLDKSAHLFYKIHRNRYPVCTKPYAFDHFPKKLTPKKDFSPHYVPDNYKRNGGRSSWKSERSKPPLKDLGQEDDALPLIEEVLASQEQAANEIPSLEEPEREGATANVSEGEKKTEESSQEPQSTCTPEERRHNQRERLNQILLNLLEKIPGKNAIDVTYLLEEGSGRKLRRRTLFIPENSFRK

SEQ ID NO: 286048 - protein, 2964 aa, Artificial Sequence
  derived and/or modified sequence
MDPRNTAMLGLGSDSEGFSRKSPSAISTGTLVSKREVELEKNTKEEEDLRKRNRERNIEAGKDDGLTDAQQQFSVKETNFSEGNLKLKIGLQAKRTKKPPKNLENYVCRPAIKTTIKHPRKALKSGKMTDEKNEHCPSKRDPSKLYKKADDVAAIECQSEEVIRLHSQGENNPLSKKLSPVHSEMADYINATPSTLLGSRDPDLKDRALLNGGTSVTEKLAQLIATCPPSKSSKTKPKKLGTGTTAGLVSKDLIRKAGVGSVAGIIHKDLIKKPTISTAVGLVTKDPGKKPVFNAAVGLVNKDSVKKLGTGTTAVFINKNLGKKPGTITTVGLLSKDSGKKLGIGIVPGLVHKESGKKLGLGTVVGLVNKDLGKKLGSTVGLVAKDCAKKIVASSAMGLVNKDIGKKLMSCPLAGLISKDAINLKAEALLPTQEPLKASCSTNINNQESQELSESLKDSATSKTFEKNVVRQNKESILEKFSVRKEIINLEKEMFNEGTCIQQDSFSSSEKGSYETSKHEKQPPVYCTSPDFKMGGASDVSTAKSPFSAVGESNLPSPSPTVSVNPLTRSPPETSSQLAPNPLLLSSTTELIEEISESVGKNQFTSESTHLNVGHRSVGHSISIECKGIDKEVNDSKTTHIDIPRISSSLGKKPSLTSESSIHTITPSVVNFTSLFSNKPFLKLGAVSASDKHCQVAESLSTSLQSKPLKKRKGRKPRWTKVVARSTCRSPKGLELERSELFKNVSCSSLSNSNSEPAKFMKNIGPPSFVDHDFLKRRLPKLSKSTAPSLALLADSEKPSHKSFATHKLSSSMCVSSDLLSDIYKPKRGRPKSKEMPQLEGPPKRTLKIPASKVFSLQSKEEQEPPILQPEIEIPSFKQGLSVSPFPKKRGRPKRQMRSPVKMKPPVLSVAPFVATESPSKLESESDNHRSSSDFFESEDQLQDPDDLDDSHRPSVCSMSDLEMEPDKKITKRNNGQLMKTIIRKINKMKTLKRKKLLNQILSSSVESSNKGKVQSKLHNTVSSLAATFGSKLGQQINVSKKGTIYIGKRRGRKPKTVLNGILSGSPTSLAVLEQTAQQAAGSALGQILPPLLPSSASSSEILPSPICSQSSGTSGGQSPVSSDAGFVEPSSVPYLHLHSRQGSMIQTLAMKKASKGRRRLSPPTLLPNSPSHLSELTSLKEATPSPISESHSDETIPSDSGIGTDNNSTSDRAEKFCGQKKRRHSFEHVSLIPPETSTVLSSLKEKHKHKCKRRNHDYLSYDKMKRQKRKRKKKYPQLRNRQDPDFIAELEELISRLSEIRITHRSHHFIPRDLLPTIFRINFNSFYTHPSFPLDPLHYIRKPDLKKKRGRPPKMREAMAEMPFMHSLSFPLSSTGFYPSYGMPYSPSPLTAAPIGLGYYGRYPPTLYPPPPSPSFTTPLPPPSYMHAGHLLLNPAKYHKKKHKLLRQEAFLTTSRTPLLSMSTYPSVPPEMAYGWMVEHKHRHRHKHREHRSSEQPQVSMDTGSSRSVLESLKRYRFGKDAVGERYKHKEKHRCHMSCPHLSPSKSLINREEQWVHREPSESSPLALGLQTPLQIDCSESSPSLSLGGFTPNSEPASSDEHTNLFTSAIGSCRVSNPNSSGRKKLTDSPGLFSAQDTSLNRLHRKESLPSNERAVQTLAGSQPTSDKPSQRPSESTNCSPTRKRSSSESTSSTVNGVPSRSPRLVASGDDSVDSLLQRMVQNEDQEPMEKSIDAVIATASAPPSSSPGRSHSKDRTLGKPDSLLVPAVTSDSCNNSISLLSEKLTSSCSPHHIKRSVVEAMQRQARKMCNYDKILATKKNLDHVNKILKAKKLQRQARTGNNFVKRRPGRPRKCPLQAVVSMQAFQAAQFVNPELNRDEEGAALHLSPDTVTDVIEAVVQSVNLNPEHKKGLKRKGWLLEEQTRKKQKPLPEEEEQENNKSFNEAPVEIPSPSETPAKPSEPESTLQPVLSLIPREKKPPRPPKKKYQKAGLYSDVYKTTDPKSRLIQLKKEKLEYTPGEHEYGLFPAPIHVGKYLRQKRIDFQLPYDILWQWKHNQLYKKPDVPLYKKIRSNVYVDVKPLSGYEATTCNCKKPDDDTRKGCVDDCLNRMIFAECSPNTCPCGEQCCNQRIQRHEWVQCLERFRAEEKGWGIRTKEPLKAGQFIIEYLGEVVSEQEFRNRMIEQYHNHSDHYCLNLDSGMVIDSYRMGNEARFINHSCDPNCEMQKWSVNGVYRIGLYALKDMPAGTELTYDYNFHSFNVEKQQLCKCGFEKCRGIIGGKSQRVNGLTSSKNSQPMATHKKSGRSKEKRKSKHKLKKRRGHLSEEPSENINTPTRLTPQLQMKPMSNRERNFVLKHHVFLVRNWEKIRQKQEEVKHTSDNIHSASLYTRWNGICRDDGNIKSDVFMTQFSALQTARSVRTRRLAAAEENIEVARAARLAQIFKEICDGIISYKDSSRQALAAPLLNLPPKKKNADYYEKISDPLDLITIEKQILTGYYKTVEAFDADMLKVFRNAEKYYGRKSPVGRDVCRLRKAYYNARHEASAQIDEIVGETASEADSSETSVSEKENGHEKDDDVIRCICGLYKDEGLMIQCDKCMVWQHCDCMGVNSDVEHYLCEQCDPRPVDREVPMIPRPHYAQPGCVYFICLLRDDLLLRQGDCVYLMRDSRRTPDGHPVRQSYRLLSHINRDKLDIFRIEKLWKNEKEERFAFGHHYFRPHETHHSPSRRFYHNELFRVPLYEIIPLEAVVGTCCVLDLYTYCKGRPKGVKEQDVYICDYRLDKSAHLFYKIHRNRYPVCTKPYAFDHFPKKLTPKKDFSPHYVPDNYKRNGGRSSWKSERSKPPLKDLGQEDDALPLIEEVLASQEQAANEIPSLEEPEREGATANVSEGEKKTEESSQEPQSTCTPEERRHNQRERLNQILLNLLEKIPGKNAIDVTYLLEEGSGRKLRRRTLFIPENSFRK
